United States Patent Application Publication US 2009/0018031 A1 - sequence listing, part 13

SEQ ID NO: 6582 - DNA, 6000 bp, Homo sapiens
ctactaaaaatacaaaaaaaaaaaaactggccagtcatggtggtaggtgcctataatctgtaatcccacctacttaggaggctgaggcaggagaaattgcttgaactggggaggcagaagctgcagtgagccaagatcgtgccactgcactccagcctgggcgacagagcaagactcggtctcaaaaaaaagaaaagaaaagaaaatcatcatccagagttagattttttttctaagtactagtatttttttcattactcacagctctttaatataaaaataacttatctggactacagtttattaggagtgtccaatcttttggcttccctgggccatactggaagaactgtcttgggccatacataaaatacactaacaatcgctaatgagctttaaaaaaaaaaaaatcgcaaaaaacctcattttttatttatttatttatttattttttttttgagacagagtctcgctctgtcgcccaggctggagtgtagtggcacaatctcagctcgctgcaacctctgcctcctgggttcaagtgattctcccacctcagcctccccagtagctgggactataggcctgcgccaccatgcccggctaatttttgtattttttagtaaagagacgaggtttcaccatgttggccaggctggccttaaactcttgacctcaggtgatcctgaggccctcctcaaagtgctcccaaagggctgggattacaggtgtgagccaccgcgcccagccagaaaaactcataacattttaagcacgtttatgaatttgtgttgggtctcattcaaaacccatcctgggccacatgtggcctgcagaccacaggttggacaagcttggtttaaatcaaaagaagcatgcagtaattacagtgacaaacactcttgtttagaaaatcaccaggtagggttacatctgtggttggttgtacatcttgcttgaaactatgaaaggactgtttaattgctactctgaagaggacaagttataatctaatttgtttaggaaggtaattgttaaaagcagcaactattttaaagagggattttacaagtccatgcaaactccacacctcccccaacaagaaaaacttggcctttttaagtacaaaggggagatattatgcagacaaaaatattctgactttgtcaataagggcaaatatgacatttaccattcattaatgtttacgattcggtagacacaattccaggcattttacactcatgatttcatttaatcctctcaacctcacaataggtatgattatccctattcaacatataaggaaactgtgcttttggaggttaatttctaataatttgccaaaaatcccacaacttgtaatgcacaaaagcagaatttcaacccatgtctctctgatttaaaagcccaagctcctaaccttgaataaatcagtagtgttaggtaaaactgcaaccttctgatattgtaaatatggatggctttcaagttgtccacatagtgctattttggaactgttttatttttcattactgacacagggtaaacactaataaatacttgttcaatgaataaaagaactgtactctgaccctccattccctttatttttttagacagggtcgtctctgtcacccaggctggagttcagtggtgcaatcgcagctcactggagcctttaactactgggctcaagcaaacctcccatttcagcctcccaagtaggtgagactacaggcacatgcagccatgcccagctaaaaactttttgtagagatgagatctccctatgttgcccaggctagtcctcaactcctggctttaagctatcctcccactttagcctcccaaaatgctgagattacaggtatgaaccacacctggccagacccctatttttaaaaatttacaaaatcaataaattaggtgttaagcaagtccgattgaaatacaaaggggaaagaataaaggcattaagcaactttgcagatttctaatcacgcacttgtgccatttttattgagcatctactatgtgccaaaaggaaggtgtcacatatttggtaatataaggagcaaaaaaattcagtcctcacgctgggcatcaggaaaacagataaattataactcaacatgttaaatgctgtcagggagagatccacaaagttctgttagaacacagatcaccaacattcaactcaacaactcaacctgtgtgggagtcagaatggttcaccaagtacttaagtacctgacatatgagcagggttgtacaggagaattgttttctgggtgaaggaggaaatagagaagaaagggctttccatgtagaggcttgaagttgtgtaagtgcctgacaaaatcccacacgacagaagctgtgcgtacaagcaagcatatatatgtgcacatgtacagcaactggtatggcaactagaaaaggtacattgaaggtcgggtgcggtggctcacgcctgtaatcccagcactctgggaggccaaggcaggaggatcacctgcggtctcaggagttcgagatcagcctggccaacatggcgaaaccccatctctactaaaaatacaaaaattagccaggtgtggtggcacacgcctgtaatcccagctacttgggaggctgaggcaggagaattgcttgaacccgggaggcgaaggttgcagcgagccgagatcgcgccactgcatccagcctacgcaacagagtgagactcagtccaaaactaagaggtttggattttattctgtaacagggtcaagaaatttttacgcaggtttgtttttagaaagtaactgacaatacaatagaaaatggactggggtagggagaaatgggtgacaggacatgaaagaggaatagtccctgggaaagattatagggatctaaagaataaggagtaataaagcaaaggacaattctggcataggataaacaagatatcatgaccaactggaagtaggagatgaaaaaagacataaaacaaggacacgaagatttacagtttaggaaactgagagtgaagctattaagaatgagaaaacagcacatttggcaggagaacaaaatgaacaccaccttaaacctggaagacatccaggttgagggatgcatattctctggcttagggtctaaggaacagccaaccgttttcccctatctaggatacaaggagcgaccagtcatttcccatagttatccagcccttctgtgcttctgactgccctcaaggtcccatgctttcccccacacataaagaagccctttcatttctatccccaaagctgtctcactgatgcacctttatggcatggggaacgtaaagcggtaaaatggatttcggtagctccccagtctattcttccttccatctaaatagaccccacagaaattcaaaacataagcattatctttctatcaaacaatctttcccgatttctaccaaataaatatgaaggatctgttaaattagcaattaaaaaaaaaaactaagccagaatactaatttattaaatttatttataagaaatacaattgtcaaagcagcagctctcacccaaaagaacagcccattatctccctggagcagacttagattgaaacttaaaaactgttttgatccaaacattgcttactaaaatgccaagaaatcaaaatagtaattaatggatagtaactaatgtagccattgattaccatgtaactctgggtcactattcattagtaaaacgagattgaggacttcaaaaatgagtgaagattgctaagggtaccttaagaatagggttgtcttccctattctactgtcgaaatatgggcgaaatgggcgattatacacaaaaatacattctcagctggaacgctataatgtatcatcacaataaggaaaagtaaaaaataattaaatagaaaaacatggccgtgtttcataacatactcaagacagaaaagagcaaaactcaccaagtgtttaaattatgagttatttcaactgttacaaaaatagaaaacagatatacaattctttaaactgggtcagaatacaggaagatgttaagaatgagatcagcccccaaactgagggcaaagtggtgggcgtggatcaaccaaacgaaaataaactcgacttaacgtaggagcagtttcactctactgtactttgagatatccagaatatttaaagagaggagaaccaggactcttcccctggcccccagtggtctttcatcatagaaaatctgttgagaagaggcaagaggaggtgtgtgaagaaaaaagggaggagcagcattcctttgcgacctgtccgcgtctcctgactgatggaagtagggaccaaacggacgttcccagggtcttagaaaagccctcccttccctcgctccagctgttaccttccacttcctccgtgccctccatcagcatatcctttgtaaagtttgatatctggccagtgagggaagccaggctgcccccgacttgacccagagactggcccaatccggagccgaggcccccaagccaggacgacatcgcggcgagtttagagaacgacccggtccgctcggaaaaaagaaaacgtttagcgccgccgggcgatccgaccaaatatccttgaacgcctgccttcgcgagacaggatacgataacacaaagctgggttctcaggcaaggccgactccaggttctgcctagaaacgcagaggcctggcctggaattttaccaggggcccgcctctagtgacacagtcacctacggagggccttctgctcattcccacgaattcccaccgtccagattgggccacttctttctcagctctaatgactttcctcagttccgtgggttactcctgccaactcgacgccggccgccatgacactcgctcggaaagcggcagcggatcatagaaaagcgccgcggtggcgtagacaggccccgcgaagccgccggacgtgtccttggcgcaagggaggctgggatcgcggaggaccgagcgcgggctggattaaccgcagccagtgcctagcgcaaggttaggtgcatgcaggcggccagcttcggccggggaaggaatggcctggataactggggcatcgcggcgctcctcggcctcctgcagctgcgtttcaaagcagagccgacccttggtgggtagtccggggaccctgcggaccctccttgtgttgttgaaacctagtgttttaattgggactacacccagcagtgccgggagacttggcggggacgttccactgcgcaggaagtggcttcaaataacttacacgcgtcactgtgtcgattagctgctccgtgacaggcactatggtaggagctgaggctacaaagatagaacggatgggttgcaaaaaaaaaaaaggaaaaaggaaaaaagaaaggatgggttgcaaattcaggtgtccaagcaggaaacacaccttccttctataggagaaatctcctctggtggctttatagctcacaattgaaaccctaccttctttaacatacgatgagcttttttcatgaagctgccctcacccaagtagttgaaaaacggacaaccgtttttcaaaatgactcgttagaagacagcagggcaacttaatagagaagtgccgtttagtgtcaacgctcctatggtattggcggcactagctatgcaagtgcccacacctccctcagtccttagttacccacactggctgtaacacacagagtcctaccttgcttgcttccttccctaaaggaagaaaggttgtcatgtgactttcaagcaattggtgcaggatacgtggacacacagcatctagccagggagacttccacattttttggtttcaaaaggatatgatagatctgcagttcttttaagcatagcaataagtatactggcatctttcactttgattatattcacaagaggggctatcacagattgcacagtttgtgaacagaacattgggaatgcctccagtatttgg

SEQ ID NO: 6583 - DNA, 6000 bp, Homo sapiens
tatgcctaaccaaggaggtgaatgacctctaaaaggaaaactacaaaacactgctgaaagaaataacagatgacataaacaaatggaaacacatcccatgctcatggatggatagagtcaacattgtgaaaatgatcatactgccaaaagcaatctacaaattgcttcaagttcattgcagattctggatattagtcttcccatcaatacaattcccataaaaataccatcattcttcagagaactagaaaaaacaatcctaaaattcatatagaaccaaaaaagagcccacatagccaaagcaagactaagcaaaaagataaatctggaggcacaacattacctgatttcaaactataccataaggccatagtcaccaaaacagcatggtactggtataaaaataggcacatacaccaatggaacaaaacagagaacctagaaagaaacccaaatacttatagccaactgatcttcaacaaaacaaacaaacatataaagtggggaaaggacatcctattcaacacatggtactaggataactggcaagccacatgtaggagaatgaaactggatcctcatctctcaccttatacaaaaatcaactcaagatggatcagggacttacatctaagacctgaaactataaaaattctagaagataacatcagaaaaacccttctagacattggcttaggcaagggtttcatgaccaagaacccaaaagcaaatgcaataaaaacaaagataaatagttgggactaaagagcttttgcgtggcaaaaggaacagtcagcagagtaaacagacaacccacatagtgggagaaaatcttcacaatctatacatctgacagaagactaacatctagaatctacaatgaactcaaacaaattagcagaaaaaaacaatcccatcaaaaagtgggctaaggacatgaagacaattctcaaaagaagatatatgaatggccaagaaatatatgaaaaaatgctcaacatcactaatcatcaggaaaatgcaaatcaaaaccacaatgtgataccaccttactccccgcaagaatggccataatcaaaaaattaaaaaaaaatagatgttggcgtggatatggtgtaaagggaacacttctacactgctggtgggaatgtaaactagtacaaccactatggaaaacagtgtggagattccttaaataactaaaattagaactaccatttgatcgagcaattccactactgggtagctacccagaggaaaggaagtcattatacaaaaaagatacttgcacacgcatgtttatagcagcacaatttgcaattgcaaaaaatgtggaaccaacccaaatgcccatcaatcaatgagtggataaagaagctgtggtatatatatatgatggaatactagttagccataaaagggaatgaattaatggcattcgcagcaacctgaataggattggaatttattactctttttttttttttttttttttttttttgtgaaacagaatcttgctctgtcgccaggctggagtgcagtggcgcagtctcagctcactgcaacctccgcctcccaggttcaagtgattcccctgcctcagcctcccaagtagctgggattacaggcatatgccaccacgcccagctaattttttgtattttagtagagatggggtttcaccatgttgaccaagatggtctcaatctcctgacctcgtgatccacctgccttggcctcccaaagtgctgggattacaggcgtgagccactgcacctggcctggagtttattattctaagtgaagtaactcaggaatggaaaaccaaacatcgtatgttcttactcaaaagtgggagctaagctatgaggatgcaaaggcataagaatgacataataggctgggcgcagtggctcatgcctgtaatcccaacactttgggaggccgaggcgggtggatcacgaggccaggagattgagaccatcctggctaacacggtgaaaccctgtctctactaaaaatataaaaaattagccgggcatagtggcaggtgcctatagtcccagctactcaggaggctgaagcaggagaatggtgtgaacccgggaggcagagcttgcagtgagctgagatcatgccactgcactccagcctgggtgacagagcgagactctgtctcaaaaaaataaataagcaaataaataaaaaagaatgatacaataggctgggtgcagtggctcacacctgtaatcccagcactttgggaggctgaggcaggcagatcacttgaggtcaggagttcaagaccagcccggtcaacatggcgaaaccgcatctctactaaaaatatgagagtttgccgggcgtggtggcatgtgcctatagtcccagctactcaggaggctgaggcaggagaattgcttgagaccaggaggcagaggccgcagtgagttgagattgcaccactgcactccagcctgggcaacagagcataaccctgtctcaaaaataaaaataaaaaataaacatgcacttaccatatgacccagcaattgtactcttgggcacttatcctagagaaacaaaaacaggttcacacaaaaggctgtacactcatgttcacagctgcttgattcacaatagctaaaaactagaaacaactcaaatgtccttcaatgagtgaacagttgaatgtacttgtattagtccattttcacactgctgataaagacatacccgagaccgagaagaaaaagaggtttaatggacttacagttccacatggctggggaggcctcacaatcatggtggaaggcaaggaggagcaagtcacatcttacatggatggcagcatgcaaagaaagaacttgtgcagggaaacctcccgtttttaaaaccatcacatcttgtgaggctcattcactatctggagaacagcacaggaaggacctgcctccataattcaatcacctcccacctggttcctcccacaacacatgggaatggtgagttacaattcaagatgagatttgggtggggacacagccaaaccatatcaatactgtagtacatctacattatggaataccactcagtaataaaaaggaaggaactactgatacatgtaacagtttggatatatctcaagggattatgctgaatgaaaaagagtcaataaaagttacatactgtataattacaataattacatttatgtaacattcttgatataacaaaattttagaaacagagaatagattgggtggggctgcaaaggtaagttgtggttataaaagggcaactggagggacccttgtggtgatggacctgggctgtaccttgactgtggtggtggatacaagaatctacacacctgataaccatatagaactaaatatacacagagaacactaatacaaaatgaggaatctgaatgagatcaatggattgtgtgaatgtcaattacctggttgtgatatggtactagttttgcaagatgctaccactgggaagactgggtaaagggtacacagaatctctattcttacaattgcatggaaatccacaattacctcacaaagttgaataaccatctctttttttcatctgtgatggaacaagcaggcaatattctacattgttttaacaaataaagcaaactatgtaccactgttctggtggtaaaaccctttaaccataataaatgtcatcacgtagcaaatgcttcactgtgctaaacacctgctgaccttatctcgtgtaatccgctcaacggccctaagactagggagacactgctatcattcctagttcactgaggagggtctgaggcaaagaggtgaagtgatttcctggagctacctgaccaaagactggaaccaagattcttagaggcacacgaagtccttctggtaataaatctgtataattctatttgttatgttcagctgtcctaaccctaaaaattaaaaactgccatcaagcatacagaatgagtgttagcaacaccggcacagtgacaattttaaagagttagaaggtcctttagagattacacagcccatcgccctcatttttacataaagggaatcaggtgaagtgacctgcacaggtgagtcgctgctcagagaccgcacagcacatttaaaactgtatctcggttcagtactcaagaaaaggacacagacttataaatggtggcaaaaaccgagctgtctggttcttccggtacccagtgccgggtcgagtacagagcaggcgctccatatttacaagacgaatcaatgactgaatgaatagcaccgccaggagccccataaaagaagtccagaagactgcgggctgtcagtcttcgctgtgacaaagagcctccgtgaggagcgaggattagggccggacagggagcgcccttctagtggacgctcgactgggctggggccgggatggagacggtgggtgcccaggccctccgtctaccgcgggccgcgtgcggggccgagcgaggacccggctggagctggagcgggggcggggcgggggcggggccgagggcgagccggaagaaagaagccgcagggcccgcccaaacaagaattttcaccgtaatcccgcccagagtttctcccacggccccatgtccgcatggcggtgaaggtcgaagacgcgcgacccaaagggccaggttttcagtcagcccagcgttggcgacgggcgagggcagaacacaaccaccaccctagtcccgcccggctcggggcctagcttctctactcacagcgtcggagggagggagggagggagcgagccagcgtccccgcgtctgcggcaccctggccggcccttcgccctccgacgcgcgcgcctattggccaccgcagcctctcccacatggggcgaaggcgcgccacttcattggcccccgcgtgaggggcggggctaaagagcgcgggtcctcggccgtggagggtcaagtggcttcttctgagcgctgagggaggggagcgtgcgtaggggatggtgccagcgctgcgttatttggttggtgcctgcggacgggcccgcgggcttttcgccggtggctcccctggggcgtgcgggttcgcgtctgggaggccaagaccgctgtgtggaggtagccgcagcgccagcaccaggtgagtggccgctggtcctccccgccgcctgcgctgctgcccctcgcggaggcacctggtggtggacctgtgcccctgttcgtatttccctgtcccggggtgagagcaggttggggtcctgtggcactccaacctcggatcccaggagctaccaacctgcaggttcattcgttgtatttacgggccggaggaaaggcagtgtatagagtagaggtcgggagtagctctggctttgaacaacccgtccactttctgttgaactctgggctagttacttaacctccttaaaggctcagttgtgaattggaccttagtctctcctgtaggtggtcatttgaaggataaaaggacctagcacacagtataagcaatcaaatatgctctttataagctggagtctttggcgttgcttggaagatctgaatacagtcttaaatcagttcctggcacaccccgcatagtgttgcccccgtcggaggcagctcttatgctaatgaaagcccgcagaattcagtgtcctgtgatttatagtttggacgtcacattcgaaaccattgtctttctctgtcctctgtagaagaaacagtttgtgtgaaggctgtaaggcttggagaggttttggctattttgacgactagaaggtgggccatatgagtgtgactgaagtttagtggaagacatatggtgtggaatgacccagaaggactacatcacagcaaggtttttagtttattttaaccacacgttgacttttattctaagagccacgggaagctatttaaaagggttttaagaagaggctacgctttaggaggccgaggcgggcggatcgcctgaggtcagaagt

SEQ ID NO: 6584 - DNA, 6000 bp, Homo sapiens
cagatctcacatgaactcagagtgagagctcacttattatgaagcagatggcccaagccattcatgaggcatctgcccccatgatccaaacacctcccaccagaccccaactccagcattggggattacaattcaactatgagatttgggtggggacaaatatccaaactatatcacccatgtagaatgcttatacatacgtatgttttttggtgctagatgaattacaatgcctcaggcataagtcacttttacaataaatgaaaataccaaaatggctcccatttaagaaatagttgccaattaatttttaaattaaaatatatttgtgttctgggtagggataaaaactaactggaaatggggatgaatgaattttctggggtggtggaaatgttctttatgttgttttgtgcaatacttatatgatgatatggaaatgttacaattcattgaactgaaaagctgcactctgcattttattgtacactaattatacctccatataatatatataattaaaataatcacattaaaattgaaatattgaaaagaaaaaattacactcagttccatcaccttaaaacaactacttaacactgtgggatgtttcgccgaaatgtgttttcccccaacttatcaccttttcatatttatactatatgaaaggtatgtgtatgcttataaagaaatgtgtgatgacaaaaggaattgctaaggtcaattgagctcaccatgtgccaggcactgcagcaagaagtttacatgcatttacgtttagtcttctcaaccatattattctcattttacagatgaggaaacatgcaggaagagtaagtaatctgccagagtcacacagctaatgttacagagctcagacctgactccaggcaatctgattcccccacccttctagatgccctacctggctagatgagccattttcttgctgggaaatatatgagctcaactgttccaacttctccatatgcattcttggttcccctcagcccacatctacccttcagtctttttggaaagtcaatcaacacattcataagtactcccacttcagccactggcaatggaggcttctgcatgggtcccttggaaactgggacacattccttatagggtttcttgatcttgattacttttttttttcccccacacagggtcttgctttgtcactcaggctgagtatactggcattggaacaggaattaaaagaaattaaaaactgtgtaagcaaaaactcggttgtatgtaaaaaaacccaatttcccttgaggaagagaaagggctggagtcctttaaaattaactgcctgtttttctttctgaggctagtgagccttatctctccctttcccaggcattgtgaagactctgtttctctagctgtgcagctgcaaggtcactagacagatactctcaagtcgtaaaacgtgttgttccttgaaaagtaagatataatgtaatgccatgtctcaattgaataactgtctttgtttctcgcttctgtaatatgcttcccactgcacaaatctccccctgccccacgaaatgtttaaaaggtagcttgactctttgttcagggctcagtcctttggatgttaatctgactgggtttgtgcacctaaataattaaataattcctcctcaacccctcggtccctttggtttcttaattatcccgcagcagcatgaacatggctcactgcagccttgacctcttgggctcaagcaatcctcccacttcagccccctaagtagctgggactaagggcgcatgccaccaagcctggttaatttttgcattttttgtagagacggggtttcaccatgtcgcctgggctgatcttgaactcctgagctcaagcgatccacccgcctgggcctcccaaagtgctggaattacaggtgtgagccactgcacccagttaaagtcacagatctccaagtcaggtctgagctctgtaacattagctgtatgactctggcaaattaatcttcctgcatctgttttttcatctttgaaataagaataacattaaaatagtttattcttactattttttaaaattagaatattgagaagaaggaaaaaaaatacctatgtttccactactataatggaaactttgccatcattttgcttttggttgacatctccccctcccccatttttaaaaattaaaattgactctctttctttccttctttctttttctttttttaaagatgatgtcttgctatgttgtccatgctggactcacactccagagcccaagcgatcctccctcttcagcctcctggatagctgggactacagggatgtgccaccacacctggcttaaaccaatttctttttaattcataatttttaaatcaaaacaatttactcaactctttattttgaaaagttttaaacctcaaaaaagttgaaagaatagtacaatgaacactcacgtacccttactctagcaccaataattcaccaattattaacattttgactgtgtccccctctgccataatatacttttctttttttctgaaaccagctgattgattagggtggtggttgctgaaaggtgaggtgctgtggcaatttcttaaaataacacaacaatgaagtttgctgcatggattgactcttcctttcatgaaagatttctcagtagcatgtgatgctaattggtagcattttatccacagtagaatgttcaaaattgtagtcaatcctctcaaaccctgccactgctttatcaactaagtttacgaaatattctaaatccttcattgtcatttcaacagtgttcccagcatcttcaccaggagtagattgtatctcaagaaaccactttctttggtcatacattagaaggaactgttcatccattcaagtttctcacgagattgccacaattcagtcatatcttcaggctccgcttgtaattttagttttcttgctatttccaaccacatctgcagttacctccttcactgaagtcttgaacctctcaaagtcatcaatgagaactggagtcaacttcttccgaactcttgttaattttgatattttgacatcttcccatgaatcacaaatgttcttaatgatatctaaaatagtgaaccctttccagaaggttttcaatatactttgcccagatccatcagaggaataactctctatggcagccatagccttacgaaatgtatcttaagtaataaaacttgaaatgcaaaattacttcttgatccatgggctgaagaatggatcttgtgttcacagacatgaaaacaacattcatctccttatacatctccattagagctctcgtgtgactatgcacattttcaatgagcaataatactttgagagaaatccttttttctgagcagtaggcctcaacagtgggcttaaaatattcagtaaaccatgctatgaacagttgtgctgtcatccaggctttgttgttctacttacagagcacaggcagattatatttagcgtaattcttaagagacctaagatttttataatagaatggtaaacaagcactggcttcaatccaaagtcactagctgcattagcctctaacaaaagagtgagcttggcctttgaggccagacattgacctctctagctatgaaagtccttgatggcgtcttcttccaatagaaggctgttttgtctacattgactacttgctgttcagtggccaccttcatcaacgatcttacctagatcttggggataacttgctgcagcttctccatcagcatttgctgcctcatcttacactttcatgttctggagacggcttctttccttaaacctcatgaaataatctcttctagcttcaaacttctatagcttcctcacctctctcagtcatcatagaatagaagagaatcagggccttgctttggattcggttttgggtttaggggatgctgtagccggttttattttctatccaaaccactaaaattttctccaaatcagcaataaactgtttcgctttcatatcattcatgtgttcattagagtaaaatgtttaatttccttcagtaacttttcctttgcattcacaaactggctaactttttggtgcaaactttcagcctagctttcagcctatcttgccttttgacatcccttcctcactaagcttaaccatttctagcttttgagttaaagtgagagatgtgcgactctttctttcacttgaacacttagaggcccattgtagggttattaattgacctaatttcaacactgttgtgtctcagggaatagagacccaaggaaagggagagagaaggaagaacggcctgtcagtggattagtctgaacacacacaacatttatcaattacgtttgtatcttatatgggcacagctcatggcgccccaaaacaattacaatacaaggaacactcatcacacgtcacccttgtagcagagcacatctccctatgatctaggtacgagcattgtacctaggatggacgcgttcgtcctcttaccttcgggaacgccctactctgtctacggagtaaagtacttaataaacttgcttttgctttgctatgcggactcaccctgaattctttcctgtgcaagatccaagaaccctctcttggggtctggatcgagacccctttccggtaacgaaactacactaagaatacaagaaaacttacgttactgtgcgggagctgacaaagtctctcgccggagggagcacacagaatttcaccttctccggccttttcccaagctggcaggagtaaagctgtaagaggaggtgccagcgccccaagccagctctcccgccggcactgctgcggtccgcgaggcagccaatcaggtagctgagtttgccataggggcgggacttcctccccagcgcgcacgagtacgtgcgtggaggtcccgccccggaactgcagttgctgctgcagctgaggtacagcggcggtttctgaggttcttcactcgcgactgacggagctgcggtggcgtctccacacggtgagtaccaaaacgagcggggttggagccgactctggagaggggctgaggccaggaacccgggttcctatcgcgggtcgctctgggccggtgggttcccgggtccagagagggcggccgccggcccaagccgtccaaccgagctgcgtgccacggtccccgcgccttgggctccttgtccggtcatcagagcctgacggccttggcttctcggcttctcggtttctcggtttcgtgcgcgcgttcgtgcctgagacaaagcgagagggccgcgcgggaccggcgtcacgaggagacagaggcccttctactctgcctggcgctctccgtgtcctcgcccggttcgcgtggcacccctcgccctctccttgttgaaccccgcgtgtttctttgtgtttttttttgtttgttttttgtttttttgccgtggcgcagcgggtccggcgggcactgtgtgcgaacgtgctctcctcgccgggcgccatgctcagcggttttttttgacgtgcgtcactttttcgtagtggcgtataaggattctgtgggacagatgtcctcgtttttcccattgtgcagactgggaaataagagactcagagattaatacgtccaccgcagagccacagctgacaagtggtggatctggatttgaaccaaagtttaccttggtctttttcacggaatctgttatctttcttggcctttctgaaaaggaaaaacctggatcgagttccacccaaacgagttgggcctaaatggccattaagccacttaaaatatgatgaagaaactggatgggttttaagacgcttggcaaaggaaaggatggtggagcaggcatttgctctctcaggcaaggcttgagaaggaagcaagcgcagtacgcttttaataaagctcacccctcctgcccccacaagaaaaacccctgagattcttactctgccttcagaac

SEQ ID NO: 6585 - DNA, 6000 bp, Homo sapiens
actgcaacctccacctccctggctcaagcaatcctcccacctcagcctcccaagaagccgggaccacaggcacacgctaccatgcctggctatttttatattctttttaaagatggggttttgccacgttgcccaggctggtcccaaactgctgggctcaagcaatccacacaccttggcctcccaaagtgctggcattacagatgtgggtcatcacacccagccaggatttaattattgtgttcaacaaattcttattgaggacctgctatgtgctagacactgctctgaactcttaaagagtcatcaataaaacagacaaaaagcctaccctcatagaagctatgtaatactgtgtttgagggttatgtggaagagacaataaacacaaccaggaaattatatagtatgacagaaggtgacaaatgctataaagaaaacggagcaaggtacaagaatcagacgtaggggagtgcagttttaaataaaataggcacatctttttaagaaactgacatttaaaaagcaaagactggacggagacaacaagccatgcatgtatctacagggtaacagccagtgtaaaaaacagctctgtttcctccatggcacttgtcaccttcttgccaggagaagtaaacagtatataatttcctcattgattgtgtttattatctcttccccttgccctcaaacatacactattacacaacttctatcagggcagagcttttcgtctgttttgtttattgatggagcctaagcgtttagggcagtgtctgatatgtagctgcccttaggaaaaccattggagccagagagaagtaagcagagggatgatagtagctaaccttagaggtaagggggaatgaggagagtggaagtgtccagattctgcatggccttaaggacataagaacttcagctttcactgtgcatagagaaagtcactgtagcattctgagaagataagtaatatgatccagttgttgtgttggaaagactgcagggagttagggcagaggcagggagatcagttaggaggctaattgcagaaatctaggtaagagataagaatggcttgcaccaggctggtgagcagtggaagcagtaagtactgattggattctggttatattttcaagataagacagagcacagaatgccaagtgtgaaagaaataagtcagggatgactccaacgtttttttacctgaatgtttgatggaaacatcaaacatcaaacatgtttgaggaaaaatacggaaatttagttggagttgactactgcacatccaagtggataggcctaacagcacatgtggaaagtctgggttggagatataaatatgggagccatcagcatataggtatttaaaaccatgacactggataagattgtcagaggaatataaaaagaaaagtgaaacaaggactgagcatgtcaagtttaagagtagaagatgtaagatagaatgaacaaagcaattaggaaggagaaagcccaaaaagcagaatgtcctggaagaagagtgcaaacaaattacatttagtgtacaaatcactttgctgaaaccagatttaagttacggaagagttcttaatctccctgtagtagctaggacgattcgtaaaatactaaatcataactttttttagggtatgtcttctacatttccgaggaatattatatttcctatcagagtatctactaaaactattgttagaattaaaagtatatcttgcctattttcttttacataaaaccaattaaaagcttgtaccattttttaaaaaagaaaaatagcctagttttcactgccacctctgtcaaaaacacatttaagcacaacagctcggcacacagttgtaaactgtcattatttctctttctctagacctcagatacagaaggttaaattaaaccccttagttcacagcacataaggttcttccccttaatgtttaattttctatttatagaggagggaaaaaggcttatattctcatctagaccaatattttcccagtgatttgaaaataaattacattttttgattgggacaaagtcatgttcacaggaactgaaagaggaagcaatgaaatgcaattctctttgagcatgagtgatcaccaatgtcacttctagagaaatagttacttgcttgtatcctctaagtatactctggatttaccttcaaagtcactaaaaacagtacagagaacaagcaggtcataaggtgtattctcaaatatatgaacgatcttgcaaagcacgatttttctcatttccttattacatattaggtcagattcccaagagaaccaaaaccttcctagaaccacttaagttcattaacaatttaatattttaacaaagtattggagatctttcaggttaaaacttcatttgctataaaaattataggcatacaattaaaaacacatgttccattcaagttaagaaattaacttacacataggaaatgtataagacacattcaacttttaaaaaaacaattatgattcagtattctacgtgtcatcttaaccatgacaggctgattaagaacttttaaccataacttaacattcaagttaagaacttaagaacagtgacaatcttaatatgggttctttagaagtctcaaaaaggttttcacgtcttaggctcttttaaaaagccatattgactgatattaaaaatataattattaaaacgatctccctaccaaaagcagattaaagcctataaactagaagggagactgaagtgaggcatttttagggacaaacacaacatcaaacagaagagactactggtattaaaagaatacagaaagatctaaattggaaacaaaatcgtaaatgtctcttcataatgctgacgctgaatcattaagagttaaatacttgatattctttataattttcaagtattaagaaaatttttcaatagatcttgttatattttcaaattcattatcagcctcaagtaaatcaagtagaacaccttattctctaagctcacttgataaggtattgttatgtctgatgaaggctacaaaattagaagagacatttgaaactcaatgttggggtgggagggaaactcatgaacagacccagctatttcaggttagatccttaaactaaaaaaaaaggaaaaaggaaaaaaaaaaagagccttttttatcaggcagcacatcaaatatgaaagtctactgcaaggcatgtctacccaaaatactcaagagtaatttagtgttattcttgggatcattatcccaagtctcaccagcttgggatcattatcccaagtctcaccagcaattgcttcggaccaaactggagacactgttgccattagcctgctaggtaagctaaggaaaacaaatgcaacctaatttagcaaaaattctaactttaagtcaactcctatacaattcagaacctttagttcaccgaagatgcttatctttagctgggctggccatgagtgtctacatttctcaaggctttccacaaagtcatcacacacacacacaccttaacagttaacttcaaccgtagctctttactcaaggctttccacaaagtcatcacacacacacactcacacacacacacacaccttaacagttaacttcaaccgtagctctttaagcactactaacttaaatagcggctaaggaatccgtttgccaacacagttctgaatttagattcctccttcctcccacaggaaagaagggccaacactgaacagcttactttcaacctaacctagtcaaggtgcaactggggccggctgggacgccgctgcccgcgtccggggctgcccacatctagtgcacccagcgccttcaccgccagcatgcggggctgcacatcccacaccagacgtatggctgagagccagacgacttctctagacttcccgcgtagttttccggcgaggtccccaaggccaaaaatctcacttttggaaactgaaggggtcaggccgaatcgctaggacacacccctcggggacaggaagggataacttcgccggtgtcgagagtggtccatggatttttccaaagtcccccctcatgctgctttccgtgcccaaccgcctcccgccctgacctggggactcgcaaagggcagcgggaggggcgccggggaagggggcgagcgcccagaccgccggaggcagcggcgaggactggaactccagcatggcgtaagtgtggcccagctccggcccggggacgccgccggagacgcgctgcctccgtccaccggccgaggaggcggtaatccgccttccctcccgggggccctcaggcttggctaaaaataggtgcctcggtcaccccagggcccgctcgggtcgacctcgccttcgggagagtcgtccttggggagggtggggggtgtccctcggccgcgccccgggtgccgcgacagagccggggtcgggcccagagcggccccgcgaggccgaggaggtccctccgagcccgccccctgcggcgtcccggccccaacaagagccccgcggcggcaaccggatgcccgaggcctacccagcgggcggcgtccgggccccgcggccgcgcccccccgcccggcgcggccctcccgcctgccccaggaccccgcggccggcgccgcctccccccgcgctccccgccgccggcgcccgtcccggtgcggcctgctctccctcaccctgtgcggccgggaaaggagaccgggaagacgcggcggcgccggcactacagcccgggccgcccgctccgaggcgccgccgccgccgccgccgccgccgcagtcgctcaggtgccgtcgcgccgctcggcaggaaacgggcggcttcggggcggggcggggcggacccggcacgtcctggcgtctgggccggcggcgccgggagaccggccccttaaagggacagccgccggcccgcctctgcctccgcgcgcctgcccacgcgctccggtactcgctgctcgcggctggccggctcgggattccgggctttcttcccgagaccgcgtcccccagctgggccgaaggtggacgctcaggggctggaggctcagcggaatcccctgcgttcagtagccccgctctcccctgtcccgaaggttggtctcgtctcgcgcggccctccctccagggcaccacctggctccccacgccttttaacttcagcaaacggcactagatttaccccctgactatcccagatttcccccagaaattactggaaaacgacatcccccgtccctttctccaggggatctctctgaaatctccttcgggcaacgctagctacaaacggagaaagaaattagaaagcgacccaaataatggtcgggcgcggtggttcacgcctgtaaccccagtactttgggaggccaaggcaggcggatcacctgaggtcaggagttcgagaccagcctggccaacatatagtaaaacccgtctctgccaaaaaaagtacaaaaaattagctgggcatagtggcgcacgcctgtagccccagctacttgggaagctgagacaggagaatcgcaggaatctaggaggcggaggttgcagtgagccgagatctcgccactgcactccagcctgggcgagagagtaagactctccgtttctctcaaaaaaaaaaaaaaaaaaaggaaagaaaagaaagcgacccaaatgagttgtgtgcaaacattatgaaagtgttgtgactgccagctggtagccatttatgaagccggggtaaaaatctagaaactgctgcgcgaggagggatgggcccggatctctccttattcgtttgctctttgctgaaaggatggcagcgatcctccccgtccactggcaagtgagtttcgtgtggattgtttaccgatgatcaatctctcacaggaggccaggcactgccccactacatgtacaaaacactccaagctgtccgcaaatgttatgaaggcttaaaataatcctaacg

SEQ ID NO: 6586 - DNA, 6000 bp, Homo sapiens; identical to SEQ ID NO: 2788

SEQ ID NO: 6587 - DNA, 6000 bp, Homo sapiens
atcatgtgaccaattgtgcattcagttttcagaattctttgctatatgatttggattaattctatataattttggacttttaaatattaaggttaaaaaatacctgtatctaaaattgattctgttaactgttgtcttaaaactaaaggtattaaagtataaaattaaaatttgcaattttttttaaaaaattgcaattttgattctcatgggggaaattggagataatttttttttttttgcctctggagtttaaagtttccttatggagataagttttgtgattcctgtaatagatgtgtatgttttctatttgagagttaaaacatttgagagttaaaacatttagttttaatacaacctatgtatatatacttctgtgttaaattttgctttgtcattaataaaatttaaaaatattcactaattgtgtttgtcacacaaagtaattctcaagaatgcatttaactggaattataagtacatgtgtggggggtagaatttcaaaactgtttctcagtctcactaagtaggacatatttaagcttgaaatagagcttagaggggaaagaactttactaaccaatattaatctaaacaattacgatacaaattcaccagataaaatgtagtacttttcatcagctctatattttgtcacacaaactatatatatttttgttacataaagtatatataatagatttagttatttagtaatgattttcaaaattcaattttgaagtatttcttagaagttattgaaatattaaaacatcttgtggttttatagaaatttaagagtaaaactggaatttttaaaatctggcaatttgctctgataggaaaattgccttcattacattattacacagaaaaacaaaaaaaagccagtgtttcctaatcactttctttttttttaagagatgggtcttgctatgttgtccagactggattcaaactcttaggctcaagtgatcctctcatctcagcctcctgcataatcaatttcctttataacacctaaaatgtgaggcaaagagaagatcctaacaggtttttttcttacaaaaaattttagggcagccaaagaaaatgaaaggaaggaaatacagaaagggaaatatttgttgatttaatcactaaccccaaagccaggagctgatctatttgtttcaaaaacagctactacttcacactctggccttcttagctcagtcctggaaataacctaattttttagttctttgaactagtgatgtcaggtcagagtaccagaaataggtacaaagcctcctgattcacccttatttataacccccaggcaaaatcttgcaccagactgggccgtgggtaagtctaaaggtagctcgtaaagcaagagaactatttgcctcaccttagataagcatatgtgctcttaaactactatgaatcttaaattgatgcaataattttgagactgccatttaatagttacaagtttaagtaactttttttttttttctttagatggagccttgctctgttgctcaggctggcgtgcagtggcacgctctaggctcactgcaacctctgcctcgagactcaaaggatcctcccacctcagcctctcaagtagctgggactacagatgcaccactacacccggctaattttttgtatttttagtagagatgggttttcgccatgttgcccaggctggtctcaaactcttgagttcaagcaatctgcctgcctcaacctcccagagtgctgggattacagacatgagccaccacacccagcccgtaatatctttacacagaaattagtcttttatgagaaattctcggttgaatgcaattacaaattaagggaaacttctataaacgtctacattaaatatggagcaaaatttaagcctgtttcctataattttctgtatctgtccttttaaaacgtatgatttaagttaaagctggcactagaaagtatttcactttggcatgactgaactttgtatcatttctggctttcaaaaacaatttaggctgtatttcccttacacagcaactttttatcattcattttcaatgcctgggtaatttgaaagccaaacagtttcttgcacagggaatgcattgtcataagctgggttttatttcaaactcaattatacaatgtagcaatagtaaatattaaaatgtaatgctaactcaaaacttgtagaatgccttcactgaattttggtataaagagtaaacaaaacttattctgcaaaaggattaggaacctttttatgcaaaaatgagtattttattttgtcagcactaaaagaaaaaaaaaaacaaaaccactgtatttctacattgaggtgaaaacaatgtttaaactttcttatcaatcaaatacattccaaaagaaagtgtgttctatgaaggttccaaaacacactcaaaacacaatagtacaggaatctaatactgaaaatgactgttctgacagggtgtttaacaaacataacttttaaattattaaaccagtgaagcaatcccttcctaataagtgtgtcaagagagtgaaactgggtttgttccattaataccctaacaatttcatcgtaatactttttactgctatgacagttttaaataaattttgctgtacttaaaataggttttgaaagtggaaaagtgtacaaagtttcagataaaaagattaataaatgcaatttaaataaaatttcccctcttctctcatatcaacaataatcaattttagcagataacagattgagctttaaaaccctactcccaaaatgaaaccttcagttttaaatcttaatcagacataactggaaaagattactatgtatttggacaccttttacaagattttgtttttgtattaaagcagaaaccagttcctaaactcttttattcaattgtatgtcctgtttggacaaatatcaaaaatagaagactgtcgcttttgtaactgtgattttcactgcagtcttctataacttttacagagttcatggtccctaatatctccccaccctccattttttctaggtggggaaatggctaccacagtaaacttttcactgatagttagagtttctggaaacatgtattgtttgttattatttaagagtgactcaatttgggcactctgagtggatggtctacaggttttcttgtgatgcataccacagtctccagcatgaaagatcctaggaatttgaggaaccagcactttccagaattttggaagacaagatacagtcaagtattgaagagtccagtcccagttataatcatcataagtacagaaagtgtctgtgcactcgatcagcttctgataggcattccgggtcaaggctagacccatattgtgctctgtggatttccaagttttcacatctaccttgtcagccatgccatagaaactgcgactggcactataggtccccagggagagaacatcacattcagggcactcttgctgcttcagtttccacatctttttgaagacatggtaaaagtctggggctaagtagtgatcctcttctaggaaaagtataaggccagcataatctcgaagaattttcactctttcccacacaaaatgcagcttccaccaccagtgatgtttggtctgggagaatttggcctctctataatggccgaaggagtcgggatactcagcattgatgcaccccaatttcaaagcggcattcttcggcaggtctctgggacaatctctagggtcactacctggaaactcgttagggtacaactgaatgctgaaaggaaagaacacctgcagaaccggacagaaattcaccccggcgatcagctgattgatctcggtcgaccagaagtcatggctaaagatgacgaggacgttgtcaattccctgggcttttcgaagtgagtccagcagcagtctgaggtattcgggccggttatgcacctggaccaccagcaccagctcccggggggcccaggtgccagccttatctacattcctcagggtctgatcaaagttcagctggtacaccagggaccggtaccgcagcgtcaggttgtccgcctcgggctgggggaccgccgggaccagggaagccgccgacacgttggagaccctgcggatgcccacagccacagaggggtggtccccaccgcggccgccggcaccccgcgcgggttcggcgtccagcaacggtggggcgagggcctcgttcttcctttgtcgcccattgctgctccagaggacgaagccgcaggcggccaccacgagcgtcaggattagcaccttccgtttgtagatgcggaacctcatggtctccagggccgggagcgcaggcgggcgggcgcggaaaggagcagctgcttctgcacggaaggggcgggcgggcggcggccgtcgccttggcctgtcacggtcggaactggcccccgcggctgccctcgctaactcatcccgggccccgggggtcctggggcccgagacctctcatttaccccgcgccgcctgcgctccacacatcctcgcctggcagctacagctcgagcatcggcgccgccgctaggagccgcggctcggcttcgtctccgtcctctccattcagcaccacgggtcccggaaaaagctcagccgcggtcccaaccgcaccctagcttcgttacctgcgcctccagcggccctgcgtcctctgcgctctcatccttacaggggccctagacggccagaactgagcgacgcggcctcgcctcactccggcggggaccgttatgacaacccgcaactgccccgcggcacaccgcggccctccggcccacacccctccggcccgccccttagaccgttggttggtgctttccagacgcgaccgaaggcgcctgaccgccgtggccggctgcctattggtttgcagtactgtcgctcaggtgcagttcccacttccgcctgtttcttccctttcctgttaggcgagagctgcgaaaggcgagagctgcgaagggccaggtgtcgggcgctgtttctcggtaagctaagaacgaggctgtagcggctccaataggagcctcccttgctcagaatcctgggtaggactaggccttcttaggaaagggaaggcgagacctatggccctcgccggccttagttcgagagcaggcttctcccttcaggaaaaaggtctcaggcatggcggctatagaatcgcggggcgcgccggcttgataaggacacgtcagccctcgaggctgctgacgggtgactgtgcttcggaggggaaaagtgatactacgctgatgtggttctcgtagaaggaacggggcgggtcgtaaccgtagctacaacgtcgcgcgctgccccagccattctctagagctggaaaatggaggaggtgggtggggggaagggggtcaaagaaactctggtccttaacttccttttcggaagaaaattagatgaaccgcacttttcttttggagcagtcacaataaattaaactcatttcgtacggaaaacggactgtattgggcctcctaaagctgctgctgtcggttttcgtgagtcttgttctatatgagaaaagaagaatggctcggagcattgttaattatttgagatgtgcaaaatttgccgggcccagagagacagcagtatgggacttcagacacctccccacttaatgcctggcattttattcctgactagctgcttcacccattatgtccgcgttcctggaatttgtcatgaaaagaatgatgtatagccaatcaatcgcttgtgttattttaatgtaaattcttggtagacaatttaggaactgccattttttcctctaaaaacccacttgcaactgctgctactcagggcattttgaatctgtgctctgggttgcaatcctcaaacttgccccaaataaacattctacttatatgaattgtgcctcagttcttttttttttttgagacgtaattccgctgttgttgcccaggc

SEQ ID NO: 6588 - DNA, 6000 bp, Homo sapiens
actggccaagcctgtgaggcccgggggccccaggggcaagcctgggatgaagacagccaagtgtgggcagggctcttgcaggctccagtagggaccaggctattcccgctgtgcacctcatccacacctgccagcagacattgctctgaagtgtcctcccccagccagcagggctccttaggggtactcggcccacggcagggctgtgcacagggtctgcacacaggctagagtccttgttttgctgaggacaagcagcggtgctcccatcactgccagccctcggcgttgcccttctcggtctgggcctcacctccactgccctatggcagatagccgaggcaggggtgacaggatctgtgtggatttggacctaaggtaggaacagtgtggggggcaggggagtcactgaggaacacagatctcagtcccagcaagggggctgaggccaagacccctgggcccatcggaatctgggctggaggtgtggctggtgggagcacatgtggacagaactggttttgtgttcatgggtgtgcagttgtgaatgaaatgctgcgtgcaccgtgtgatgacgccctgggaggaaccttgcagtcaggttttcttctaagcagatgccatcattggcgagacggcagcacggcctaaagcagcggcttagaggaagaaggcagggccctgggagccccagcagccaagggaggccagccaggcttgcgggtgtggggtggctgctccacgggccatcggagtctttaaagactgcacaagagatgcattttaagagaaaaaaagcaaacatttccttaaataccaatgctgtttctggttgtgatctctccatctcaggtgaatgtgtacgtgcttggaaagacgtttcttctcttggcaagagagctctgcatcaatgcgccggccataggtaggcatctgggtgagatgctggggtgtccggcaggctgctgtagggaccagcgtgccaaatgtcctttgaacagtggagggaaatcctgtccaagcatgggacccctcaaggtaagaaatgtttcttaaagctgctaggagctcagtaatgtggggccttattttctaagacacagtctcgctgttgtccaggctggagtgcagtggcacaatcgtagctcactgcagcctcaaactcctggcctcaagtgatcctcgtgccttcgcctcccaaagcactgggattacaggcatgagaccgcacctggcctggggcttgctttctgctgcaaaaccagaaggcctgttgtcagtgcctgtcaggtggcaggaaggtgtagacagggaaacaagtgctgcgtgctgggagcatcttgtgtggacaaggtttaagggacacacctggctccaggtgcctctggacagatggggacagtggggcagctcctggttgtgctttccagccacagccctcttttgtggtttttctgccacttttgttctgtgttgtgtgcgagtttgtggaactcctgtatgcctttcttgatgtgtgttaggtgtagggtaagtcctgtctctccctcgaggcagcagcagtgttcatgcatgcagaatctaacctagcggaaaagtctagaaggaaaggatcaaaacagcactcactgcccgatggttctgacctaccctttctttaccaagcagatgactggtttccatggcccgcttagaggcccctttcttactttgcctgtttgcatctaggagcgtatgtcctttgggtagagaagcaccaggtggggctgggtcaccaacaggactgagcaacacgggctgcagcagcagaggggcaccggctgaggctatacactcggcccatgccctctcccaggtgccaagaggggccatccctcttttcgggggtcatacaggttttccagaaaacaactgcctacagggtatgcagagtgggaggagagagacaaggggtgggagagcctgtttcaccctatagtccactcctgcaacaggctgtcccgcagcagtgtcacagctagtgacagtccccagggtccagaacgctgggcccagcagaatgctcccccgacagtctgttcatagggtaggactctgaggtgctagtgatgcattaggacatagagacaaccaggcacctggtgtttcctagggtggcccagaagccagccagcaacccaggggacagatgggcttcactggggcgcagtttgctcctaaccacatagcatgttcagcatgacaggttttctcctcgggatgggagggagctgttctgttgcatgagaaagagaataccccactgtacaactgctgtagtcatttactgacacgtgggtgttattttaggcaacctttattacagaagtccactattttaagtgactttttgccaattttagatttgaagggaaggtctcaagttaagcttggaaccacttagaatccaagagggtagcaggaagatccaacccctcaaagcaggtggcatgggtgccactgggaggggatctggggcctgtcttgagccgtaaatcttcctccacctgagacgtgcaccccactgtaccagagatgcctaagactccaatccctgggttctggctgtgtggaaaatgtctctacacagtcaagcttcagctgactacatgtcaaagagagacaaagttaagagcagcctttcatggtgtcaagaagcagttagcatcttgacttcccctccactcactcgctgacctgctgcagcctccccgggcacctcaggcatagaaaatgagctcagggatctgcccaccctggaccccagtcccgttggtgctgtccgaggagcactggaactggaaggccacctttccacactgcacttccgtcatcccctcctgcccaaagtagctgagttcgctgccgtccaggacggcactggccgtgtagaaggtgtcttgttcaacctggaccgggtgttcaaaccagaccgggaaggtgttactggatccgtctgacatgaacttggtcaagttctgagccagaaccaccccgagccgcttgagctcaatcttcacgctgtactcagccttcccagagctggagccatacaggcccagccctgcaataaatacccttctgtccactgcaaactggatgctgtcgcagcgcccgcggtaccgccactggttgctgcggtaggcagaagactggaatcggtggcacctctgcggggcgaggcccttcctcttggtcaggggaaagtccaggcggggcttgttggtggccgtgtaccacaggaagatgctgtgggtctcctccagagtcaggatgtctgactgggcagcgccgttggcaaactcctctagggtcatggttggaattcggaccagatagagggctcgccccagaacatgcctcttgtttcgtggggtgattggcagcccctgcctcttgcactccgcctcggcccagttcaggacggcctcgaagaccaccgcctctttggtgttgagggcctcccgagtgacaatgatctccagcgtctgccggtctatctcacagaagccttcggaccgtagggccatctcggcctgtgcgtcaatgacctcccagcagcgctgcgtcagctcgggctcctcaaacagccggctctgggacagcaggacgcaggcgttcttggcttccaaacttgtctccagaaagttgacacaggcttttgccaatgctgggacgatgtacttcttagcagcgtacagagtggccagcaccgtgtcggcttccagatcgatctcatcactgtacatgtacctaggcgaggcagggcccgcgtcaggggctggctcccaagcacccatcgcggggctgggcctgggagaggagtccatcagctcctgtgtgcttcccttcagaagcctccggaggccgcctaaaacggacccacccgtccctccccagtagagtggacttactttaagaggatcagaaaggctgcgggctccacgtctggaatgtgaatttcagatttgacttccgccaggtctccgtagaacatggcatagaagacggagctgccgacagccaagacgtactgggaggagaaagcgccgccgtgagcctggctctcccgcaggctgcgtgtcagccacacggcggacggggcggacggggcacgcgttccgagaggggccgccgctacccaccttgtgggcgggcaccgtcctggtcgcccccgggggccccacgacgaagtgcacgtcggccatgagctcgttgttgaacatgagcgcgttcctgcaaaggtagaggcacgggctgggggcgtgggcgcgcgcgggcgcgggggccgcggggcacgggctcacctctcgcgcagcgtggggcggcagcaccgccagccggggctctcctggtggttgttgccgagtgtgggcggcgcgggcgcgggcggcggcggcgctggcgcgggggcgctgggcgggctgcgcggcccggccttcctgcccacggcggcgccggcgttgctgttggctaggtccgcggccgcggcgctggcgggagcgtagagttccgccgccatcttcgcgggcggggcggcgggggcagcctcggcgcctgtggacgccgcgccccgcgccctcgcgccgcgccggggcctcgggagcggctctgcaagcaaaagcaaggaggtcaggcactgagcgacgcggccgtgcaggcaggctaggggcagcagcatgggcggcggcggcgctgtgacccgcggggctgccacccgctcccctgccacccccgcccctgcgaccctgcccgagcccagcctagcgcagcccggccaggcccggccgcggggggcgccgtcccgcccgcccgcccgcccgagcccgtacccgccgcggcgccggtgcgtcacgctgcgtcagggccgcgccccgcgcgacgtcgctgcctcgcggccccgcccccaggcccgacatcctcgaagctgctcgagcttctgcccagcaaccggcgcgagccgcgcgctgtgcagaggtagccgtggaaggcggctcccggcgctggcaggcggccgcccccagacccgcagtgccatgcgcaggtgcttgcgcccgttcttcagttagcgatcttttggttaggaacgcaggtggacctgcttgtttggccatttgcattccggagtctgcctctggccgcggcctgtgggatggtcgttgggcttcctcgttcgttcagatgcttcgcgatttagcttgctacggacgccagcagccagcgcttgcagagagcgcggtccactctgctctgagggctttacaggggcaggcgctgctatttcccggcattttcctcgaggaaataggcacagagaggttagtcgcgcgctgaaggtcacacagccggcgggtgggcaagtcaggatctggccctgggcctgcagccctggagcttgggccccagggcgcgccctgcctctgtggctctgcctgtggatcgcagtcgcaggctcgctccttgtggggcctctagcctcccggcctggggctaatcctgggaggtgcgtggcatggggcactggctttgctgatgaggagaccagacttcagaggccgtgtcacctggcctgggccgcacagctggtgcatgccaagctcgcgtgcagacgaagctccagaggcctggctgtcaggagggttcctccccgaggacacacacgcaacctcctggaccgccaggctttagacttttaaaacttccatatgcaggaaaccccacaggacgcagccagcatctcgggtcatgggtgcacctgtcaccgcagtcctgggctaaacagtgaacaggagctctgtgtctctgtggtcgttacagttgtagtgaatgttccctgggagagtcctcttcagaagatatttgcggtattttcaacaaaggactctccaggatggaggagcaactacaagtcaggaaggaaaaggctgacaacccagttttttaaaaaacgggcaaaggacg

SEQ ID NO: 6589 - DNA, 6000 bp, Homo sapiens
ggaaaacaataggctcctggcatatgatccagttaactcaccctttgagcctctccgctcctgacctctgttcttcgccagtagtgaaagggatgtgcagatttgcacatggaccagccctctggagggtccccgggggaaacctcaccccacagctgctgggatcctcctgaagactgtctcgtcgcaagctgccggccattgaaggcagcactatccttatctcctggctggctctccaaattttgttcccagaccaaacagagggtcacgctgctatttctcgtggcccaataatgagatgccgatgaactgggcagaaagagagtttttatttctgtcatcggttacagggagaaggcctggaaattatcaccagaccaactcaaaattacaaagtttttcagagcttatataccttctaagctatatgtctacgtgtaagcgtgcattcatctaaagacataagtgattaacttcttttcatctataactaaggtctgagtccggaagacctactcctggagcctcagtaagcttaatctaaatgggtctagatgctggggtggttacccttatcttgtcttctgctaaatcacagaggtttggggagttccttcagatgcccagtaaacttgtttgtggaggcctggggagtttcttcagaccctcaataaaacttgtttaatcctaaatgggtcctggtaagaattccttcgttattttgtcatgctttaagttttgccaggaaaggcctaatcaaaactcttgatgggcttttgttacatgacggcctttgtataggcaccggctttttttttagcttttaatatttaacctaaccagttgcagtctgtaatccacgaactgaaacagggcttctcttccattgcagctggcatatcttgttgtgtttatgggtctgacaggcaaacatatctgaagcatatctcatatgctgatctgtgagggagataagccccttgttttgcttgactggaaacaaaataagcccgtgacagggatactccatctagaaacaaaaagaagggctgtgagacgaaaatgtgatggaggcctgcgttagtgaaacctggcctgccacaatagtacctggcacatagccattgttcagtgtagaaactattacagtagaaactactacacactggacaactgttctgagtgtattacatgttactgcatttaacgctaaatggaaagaaaacacaatactatggtgctttagggaaatgatttcctgcgttagacatatctatcatctctccctctctctctctctgtatcatttttgcctgaagctggccttctcactgatctctgggtgtgtaaactgggcttatgaggaggcttgtatttcttactttgtaggaaggggaacaggatggaaaggagacagagactgagaagaagaatgaatgtccatgttaaggtacttgggcttccatgctgaaaatactagaaagggccaacttgtgagggtaactgaactcacagggcacactttctctttccccatttctccactaagtttgagatattcctccacctcatgagttgggggctatgcaatagccatcctgttcctaccaattccagctaacctgctttcgtatttgtcctcagcagtttttaagagaaacaacacattgtaggggttacttagatggaaagacaattggtaagacaggcaggagaaaagccagtgagtcctgcaagagccaagtaatcatcccaggcatttattttaatatctagcacctttctccctctccaagcacactgctttttaatccctcaacacaaggcagctggaaggagatagaagctcaaagaagagcaatagtgtccctgaggccacacagggctcggtgtgaaaaaacaggaacctaatggagataggttccattctgcctgatctccatttagcctggacatgttatcggtggctgataatgggtactgggaatggggtggttatggtaagtgtaggaacataatcgatccacgtcattttggcttttaactttctttccttttaaatgctgggaactggctcattttctcaactacagtgggtaaggtgggaggggaattttagcaaggtgccatgtctaggggtgtggctgcaactgacaggatggctaggagccctaattccagaataaaatactgcattcaacactcatccttcccattccccattccaccacttcctgtgccaggtagcatctaggcaaccaggagaaatgaaatccagaatggctgaaggagggtaaaatgggcattttattacacacagtagcataaatgggataagaataaaatctggagcgtctctgtaccaattctccaattaatagctgctcaacctaaatatctttgtcttagtccagggtgagaaatgggatctcatgtaaaggaaacctggggtccagtccagtcctactgaatgctatttagtctgagtaaagaaatgtctgagggtcaaagccatttgggaggtctccctggggatagagaggttgtcctaaataggtccatcagaaaagccaggaatctctcaggcccacaaggcaataaaggccatgaaggcaaaaccagcggctacacagctccacttagctagaggggcctcaggactagctagctcccgtggaagaatttctaggaaggtgacatacaggaaggtaccagctgccacaccctctaacacagcctgggctaagccccgccctccttcagagtcccctccagtcacagccagccctacggctaggcccaggggggacatgagagctaataatagtatggagaacactgcccatcgtgagctggtacctaaatgcactagccgcattcctacaccaaacaccacaagccccttatgagccaggacagcaaggcagagctgcacggtagctgctactgtcggctgcagccccacagctagcccttcaaacactgagtgaaaggagagtgacagcaagaggacaagggctcggaggggaccctttgagggtgagggtaaatgtccatggctgtggagttcgaagatatgagccccaccccattcttcgtcctgcactgtcgatcctccagcagccccaggacagcactgcaatgccagcgactccaaaaagaagacaaaaaagaagcccagggagatgatgagctctccatagggatactccatctagaaacaaaaagaagggctgtgagatggaaaggaagggtaggcaatacattggatggacatggaattgggagattgaagagaatgagaaaatgtggtaacagaacacaaaaaagggtaggggaaatgaagccaagagtagacatggccatgcaacaacaagaatgccagagtgggccggacacagtggctcatgcctgtaatcctagcactttgggagactgaagtgggcagatcacttgaggtcaggagattgagaccagcctggccaacatgatgaaaccccgtctctactaaaaatacaaaaactagccaggtgtggtggcacgtgcctgtaatcccagctactcaggaggctgaggcaggaaaatcactagaactcggaaggcagaggttgcagtgagccgagattgtgccactgtactccagtctgggcgacagagagatttcatctcaacaaacaaacgaaaaacaacaacaacaaaagactgccagaggggctaagggacagaatctcaatagagttaaaaacatgggcaaatgatgtgaggtatatcagaggatccagggaaagaatgaaagagtaaaacaagggctttccctggcattctataaactcaaaaggattggatttgctcctcttttcctctacgatgtctgagctagggagcagaagggattcttggtactcctcatgtattcctctcaaaagggtctggatatgaaaggcctctctggttctcctcactctccagataggggatggtgggaggtacttacatgagctgaatcagcatcaccagaagaatttctctcacttgctgatctgttctaagaagaaagcagcagaaattagatgtgggatggagcagcacagcttcctgtgctgtcccttcagcaattctgttttccttaaagcctaatctgacttgctttcaccatcccacacaagagctgtcattttccttgtcgttccacccatgtccttggctccatcactttcccgctctcttccctttgtcctgtttatcattttggcctcatagacctgcggcttgaaatctctgctctcacctgcaccatgaacttctgaatctgtgattcaatttcctccagggcttcagcagtcatatgcatgaaccctgctcccaggaaaacaccagcagaaatacagcccaggagtctgaggactagccggtgatgacctaataaaaagcagaagttacaacccacttgacactgaggagacagacaaaggtgagtaaagagcagcaggcagcactcaatatcccaaggttggggatggtgagagaatcagagcaaggtatcaggacagggttgaggtgagactcaggctatggaacaaagatggggtagggctatacctctggctgcatcaatctggaaccatttgaagcagatgggagtaaggccacagcccagagtgagagccaacagggcaaacaggcagccaagttttattcctagtagttgctccatctctggggtgtagggtaagcccaggagtcagaatgacaagggagctgtaatctttggagcaggagtggtatcttaggtggtcaacactggagtgtccactctcgtgagtttcaggaggctgttggtatcttctttctgtgttgcttctgcttctgcagcattgcagagctgacagatcctgccccagcttctagccctccccctgcatggaggcccctcccctggttcacgccttcctgagcttggaaaccagaaactccagactccctgccaggcacagcccagtggcgtcttctcctcctcttcaatggcatgactaatccaagagctacggatagtcttagttcatgtgcttggggttggtctaatccaaaataggaaagtctatggtagctgcttcccagctattttgtactggggacaatctggtcctgtctcactcaggacgtttgatctaagccttccataccctctccacctcatcccaagtcttataggttgcaatgctgatacttgaaccacccgctttcagagatttggggccacctggaggtaaagaggtggggctgagaggtggtgctggtgctactctgtgggaactagtacccacatgagggaactaccctttcctgtaaccccagaaaaatagctccaggcatggaaatgtctagtggtaagttgatttgttttttttctttctcttttgattgggatcagttttgagaggaatgagttgagatgtctggtattacaacatttatactgttacaacttctaactgtgcctgtttcctggtaagaactgtggaaaaaaagacatttaaggtttaagacaaaggaagctgctctagccctgaaacagcaaggcttaggggaaaacagaaatgaactgagtgaatgggaggattctacctggatatagagaggtgggggtagaagattcagttctgatgggaatcactcttgatggaaatgtctggggcatttcccatacatactctagggtagctgagggaccctgggaaagacagaagggaaggcgttagtacaagaggccaggcagctgctgattcccctattcaggtggcccacataacaaccctgagacctgttgagccagttctcagagctctggaggcagctttccttgctactccagattattttcctagggaagtcctggcctctggtagaagcagtattcttacagtgttactggatgattcttacagtgttactggtcctgctgcttgttcttgtggtccggtaatgagatgcagacag

SEQ ID NO: 6590 - DNA, 6000 bp, Homo sapiens
agggtttaacaagcctcactgatcctatggaaatagtacattcaagagtacagctggtaatcccagctattcaggaggctgaggcaggaggatggcttgaggtcaggagttcaagaccagccttggcaggatagtgagaactcagctcttaaaaaatctgttttaattagctggacatggtggcacgtgcctgtagtgccagctactcaggaggctgagacaggaggagcccaggagtttgaggatgcagtgagctatgattgtaccactccactccagactgggcaacagagtcagatctcatctctaaaaaaaaaaaaaaaaaaaaaaaagagtatagctagcctggccctagaggcatcttggttttacgtgaagaagtggcagctcccactctgggagaaacaaccttctctgctacctgaagccgagctgctgttcagtagggcccttgattcacaggggttcctgtaaatgcttaggcctggctcaccaatgattaggctgagttaaaagctgatgttgcccaccaagcagcagcaggcacttagccccaatgataactctggatggctgatggcagtaaggattgaagcatttggtatgccacttggaagactaaatactgagagatgaaagctgagaagtgtggaaacacatcatggctgcctgccaataggacagactggatcactcacgtaggtgcccacactaagggcaggtactctcgtaagactgactggaatcaaactgctgatccagcctgcaccaccaagactgctgccatagccacctggattcatgcaaccggtgtggaaacatctaccatcatgggctaggcacaacgtaagggactacatgtttctgaggcagaagccaccactgcgtgccagacttgtgactcctgccaaaagttggcctgcttgtcttgcagtaaaggaagccacattgcaaggggcactgaccacacctgctcctgggagattgacattaggactttgttcccttctctaggctctcatcagtaccttgctactgctgatactttttcagtttacagtgctgatgttgcttttccagtccaattatctgactctgtgtataccactgtggcccttgaaactaaactgccaggttttctgctttccaaaccatctacagtctgacactggcatatctttttgtcgcaatggccacccaacagtgtcaacagtcaatagccaaggtattcgatggacctcccacactccctaccatccacaggcatgacattgtcaagtactgaacagttccctcaaagatcaactcaaaaagatttttgattctatgtttttaacctcctcctggtctgcaaaccttactgaagcagtttggtcacctaaggcagccattctcagaaatgggtcatctccttttgcctaccaactgggtaatgatcaggaaaaaggggtggagggttatataaacctattttgaaaatgtgagattctcccctgaccatttctggccatgattcatctttcttcccccttacagaaagcccagatcagctgggaggaggaggctatctatgtaattcagacttaattctagttcagtcactagattgtcttgttggaatggcctggtgccagaacataaagttaatgatcatttggttgggtatagtgcttttaaagtccccctacagtggcccacatgtgtcaaggtagaagacataatgggcctctgtcaattttctaacaattggatattagaaggcctgcgtattggtaggggataaatggagaaaaggtgaagttatagttactagggtaggacacactcattatgtagcaatggaaggaaagaaacaatcctggcatctggggaaggaacaccacaggaccctggagatgtaaagagaagggaaacaatgttctctttgtccctatccagcaccaaagcctggcaaacattcacatggtccatctaggtcaagcagcaactgtggctggcaatctgacctgtggctgagtttgtcatctcactatgaaaacataaaaactttatctagcaggtcagtataaaaaagaaaataaaaaaagaaaacaaaaactcacatggacacggccagtcttgaactattcccacgtgcctgatgacatcaacaccaactcccaaacgcagacctccctcataggtgtgcaaacacacagatcagcaccaccttctatcaatgcggctgatacaaatcacatgcttctcctgagatcctaagggccttacttaggttatgccttgtctagtgattgaggctgcaactgttcagtgacactgcccatgtggtttaaaccactgtaatggtaatcaaatttgatggtgatccaaataaaaatctaacaaaaatcctggagtggcctgcactcctccaagtaatatgttagtgtaaggaagaatgggtcacaaaatatctttccattaatcatggtagttaattttttttttttttttttgagacagagtctggctttgtcgcctaggctggaatgcaatggtgcgatcttagctcactgcaacctctgcttcccaggttcaagtgattctcccacctcagcctcccgagtagctgggattacaggcacccgccatcatgcccggctaagtcttgtattttcagttgagacggagtttcaccatgttggccaggttggtctcgaactcctgacctcaggtgatctgcccgcctcggcctcccaaactgccgggattacaggtgtgagccactgcgcccagcctggtaattactttcttaaaaaaatttttacaagggtagtgggctattgtaattactggtaatgacaccaaagatcagagatcaatctgaacccctgtgcacaggtcacagtggttaatagactggtcttagactgcagcccagatgtctgaaataagattcctcggtgcccccaggacttattcacaagtggctgaatccaggaccctggagggcatggttgaggtaaatactgtaagctggccttattctgctgcttagagtcccattgacaacaaccttaattaaatgctgtaagggacaaactgaaaagatgtgagtagccaggggagttgtatattcatgtgaaaatctgctagaagccaagaccatagaatcgaggagtgagagaggctgtcagattgctcgtgcctctacacatcattctgggtataccaagaatgcaaggccctgactgcatctcacctgggccatttctcatggttgtgtttgcagcaagcaactttgagagaagaggcagtgtctccctccaggacaaagaggaggtctgcgtactgccttctataaaacagcagattttccaagcttgtcgttccttcacttggatgcaacccactgcctgtgcagtcatccatttaaacccatagcgtcaccctgtgggacttggatggcaagggaaactgcttctaacatgcatcctatttcctgtaataaagtcctttgtctctaacccaggagtctcatcttctgccagcagtcacgacacaataacaagctaatttattaatttctaaataaagcaaccctgacagtctgttttcttgcctgctttttgcttaaagaattccatttctgacacccagtatctggatagtacaagctaaaacctttaagaaaataaatctcttctcacaagaagagttctgcctcataaaatcctttggtcaccatacctgaacacccaaactgtccttgccctataggataaaggtacacagttaggtattttctcctctgttgatgcctgaaaatcctgcagacataggaactcaggccttagaaaattctgtacccaaaaatttgcaattctctttggaaagttgaaagcacctttaaaagccacaatttgcaagccaggtgatgcactgtagcataacctggaagacatgagggctgcttcctcagatactaagaatcccactgccccaccaccagagcaaaacgatccccctcccagagaatgcacctcgccagaggccaacccacccgatacctcaagttcccctccaccgtggccctcctcctatagatcccgccccctccgtaccctcgggccaatcagagggcggcgtcccgtcgcggttgccatggtgcccgccgagtccctcccatcactcaccagatgtgcggcggctcgtccaagcggtggaagcgggtggcgaaggacagcagcgtcaccaaggccagcagggcccaccagccgaccgcctcgaagcgccgtgagccccaagcaggccgtttggggcttcgcgccacagcctcagcggccacgtcccggcctgcggccctagcagcctgggggccacagcggcccctccggggacgcagctcggactctgccaggcctccgcccgtggccggcggcatcttccccctcctctgggtcgccctccggcccggaggcacactttgtctgaccagccgccccgccaaggagtcacaagagggcagctcggggtaccccgggaaatgcaacgcccttcactgcagcggagcgcggggccccgggctcggggcggggcgggcagcgtggtcgcggcccgggccgctaggaggcggcaggaggcgcagagcatgtcgggaccgggagggccggccggcccggggcgggggggactgggcaggaggggtcgggctcagggaactgcaactcccagcagcccccaggtacggggcgtggcgggagagctgggcgagccagaggcgaccggaaggatctttctagtccagcccctcgctttacccggacgaaagacacgggcctgattcgtcgagtctcactgagccttagtcgtcggcaggtcccaggcgcgaagtttctcggcctggaggagggggtcgcgcgaagtgccagatgcaggcggggaaggtctgtgacgcgcacccgggtggagggaagctggttagacacctggagaccctggggggcggggtcagaagtgagctgcaccgcccgcccaggccgacaacgactcccggcatgcagtgctttgcgccgggcacgctctgcgcctgcgtgctgcgcgctgcccgctggggctcgaagttccgggagggttgggccagaggaggcggtcctggtagggagtgcgtagcagggtggagtcgctgtccggtcgcgcttcacttctgctccgccctccctgctccccataacagacccctccctccactaaggcttccaaacgtcgccccaagcctcccaatttctcgcagcccttcatgctcttctcttggccctagcaggaggtgaccttccagtaatgtttgtattttaagagtccccgggccgggcgcggtggctcacgcctgtaatcccagcactttgggaggccgaggcgggcggatcacaaggtcaggagatagagaccatcctggctaacacgatgaaaccctgtctctattaaaatacaaaaaaattagccaggcgtggtagcgggcgcctgtagtcccagctactcgggaggctgaggcaggagaatagcgtgaacccaggaggcggagcttgcagtgagccgagatcgcgccactgcactccagcctgggcgaaagagcgggactccggctcaaaaaaaaaaaaaaaaggccccgagcgaggagaggcagtcatgacaatcacctggggagcttcacggctttcacatgttcttcccggggcctgctccagagccactctgttcatctctggtggaacgggctcgagaatctgcatgtttttataagcggtctagatggttcttaacgtgccatgaagtttgagaaccacttttgtggcactaaggaaggtggcacgttagatgggactttgcgtcacgttaataatgtatagtcctccctcttccaaatgggattttaggagtctttttctcaaatcatgtgtaagacatggtttaaaaataaaatctgctaaagtaatcagaatgcatatttgaattggaaacaca

SEQ ID NO: 6591 - DNA, 6000 bp, Homo sapiens; identical to SEQ ID NO: 1830

SEQ ID NO: 6592 - DNA, 6000 bp, Homo sapiens; identical to SEQ ID NO: 1831

SEQ ID NO: 6593 - DNA, 6000 bp, Homo sapiens
tgttctctaagtttcatactggtaccctgtgctgcctctacacacatcttgtccttattatatatctcatggtgataaatgatggttgttactaaaaaatctgaaaagacatatatgaggaatgccccaagtgctgttggtatgaatcttctttattcattaatgtattaatatacattacttaaacagtgtatgtttcctcttttcagtgaaataaagtctgtcatactataaaagtaatatatttattgagaatttgaaaaacaaaagatagttctaccattcacagaccactatgttaacactatgatttattttctttagaatcactcaattgtgtattttatttatttatttacttatttttgagatttatttatttatttatttttgagacagagtctcactctgagacccaggctggagtacagtggtgcaatttcagcttactacatcttccgcctcctgggttcaagtgattttgtgcctcagcctcctgagtagctgggattacaggcatgcactaccacacctggctaatttttgtttagtatagatggggtttcaccatgttggccaggttggtcttgaactcccgacctcaggtaatccacccacctcagcctcccaaagtgctgggattacaggcgtgagccactgcacccagaccaatttggtattttttttttccagacctaacagttgaactcaagagctaacaatcagaagttttcttaagtctgcttaaatctctaaagctatcctcggtagtcaccagtatctatcaagattacggtataggccaggcacagtggctcacacctgtaatcccagcacattgggaggccaaggcgggtggatcatttgaggtcaggagtttgagaccagcctggccaacatggtgaaaccccgtctctactaaaaatacaaaaattagccgggcatggtggcacatgcctataatcgcagctactcgggaggctgaggcagaactgcttgaacctgggaggcagaggctgcagtgagctgagattgtgccactgcattccagcctgggtgacagagcgagactttgtctcaaaaaaaaaaaaaaaaaaaaaaaaagattatggtatacataattgtaggcaactggttcagagaaaatactggagatgactgagtaaatcaatgattttcagagttacttgctaatttgaggtcttctaaatttttcactattcacttcgcagttatttaatagtaagcttagactaacaaattccaccagccacataaaccacctgatggtgagaacaggtagcagtaatgtggttgttcttttatttgatcctagtttccatatattacagcaaatttatgttactgtggcaaagacccatcaggggttaccttctgattatatccctgaaacctggagagggagagaagaaataagcaaattcaagaatcactggcttagatcttgggaatgattacaatgatgctgttattcttgtggcaaacaaaatatatcctagaaccagggaacttaagaataaagggagatcttatcagtcatcaagctctaaccttttctgatgcatgagtttcctttctgttctggaaaagtagttgtccaacctttgcttgaatgtctccaataaggcctgattcttacctgaaaaatgaggtaatatgattactaagtccccttcaagttctaatagtcttttcaatgaaatgtaaacttctattggctaatcatttatttttttaaagtttcttcctttttagtaagtgaaattagtttcctctattctgaggttacaattctttggcatatgtgttactattaaaaaaaatacttaatgtcatgctatccttatttatccaggtataagtatacattacacttcccttatgattttcctactaattctgggagggatggttcagaaatcttaagaaacttacatgaggtcacttatacagatagtaactggacagctggagcctaactaaggtctttggacttcaaaatccagtattttccccattgcacctataaaatgacctatttaagacctataaaatgtcttataagctattatgacacatatcatctatctaaaaatattttccaaatagccaaatatatgttataagctaagtgactgaccaggtgcagtggctcaatcccagcattttgggaggctgaggtgggtggatagcttgagcccaaaagttctacatcagcctgggcaacatggcaaaaccccatctctacaaaaaatacaaaaatgagccggcatggtggtgtgcacctgtagtcccagctactcaggaggctgaggcaggaggatcacttgagcccaggagcttgaggctgcagtgagccatgatcacgccactgctctcttgcctgggtgacagaaagagaccctgtctcaaagaaaaaacgtataagctaagtcataaaacctagcatcacaaacatgggtgccaacattaggtatttcttggtgggatgcagtaagacagcatcacctatgtggtattctggccaaagtttgatatggctctaatcatgagggaataattaggaaaatctacaacatggaacaatttgtaagacaacctggctggtcttttcaaaagtgtcagtcataaagaaaaggggttgagagggctgatttagagtgagaaaataaggccaggcatgatggttcacgcctgtaatcccagcactttgggaggctgaggtgggcagatcacgtgcggtcaggagttccagaccagcctggccaacatggtgaaaccccatctttactaaaaacacaaaaattatctgggcagagtggcgggtgcctataatcccagctatttgggaggctgaggcagaagaatcacttgaacccaggaggcagaggttgcagtgagctgagaaaataagcctgggcaataaggcgagacctagtttctacaaaaaagtaaaaaattagccagcgtggtggcaagtgcttgtagtcctagctactcaggaggctgagacaggaggattgcctgagctcaggagttgaaggcttcagggagctatgatcatgacagagcaaggccctgtctctggaaaaaaaaaaaaaaagagggaaaggaactaaagagtaatgacaaagagctgtaagatccaaattaagttgtcattttaataattcagagtgcctacactcagatcttaggtcactgtttctttcacataagtttcacctagaaggtaagagttaaactatctccaaggtctctggcgactctgacattgtagttctttcagtacactcataatatacaataaattgtgaacaaacaagtaccacctatgagcccaattacgaagagaaaatgtaactaaaataaaaaataatggccacgtgcggtggctcacgcttgtaatactagcactttggtaggccgaggcgggtgaatcaagtcaggagttcgagaccaacctggccaacatggtgaaaccccgtctctaataaaaatacaaaaaaaattagctgggcgtggtggcgggcgcctgtaatccagctactcaggaggcctgaggcagaagaatcgcttgaacctgggaggcggaggttgcagtgagccaagatcgcgccactgcactccagcctgtgccacagagtgagactttgtctcaaaaaacaacacaaaactcattagagaaactcagcaagttacaaaaaaataataattaaaagggtctttaacgctgagcccttaaagtctttttttttcttttttttttaagacagtcttgatctgtcactcaggctggagcacaatggcgcgatctcagctcactgcaacctccacctgccgggttcaagcaattctcttgcctcagcctcctgagtagctgggactacaggcgcgcgccaccatgcccagttaattttttgtattttcagtagaggcggggtttcaccttgctggccaggctggtctcgaactcctgatctcgtgatccgcccgccttggcctcccaaagtgctgggattacaggcgtgagccaccgcgctcagactttaaagtccattttaagtctagacttctatgaaggtagactgccgagatgtaaaagaaataaaattagttatttagcttttagatcggattacattttctgctttgattattctaaagcctccagtaaggcgtaaagggaaagctctaagtagcgcatcctgggaaatgagcagatcagggaaggggtgttagacctggtattatgtctaaagacgattttcatttaaaggaggatcttcccccgggcagctcaaggtcacatcgtaaataccttatagtctaattcagtgtcccaaaacaggaccccgactccccagatccgggttgggggtggctcagggcctaaagttcctaccctcgcccaggtgacaccatctccaggaaggtctgcacccgacccggcgaagcgctgtcccgcttcgcaccccccactgctccaggtacgtgcggcggcctcctcgggagaccccgccactttcctggagcgtagcctgccaccccccgtccgggaaccccggattctcacggcagagaacagacaccatacttaagcacaggctctcgcatccgacatcagtacaaggctgggggttgttgggggacggttgagccttgggagggagggtcagggtctggacaggagccgcggccgccagatgggaaagaacacgtgggagcagtaatgtcaagtgacacttaaacccttagacgccgattcgttataacgcgaggaaatctagaagaaaaagcaggtaccatcagcgaattctaaaatctcctaaggattaacttcggttattttctgcttagacaacgctttctattcccgacttcctctccaataatgacccgaatctgtcgaaacttcttggaagcctaatttacctaatcccacgtccctaacggtcttcggaagcgaagcagtgtcaacagtccctggtaaacacaagtagtattacaagtcgggagctcttcaagtcttggatgagactgtagagcggtcttgtgcggcaatgtgctaccttaaaataaataaataaataaacccctgttatgtccggagtttgtttccacccggagaggaatggaagagcaccagagagcgcttagctttctggttggatgttttgggtgagtttcttggcgcgcatgcgtgttgtgtctcaagggcgggtttgaagggaagtgggtgttgacctgcgggcaactgacgctgttgtcagattacacccacgacggtgcgggtctcgggcgttctggagatacgtaggggtgaatttatgtttccgacgattgcatctggaggggtgtgtaagactctgtggctgaagaaagctattacgcttcttatgtgggtcattattttaaaaatagcatttcgcttttatttgcttgactgcctcttctcaacaaattttaagcccgccactacatgtgtttggttttgccctaccagctctggggttggggagtgcactgttatggttattgttgctcctgtggccattctcttgtcatccccactttcacattttggcgtggtgtattaatagactgagtgggattaatgggtaaatatgactttatagtcagctctaatcctggattcaatatcagaatttagattttcagctttgtggatgttcgacattttaaaaacagttattgcaaagaggtgaaaattttgttctgaagtcttaaggaaacagagaaagtttttccgtccttaagtgtgggacttgttttgtgaccaacaatatgaaaggctctgaggtcagcttggagaagaaaaaaaagattaagatgccagtgaagagacttcgtgaggtagtttctcaaaatcatggagatcatttggttttgctgaaagatgagttgccctgtgttcctccggcattgtctgcaaataaacgtcttcctgttggaacg

SEQ ID NO: 6594 - DNA, 6000 bp, Homo sapiens
atttccccctcagtaaacaggctgcaaagagataattagcctgtcattttagattccagtgcagaagaactaaaagcaggctatgtggttacagactcaagaggcttaaacgaaaacaaattaagtgagtttatgttccaaccaaatctagtgaccatgtgatccaatttctcttcagcccttgagtgggacatgctcctgagaggtcactcagattgtgcacctttggttatactgtttagactgaatcacgacatgaataatcaactatctgactaatcgactatctggacactaaaaacacaaccactgtaagaaaaagaaagccacaggcagacaaaatgttaacattttgacataaaaccacaatagaaaactaaaaaacatcaaggctgtttgtcattgactccctattattcttaccattcaacatggtagccaccaaattttgaattttaattcatgcacattgaaatagccacagatattatatatatatatatatatatatatatatatatatatatatatatatttttttttttttttttttttttttttttttgagacagcgtctccctctgtcgcccaggctggagtgcagtggtgcaatctcggctcactgcaacctctgcctcctgggttcaagtgattctcctgcctcagcctcctgagtagctgggacagatatgaaatattttcatcactgcaaaaagacttattgtaatattctaacttctaccttagaaccatgaacaagtttacctgacctgtttccatcctcaacatctaaatgtattgatagctctgggggacatacacaccaaactaagttctactgctgacttcaggatcacaatagagttttattttcctttaaacttaaaaaaaaaacaaaaacaaaaacaaaaaaacctgcctttaagtgatgcaacaagtatgcctcagatagtttcataattaaagaatgatttatctctcctctggggaactgaagaacccaggtgcctcaaataaaagactattaaaaacaattacaatgcataaaacaataagaacaccatgaccactggagagcttagttcataagaacataaatcctttccttccttttcaccaaaacctcagctaacaaacatgaagacactcaataggtattctctgcagagaacacttttaaaaaacaagttatggttattctggataatgacacattcctgctttgaaggaataagatacaccaaaaaaccaaaacccttaactcaacaatacctgatatggcttggatgtttgttccctccaaatctcacgctgaaatgtgatttccaatgttagaggtgaggtctggtgggaggtgactggatcgtggagatgaatccctcatgaatgatttggcatcatcctcttgatgataagtgagttctcactcagttagttcacctgagatatggttgtttaaaagagtctgggacctcctcccgtctctctctctctcactcccaactctcgccatgtgacatacctgctccccctttcagtatgattctaagcttcttgaggccctcaccagaaacagataccaacaccacacttcctgtacaccctgcaataccatgagccaattaaaactcttttcttataaattactcagtctcaggtattccaaatggactaacagaacacctgaatatccaattccatttcttactgctgttttctctctgaaagggtgagagaaatctcattaaatttcattctttcttagagctctattgcttactcattgtatcattttctagaggaagatggcagaaggatccaatcaaacgaattccaagtttaaagcagttttttggggtttacgcccaagcctctggtccaggccaaatatagtatttccacactgctttggaagcccagcttaactctaacacagcgttcccaaaagcagcaccactgacatctggagccagatacctccttgttatggggattgccctgtgccttgcaggatgtttagcaaacatccctagcctatcctcactagatgtcagcaatagctgccaccagttgtgacgagcaaaaatgtttccaaacattgccatgccctggggatacaaaatcgtacctggttgaaaaccattgctctaacccaaggaacattcttggttatctcaaccctaattcttcacattcattagatgctcatccagatctctgcattcagactttctctcaccatcaaactcagcaaatatttgcgaaacctctaaaacacaacatcaagggctctagataaataaacaagcaagagagattccgttcctaactccaagcaggtttcttagtagataaagaattgtaataaaagacgcccaattatataatgttttgaattgttaattgtttctccctgaaatggatctctcatctcatcaaactgaaaacaccttgaggacagagaccataacctgtctgcgagtaccaatacttgattcatggccaataaaaacaaacaattatagacttcatcataacaagatgacaatttcatccagacagtaaaaacttgcgctaacttgaacaggtaagttaacctttctcagctgtagtttgttcctctgtaaaatgggaagaaaatgattgttgacatgactaaatcagaaaatataaatttttttccacctctggcacagaataagcattcaatatctgtaggttatcattactattattttattagcaacaaatcctacctcaagaggaagagcttgctctgggctactataataaacccctacatgacattaaaaaaaaaaattatcaccctgcattctgagggtaagaggaaggaaagtaagcatctctaccaatgtcctgggaggaagtgaatgcaggaatgaattagatgtcagggggaaaaaaaaacacactcatctatctaaaacgcgtgggtacgtttgccataaacacatgagaacctaaaggggaagtaaaaacatgcttaatttgtaaatactggcgcatgcaagggacaagtgttataagacttacctttctgtgtttacttgcttagtcttttagacattatgcttagaatttctactgctatgttaaatatatgccaacgatttttaatttaatacaaagcagagttcgtaagaaaaaaaggcaaaatttgtcaggtgttttaaagtaaaagaatataaaatcatgggaaagagctgggtgagttgtgtgtgtgtttgaataaggcagcattatgagagggaagatacttgggatcagagtagaagacagaaaaaggcaccatgttggaagccatacatccaagaacacctctggcggcacaggaagttcaactgaacaaaaagagaccttactgtcacaatggttgagacgagtatagtgtgtaccatggactataccccaaatgccttagacaaagcagctcaagtaatcctcacaataatcctatgaggcagatatttttagtaatcacattttacagatgaggaaactgacgtttcagactccaatccaggcaccctggctccacagtagtgcctcaaccattatactttatggtgtctattttaatttcagacctagaaaattaatttatatttgctacttaaataagacaagttctctcccctctaccctttcgtatttcaaaagagcatcctttcagttgcatcgtgtgtggtgttcaggaggctgaaagaagaaagtgtgatggatggactcttttgtctttggacactgaaataatacacacggaggaactcgcgttagtagaaatggagacgtcgtcctggacaagaagaggatgagggtcttgagaatgagggaggtaggccaaatttttaattcctgctcttgctttggctactgtgttcaagcaaaagaccccagacactacctatttcaactctgcttttcatttttcccactctaagcgatggagaggatggcagcaaggccagggggcctatgtgcaggaaggctagggcgcagtgggcttctggcagaggaaggcaaggctgccaacccgggtgggggccgagaggcgcgtggtaaggctggggcaggggactgagatggggatagggtggggagccagaagcagggggcggcgaggccagtagggttcgggtcggcagtctagatgtgattagcagacggaggtgggacccgaaccccggctgaagctgaaactgaagctgaagaggcgccaggggcagagccaccctgtcactaccatttgggcagatctcagaaaggaagcggggcaggaatcaaggcatttcgaaacaggagtgagtagaaaataacctcgagcccagggcccgggtggtggcagcggcggggaaggggccccgcgcgcgaaggggctgccgaggtgggtccgctccgcggggaagcccaggacagagcgcggcggaggctcgcgccgtggtgcggggccctgaggccgggcggcacccacccgccagcgccccggccttgcgtacctgaggcggccgcctggctcccctccactccctggcagtccccgacgccgccagccgaccctgggcgggctgtggggctccaggagcccggcccctcagccgcctgcaggtcagacatctgcagcccgcgcacggagctctccgctgccagccgcgagtggctccggaaacagccgaaggccgagcgagcgccgagcacagccgagcgcagcctgcaggccggaagaagcggcgcggcggccgcttgaaaagctagctgacccaggggcggccacaggagctctggcccgctgaggctggcgatgaggccgcagggagggttactgcgtgcttgtgacagacgatttttaaagtcagggcttgaaagaacaaacaaaacctggggaagagtcaggaagacactgccggaaatcgtggtatccatagagacgctatcggaagttggggttgctaggaagccgcggcgcgtctgctaagctgcaaatggctgaagtcccggaggattatgattccggcccagatgaagatggagagctggagcctgagaggcctgaactgcctggacttcataaattgtatgaaaatgccgaaccagacaccatggcaaaggcagactcgaagctaccagcagagatttaccaagagccacagccagagaccgaggaagaggacttcaaagagggggagccagacagtgctaagaacgtgcagctgaaacctggcgggacgtcccaggaaggaattgccaaggagtccaagagagacgtaccaagcgaaactgaaccagggatacaccaagaggtaaagtcggaaacatccagagagatgggagagtttttcaaagatttggaggcccctatggatgaaacgcataaagagtcagacctagagccaccagaggaggctaaaccaaatgttacagaggatgtgttcctagagtcagctatggaaacagatccagatccagtgccaccaacggaaaccatgtctgaggtttcgggggccacagtcagagagagaaatttagaattactagaggaggagactgaaccgggggttccagaggaatcacttagagtgcaacatgaagagacaggtctagagcctccagagcagaccaaacaagattttccaagtgagaaactaggagaatcacttgaagagacagatcttcagccaccaaagatgaccaaaccagagactccagaggagacacaaagagagtcaactgagaagaaaaggacagagccacccgagcaggctagactggaatttctggagaaggaaccaagaaagtctagtgaggaggcaggtctagagcctccagaagagactcaaccagaggttccagaggagatgcaaagaaaggcaactgaggagaaagggacagaactacctgagcggactaaaccagactttccagaccacaagccaagaaagtctactgatgagaacgttcctgagccactagaagagatcaaat

SEQ ID NO: 6595 - DNA, 6000 bp, Homo sapiens
ggcataattccataggtcccatttgctcttcctccgttaaaaggaaaatgtgtagtatcatataaagtttatatgggttttatgttcagaatattgtagagattaagaaaaacctttgcctggtgggaggtaagattaactttattggtttgatttcccattattccaaatggaagactgttggatgatggggggtagctggggaaaggaaaaaaatgccaggagattagaatgttgaaagaaagagaagttgagatttgaaactaatccattttttaaaaatcttacaaccaagcatggtagctcacgcctgtgggaggccaaggtgggatgatcacttgaggtcaggagttcaagaccagcctgggcaacatggcaagaccctgtctcttttaaacttagaaacaaacaaacaaacaaaaatctttttaataaaataaaggagccgggtacagtgactcacgcctgtaatcccagcattttaggaggccaaggtgtgaggaccacttgaccccaggagttcaagacaaacctgggcaacataccaaggtctcatctctacaaatattaaaaaataattagccacgcatggtggcatgcacccataatcccagatactccagaggctaaggcgggagaatggcttgaaccagggagttcaaggctgcagtgagccgtgatcacgccactactgcactccaacctgggcaacatagagagacaacccccaaccccaatctcaaaaaaaaaaaaaaaaaaattaaagaaaataaaatgttaaatctacacatccccatataatattcttctgttggagatttttttacaggttctttaaaaatcagtcgtaaatatcttttacttttaaatatgtttaattgtttcactataacaagctgcaatgtaaaaacaattcaaactccaagaaagaaactccatactatacggtagtgaaatatgagccagagaatcaataagaggatgctacactactgttgaagaccagaagttgatatctcctttgaaaagtatcaacagaagcagcattgatgcagggtacaaaagtactataataaagctggctgtggtagcacatgcctatagtcccagctactcaagagactgaggtaggaggattgcttgagcccaggagttcaaggccaacctggacaaaacagcaagatcacatctctttgggggaaaaaaaaaaaaaggtaccataatagtaatacttttagtttcagagttgtttaaaaatcttaattttatgtttagtaaagtaacttattcaagtttttttaaatatttactcttatgattgtaaaactttcttttatatttatcaatttgctataatatgaaatgatgtatccaccatttaactaaatcaagagatttattaaatgcagtttatcataaatcaaaaataaccattaatgaaatggaagaatctatttactttatcagcattgagattctatttacataatgaagagctatggataataaacagcccaaacactatctgcaaaaaaaccaatattccaatgattttaatatacatataactatcagtttctaggcttggatttaaagaatatgtgaatggaaagaagtaaattaacatactaatttattacagcttagaaacctaaatgaaatgccacaggccacaaaacaactgcttcgtattcaaaggcacacattcaatttggtagatcagctggacgcactgcattatactgcaggagataagggttaagtgacctggggatattgttctccagatgtctaaaaggtccatttttttattggaattatctctactttaaaaaaaaaaaaaaaaggaattatatctacttttgataaatacctagcttaccacacaattaataccttcgcccatataagattctacttgaagcttcgtttttgaaattttaggattgtagctattataaaaacaaaatttaagaacacacaacatgtacaatgggtcaagaatacatgccttagattctgatgaacaggacaagaaggttaagaaaatactataacatactctaagtttgggggtacattttagagatttttaagtgagaaatccaataaatctttaagcatttagctttccattattgcagcgcatgaaaagacttttttaaactaatttgtaatacacaatatattcactccacaaataactatgtacatatatatgcccacatcaatttcctactcttttaattaaaaatttatgtttcttttggtcataaaaatctggttttgggtgttttaaaagttcaaacagctattaagctatactttgctttggcactagctccccctccagaccaatgtactaatataacagcatttttaaaaataataagttaacagttttttccaatccactggcaaattttaagattcaccacttttaaggacactccaattgcgtaaaaataactggtaagaatttgcaacaaaacaatgcaggatgtaatcagaattagttttgttttgtttttttcgattccatacatcttaaacagaactgatttgtaggaaaacaacttcaggtgactttttaaattcaaaaatatcctcaaaatataacctatataaggccgtactttatggaaattattttgaatcactatcctattacacaagacactcttcaagttaactcacaacttgaccaaagatacatttttgcatctgtttctgcaatctatgcaagtttcattccagctgttcagctcttgaattcaaatagaattctcaatttataaggcagcaaaaagaaaatccatgtcttggaactacctttgtacgtgtcttatagcctattcatctctaactccctgcattttttacacactaaacctgtgaaatcacaattacaaatgcttgaattcccaccttttcaatactactgtagtatttacaaatcaagtaattaagattttctatacacataccagatttcacaaggacagcaaggtacagggccttattatttggcatagggttttaagatgtttttacagttattttaaagagcagagactacaactccattatttctcatatatctgatatactgtagtgcttaaataataatttctctcctaaaatactttctatatgatgcacctatttaaagaattagtcataaaacatagaatgtaaatttaatcaagaaaataaacatgcacctaaccgccggaataacaagaaaaaaaaaatctataatgaaacctgcctacagttttcatagaggcaagccagttaagtcagttacttgagatgcgtttaactctaaactgacacaaaacttgtgttgaatttgttccgcaaaaccttgaaatttggggttatgtactacagaatttggcttttctgggtccaccttcctgagtgggtttaaataaactgtgaataattaaaacataggaaggaaaaaaacaccacctgtccgtgcctttaaccaaggcctcaatctatatattatatggcaaaatgctaaaataaaagctcatccgggacaaaccctaagcatgacactgccacttaagaaatacactgcgtctctgaagattgcaatccccactgtgaagaaagaacaggtgctgcacccgacaacccactcaatcctgcaggacaaacctcctagaactgataaatatggactcatttaaccttcccaaataagttgatactcaaaagccgccagctcgtcatttgcacatcaaaagggagtacagctgcactcaagcctttaactgccctgcatcagtccctcgcggatctttgtgagggtccactccctgctttctagcccgagcagcactcagaaagagcccataacgcacgggcatcttcctccccacaaaccgcgactccagggaccgagctgctgacgaagggaaggtaggtgtggaggggaaacgacggacacctcccacccccgcccccaacccttctccttccctaggctttggcccctgccctaggcaaggatgcgcgacgccgagggcagcagcggcgcagctccgcgtcccggctggagaggcgggcgcccctcaccctctgcccgcgcccccggggctgcgccaaggcatccgccagagcgtcccgggggctccctccccacttttccgagagccgctggttaaccggcagcagttgcagcaacaggcccgggtgaacgagcagggacagccgcggagcctcctcagatcccgcgcgcagcccagcccaagaccccgaggcgcgcggggcccggctcccaaaacgcccccttaccccaggcgggagcagaggcggtctccgccgctccccgtcgcagctgccaaagccacagccctcagccgcagctgccccacgatgggggagtgggaagggtggctgagtggaggatgctactcccgaccgaacggagaggaagaaacggaaacaggaaccgccgccgccgcttaacggagccttcggcgccactgactgaggcagagcgcgaggcggcgcgagccgggcagtcgctgacagcgcgagaccgagagcgagctgggtccagggcgcgcgaccctgagcagtgccggccccattccgcggggagacgaagggacgggtcggctggggccaggcggcgggggtgggatggggagggggcctggagaggagggaaccggctgctcgggtcggccggagataacgcgcgcacgcgccggagcggctctgacaacgagcgcaggcggggaagcctcggccagcgccggcgtgcgcgcgcgaatgggggagcgcgcccctcggcgttcctggcttctgggagagggcgcgcatgcgccggccgctgccacctacggcgaccctggcatgtgccagggattctccccgcccccttcctcgctgcgccggtggagagcgtagcagcagcatccaccgcctagcagagccgcgggccacagcgggacggcacagttccagcagggcagcggctgcgcacgccggctccggctcgcacacaggcgtaggccgccctctaccgcctgaaggccggaggctgagcggggcgcgagcggatcctggatcccgggaggagactcgcctccagagaatgctgtgctccctacagcgccgggaatggaccggcccgtgccagctcagtcggcggccctagggggcacccgcactagaggttttgaagctggctccttgctacttttaggggtgcgcgctgctgctgctcagcccctgcagcccgcatttggccgcttgactgctgcttccagcgcgatcctacaatggcatcgctcccccaggagactcagcgaagccctactttatcttgtaagagctgtttccacattcactcgaagagaaagaccccccccacgagggcctgagttcgatgcccggcctctcccgacccgcggctgcgacagcccctctgaggcggaagtttatttagtacgggaaagagaacagcacggggagaggggagaggctttgccctaggatgcgtcctacccgctcggactcggaaaattcccggcgcccgcgatgcagagcagtggaccgaagggctgccccagagcagcccagaccgccagctgagcgggaggaccggagcgcgccgccccagcacacaaagtagtcgcgggacgaggggtgccgccgaggccaatcagagctgcgcgccgcgtgagtggagtgcgagccggccaatcagagggccggaagatgagcttcccgttccaaactcttccctgtagccttgggacccagatcccaagcctggggcgctttacggtgggagagcgaaatggtgcccttaagacaagaatcatttctctaggcttgggcattttaaagtacataccggggatacttatcccaaagcaagtagcggcggccttttagatgttaaatattaaaagatcacagaaaggagatttaagaggcagtggcctgtcaaggttgcaatctgcctaa

SEQ ID NO: 6596 - DNA, 6000 bp, Homo sapiens; identical to SEQ ID NO: 3249

SEQ ID NO: 6597 - DNA, 6000 bp, Homo sapiens; identical to SEQ ID NO: 1818

SEQ ID NO: 6598 - DNA, 6000 bp, Homo sapiens
aagtcacatgacctctggacctctttgcctcaactttaaactcaaagggctagaccagatgacctctaaaaatgtgtgaatctatatagggttccatgaccacctgagggcagcatttgaaggtgaaaagatggaattattctgctcactttcccaggttctttactcttattatatttgagctttcttaaaatgagccttagcctacttaatttcattttatactcagacactgcagaaaaacgagctaggtcagagcctgaatctgggttagctataaatgtgacacagaattgtcatctgctgtgaaacagtgctgcagcttaaactaccccacacatcagcgtgatgaagtggaagctgaaatggacactctcagtagagaggctcaggaagccaggaaaggctgccatgggccttcttaagtttcattttgggagaccaacttgaagggattttaaataccttctcagggactatgtcacggaagaccttgaattaataactctccatctgtaacatggaatatgagtcatgtaagccccagaatcatgtaaacctgattctgaagagggctttgagatatatgtaaagcttctttatggctttcttgtcaggcatcacagagtcaccaagtaagtctatttcctcacttgcccttataatgcttttttttttttttttttaaatacatgaattgcccagggcagtgtaaaatcaatgaaaagtattcagagaagcttgggggaaaaagggtcaagtgctcaccacaaagtctattactccagtagctgccaaaggctagctaaggcagcatcagaatcatctgggaagtgttttagcaactggattcctgagctccacccaggttcaataaataggtttggtgagggaaatgggtacctgtgtttgttgacgtttcctaggttactctgatgtacagcctggtttgggaaccacagcatagggccagtcctataagtcctataaaggatgcagaaattctttgatttcttaccaaggtttggcttgccagtgtagagcttttcatagagaaaagtgtggtctcggaagctctgcagcgtgttccccatggctatgatggacaccataaccagccaacttcttaacacattcaggaaacggctcatgactcccctcaaacgtgggagggctttttgccttggaaacaaaggcagaggacatgagacaatgagggccagtctatgttaaccataagcaggaagggaggaagaatgaagcaggccaaaaaaagaaattcagtcacactaatagtggtgaatgaacagtatactttgcaataagtggcacagtacttatccttgtctaagcaatttctccaaaatattaccctaaatcagaactcctttttctgggttggaatcagtcctctatctttacttctataccttcatgttttcatgccattccttcgtaatgcaaatagctcaaaggcgattataactatactcacagacacctgcctggctattgatgacggattcttccaagtgtatggaactttataaatttgagtaggacttatggtgtgaggtcactatttacatccctaggttttctggactctggttctcaggtataccatgctccataaactagaagaacaatctaaaagttaaaaataaactgctgtgtgtcaactccaaataaaatcctaagcccatcacggactgaacagagcccctcttggcctaggggaccccagaaaaatcctaaaactgagctcctggccatgacaagatgggaggtctgacatgccctgttatattcgttgtgttttcaggtttagagacagcaacttaccagcattaaagttaaaatagagatcataagaatgacacaacagattctttgtgcaataagataccaaattataaacaagacctaaggccatgccaggcaagggttaagttacacactcctacatttaaagaataaaagttatattctgccacaaggttttttttttctccagcagctagatgaacactggccttgagataagcaatattaaaacaattgcagctcatccagctcacagaggctgactacctgacccctgttccaccagttgtaactacagctttgattggacaagagactgatttcagtaattttctccagataagaccaccaaccgtggactgctcctggccagtttagcaggatcacacacttgagtgtcttggtgtcctgaaaagactttttgacgtatagagcctaggtgtgatagacttaaatgttaggtctccactccaaagtgaacagggttcatatgtggttacatatgtttgttcaatatgcatgtgtcaggacaaccttcaggaatattcacagctcctcctgtaacctgtcgaatgtgtatgtttagcaaacctgttcagcatgaagctctaccccaaacccttctccttcaaagtaactgtctctggtcttggtgggaggcactcttccctgttgggtggctgtaaccctttgcaagagataaagcctcttttccttttttccaaatttataaattgtgtgtgtttaagttaacgtgtgagtttaggactagtaagaaaattatatagcgaaggaaacagcaatcttggtgttgggttgcaagaaaataataggtttcagtcattgagcacttacaccgtgaactgtgccaagcacctaacatatattaccatttaatctttacaatgaggtaagcaggcactattaatatttccatcttacagatgagggttggaacagagaggttaaacaagtttcttaaggtcacacagcaaagttggcagagctgagataagaatcatggtctgctggactgctgcagtgctacctcattgtttgagactattttaatgaagttcccattttttgagaaagaaaagcataccatatccacttttgtcttcaagttgtatggaaaatacaattagattacatactttttgttttttaatttattatttatttatttatttttttgagacagggtcttgctctgtcacacaggctggaatgcagtggcatagtcatggctcattgcagccttgaaatcaaaggcttaagtgatcctcctacctcaacctctccacttgggctcaactgatccactcaccttggcctcgcctcccaaatgctgggattacaggtgtgagctacagcacccagcctttttttttttttttttaaggcttagttcaactcttgttgagtagtaatttcagttagtctgatttaaataaaaccaaaatagataaataatctaataatggaatgactttttcccatcctcattattattttcttggtccacggtttatctgttgtcaggttaacctcttgggcctgaagtggtaataaactaacaggctttctttgtcactttggcaatacaagtttcggtattgttctctgctacccagtgggacagatattaaagtcagcaatggcccaagacagtgtgaaacaccgccgcccccccccgccaactccccgccccaaacaagcaataaagagatctagagaaggaagggtgaattgatgagcccttcagggagagctggatcacaaaggtggtctctgtcgaagatcagagagactgagggtctactggacatcacaggccattatcatttgggccaagatccacccatcctctttattttctcactctctctcaagaggagactcctccggggtttagaaaagctgcatggatgcacctctccacttttctgcacaagtatgccttccatttcacagaagtgttatctgttagaaatcccaacagatagctgatgaggacagagcctgagcacttctgaattgctctgccaatttctcaacctaatttccctaaagcttaagggcctcttagagtgtatacaacatctatttccaaattttgtcctggccctggcccagcccagccaagcccagcccagcataggtgtgctgttaaaacttaatcaggagaaagggattcttatcctggccctaccacttagtagctgtgtgaccctgggtaagtcatttacacttttcagtctcggtttcctcatctgcaaaatggagatagaaatatcaacccgaagggctattgtaagaattatatgacaaaaagtgaaggctctttgtacagtgctaggctcatagtggctgctcattcgctcatccattccttcgttccttgaattcaccaagccttctccatcttcctagctcccccttgtcatcgcctctcgaaaccttttccccccaaaaggttgccttccagttatcttccttccatcccacctccatttttccagactctccggatcctctcaatcagaagcaacacagacacctacatccctcttctcccccatattctccttacctggcgaccgggcccccagcacagcagtggcagcagcagccgctgccgcaaacaagctcccccaggacagctccagcccggagtccacctgagccatttgtccccgccccctccctcagccctgctccaggattgggccgtttccgtcagtactctctctgattggctgtcccggtttcgcccgagcaggagatggggagtgaacccctttactgccaatcagcggttgccgctgcctaagcctctccccaggtacgccgctcacgccgtaagccctcctgttggacctagcggaactccgggtttggagtcaacctcttaggggcggagaaaaaaacagcggaaaaaaaaaaaaaaaagaagactcccttcagctgagggcagggctctgcgcccgcgctgcgcggcggtgacgacattcgcccgcgtccgcagctgagcgttatgagcgcctgcgcagtggctccgagcgggcggttgcttgttggttgttgtagtaaccggggaagcagccgtcggcggctgccctgagccttcctggggaaggaggagggaggtaggcgcagagcgcggtccacgcctgctcgccccgaaccatgggaagatgagacaggtaaacgcctgcgcccgcgcgcttccctaccctagggaggagcattcccgggtccgggctggcgcctgcagcaggacttcccgctcagagcccgggagtagctgttggcttccgggcgcgccgcgttgaatcgcggctgcggggtcgtcccgtccttcccggggggagcatctgcggacctacgtgggattggggtgagctgggggtggggctgagaagcagattcctttcgggagaggagtctccttaggtgagtatctctactcttcttccgatagacctgtttctccccgctctgcaggcagcctaggagaggttggcatcccttcccgtttggaggttttgtttgtttaaacttaaagggcttcccagcattttgggaaagatcaagaaatcccgttgagaatcccctgaagaaagccattgaagttgttagacattgcctattgcgccgaagatctttgatcattatcggggtctgttttttttttgtcttatttacagtctcatcgtatttatgaatgcatggaaaagttaagaaggattgacagcaagtaattatcgctgagtaatttgggattatggtcatttaaacatgtttcttttatttgtagttcctatttcttcttctgacacacacaacgaacatgtacttttttactttagaaaaaatattttaagttagaaatgcagtgttggaaatttcctaatttcatcgtctatttgagagtcgtaccaaactttgtgatttttaggaagaataatttttaagagtggaagggcattcctcccctcccccacctatttatatggacctttgattcaagagaatatattcatctttcggttcattgttgaatttattttactggaaacatgatggcatcttgtcagcgtgcttgtcatagagtctaaataaatgttggcaggggttttttgttgtttttttttttttgagacggag

SEQ ID NO: 6599 - DNA, 6000 bp, Homo sapiens
taaatctacagagacagaaagtggattaatagttgcttagggctcaggagatggagtaaaatagggaatgattgctaataggtatggggtttcttcatgggataataaaaatgtacgaaaattgattatggtgatagttgcgtaactttgtaaatacactataatcctttcaattgtacactttaggtgaactaagaattatgtgtgtgtgtgtgtgtatatatatatacacacacacacacacatatatatatatatttttttttttttttttcagatgtagtgtctctctgtcacccaggctagagtgcagtggcaagatctcggctcactgcaatatctgccttctggattcaagcgattctcctgcctcagcctcccgtgtagctgggactacatggagtgccaccatgctcggctaattttttgtatttttagtagagatggggtttcaccttgttagccaggatgctctggatctcctgaccttgtgatctgcctgccttggcctcccaaagtgttgggacaggcttaagccaccgcacccagccaagaattatattttaataaactgttaaaataacatttgttatctctggatgatgaataactagcaattttttttttttgagacagagtctcactctgtgcccactggagtgcagtggcacaatctcggctcactgcaacctctgccctccgagttcaagcgattctcctgccttggcctcccaagtagctgggattacaggtgcctgccaccacacccagctaattttttatatttgtagtagagatgggttttcactatcttggccaggctggtcttgaactcctgacatcatgatccacccgcctcagcctcccaaagtgctgggattacaggcgtgagccaccacgaccagcaatttttattttcttatatctttttctaatttccaattttttagtaatgactgagaacactattttttaagtcaagggaaaattattttccaaagcgttccttgtgagaattagagtgcaactagtcaacagactagaggttgggatggagctgccacttgtattcatttactcattcattaaacacctactatgtactccagaaattgtcccagcatgagagaagttctaattcctaatcaaatataacagtttaacacaagactcccttcaaaagataaattatgcatcataccacctctgtcttaacttagcaccaaagattatattcaattatatcaagaagtatcaagcaactttctcttcattaaagtaattgtttttcaaattttaaaactcattttatgtaaaataatatcacagcaccaattcgtacttttgcagcaaaaaaggtataccaaaaaaaaagtcaattagcaacaagaggtaataactcaggaacactgggaatcatttctttacgatactttctggctatgaggtcaaccataaaaagaatctttacataaaatgctaccaagaagaaaattaaaacgaaaatcaaaagaattccttggaaagttggccttaacattgaaaagaaaaaggaaaagtgaaaaataaaaaaggaaaaggagggataagaggcatatgctcaagcaatgcgttatttcaatgacatttagataatgcctatcagtaaaaattaaatgctcaatcagactctccagagatagtaaggtaaaaaagttttagggggagtagcttcatctaaattcttaatctggagtgcaaaacaagacatttatgttttgaaaactttcactagctatattgatgtgcagcaagggttcataatcactatattaagtatttaataacatgtcccaaagaaaacaacagaatgagaaatctgttctataccttagaaacatctttagatacagtgtaacaaatacattggagggaaaaaactgaagagccaggacactacatgcactacccatactccataaggctagttgagacaagatgtggccttgaactagagaaaaagaaactagggttaagggctaattcatgaagcagaatctaatgaccaaatggttatggcaagtgaaggaaaaaagaggcaaaaatgattccaatatctctagtttttataaccagatggctagtgatgccattaaccaatgaatggaaggcaaaaagggaaggtggtttgaaagtcagaggagttaatagagaagaggtcaaagggacttaatgtattatttttaatgtttcactttttatgaaggatgtgtacatagatgttcatttcattatccctccaactagctgggactacaggcggcgccactaagcctggctaatttttgtctcttttgttgagacagggagtttcgccatgttacccaagctggtctcgaactcttgagctaaagcaatctgccagcctcagcctcccaaagtattgggattacaggcgtgagccattgctcacagcccttataatccttttaaaaatttaacctacttgtatcacaaaattcaaccagaggtcaaaactcaaaaacgcactgacaatcactgcttttatacactttcgtatgcatgacatatgtcatagtgaaaaaaaaaaaaaaaaggaaggtgaagacagtgcatttggttttggacctaatgagtttgcaagttttaggggaaagtacagaactatcaactcatgagatggaggctaaagaataaggtttaggcagggcatggtggctcacacctgtaatcccagcactttgggaggccgaagcaggcggatcacttcaggtcaggagttcaagaccaacctggccaacatggtggaaccccatctctactaaaaacacaaaaattagctgggcgtggtggcaggcacctgtaatcccagctactcggaaggctgaggcaggagaattgcttgaacctgggaggcggaggttgcagtgagccgagatggtgcctcggtactccagtctgggcgacagagcaaataaggtttggaaaagaacaaggtttggaaatgaaaagaataaggtttggacatggttggcatatagggacaatgccatggaagcaagcgagaagcctcgaggagagcctgtggaagaccatttgggttatagcaatgactgagggccaactaaaaggacggcgttaaccaagactgaaaataaccaaagagataggagcttttactaattccctttccctttctccatggcacataggagaaaatcaatttttaaaaagctacatttatggttatcttactgtaatcctgtggcaggtccagaatttccaaatagatggggacagaggagtaatctggaaggaagacttgaagatgcttttgcatagtactctatattaaggtagaaaataccagttggccatatcaaaaaactgagaaaaagcgatttgagggaaatatttccctcccctttggcaccacgattgctgtattctaggcactaaaccaaaccaaacctcttacctaatctcctttcttcctcaaaacaagcctattaagtagatgaggaaattgaggctagattggaatagaaactggctcagggtcacaaagcacctaaggagcactttagctctcccacagctttctacagctctttatatgcaactagtgtttctcattacccatcttgatataatgtgtatttatgtgcgttagcttctcaatggcagagttagtgttattcatttctgtatccttgtagccaagaacaagtatatattttgttaaattaagcatgtgaaagaatcaggtgaggatagcatgaagaaaggcagcaggggaaagtttcaagaaatggatggtcagcagcgtcaaatggtacagagagagctatcagtctatcttaaatcatcattggcattcaactgatattccatattcgtttattgaacgtctactacacgcaggacattgtgttaagcactacaaacacataggaaaaataaaagtctcgtacaagtaaaaggattttcggggaagtagcttcatctaaattcttgctcaggaaagcaaaacgaagactcaggcctgcaactgcctacatcttatttggctcaggtaaatcggaagacaactcaaaaggggcacagcgcatctttaataaaacttctcatggaagacgagataaagagccacagaaactcagtctcggtaacgatggccggtggccacggaggccgacttcccccggagtctctcgcctcctgagcagcgctggggctgcccctcgctccccctccgtagtctggggcgggaaaaagcagacacttaccgcaaaagacaccgctaaagccgtggccctgaggggccgggaattccttagcgaggccccacgccgtcggaagaaacccaagaaagctgggagcagacagacaggtatgaccccacaacccaacttcccgaactagataaagtagggtcccaacgcccagcaccacgtcgtcaactcccaccagctggaagaccaacggagtgccagcgaaccttccgcccaatgaggaaacgtcaccactccgcgtagtccagcctttctataggagaatctacttccgcttccggggcacaccgccgcgttccttctacgcggctcctgaaacagtttagatgtttacttgcttacactggtttttggtttcagtttcctaccgctgaataactgcaggagtaaagttagtggtaaaataggaggctgtctagggacgtgatttcggggaagaagtcaggcctcgacgagccaccttaagaaaagtgactaggcggagcactcccagctaagagcggaaagatgagagatagaggtgtgactgaaggcagggatccccaggcgcacgtgagacctccgtagaggggcggggcttagggctttgcagaccggaggcttgttccgcggagggtggggcggtctctgcttgcgcatgcgcaatgccagccagtgcctgcgcggcttgctccagcaaggtaaaatttcccactgcgaggcaggcagtgatgctgcggccgcttcgcactgtggctcctgccgaccgccaggcgctgttacagtggatgcgaactaaccgtaagtgtaagtgaccagagctagaggcaggtggtgggggcaaggatatgctgcaggcgctgactttgaggacttaagcggggtgaagccaacagccttccttgggatcgttgtgctggtctctgctgtcttggggggtagattgaccagggctttgagtgctctaacggaaaagagagttagttgctcgccacacgtagacaccaattaacaagagcgagccctagtatacaagaagagggattttatttctgaagccagcccgcttcgtctttggagcaaaaaagcgggcattttataaggtacaagaggaaatgagcaagaggtctctgctagctggtgccttatctaccgggtagttgagttggtgcatttctgagcagaaataagttgtaaaagtggccaagtgggcatgctttctgcttacccttctgaggcgaccgcctggcggtgggagttgcgtcttggatctcgtagatgaatttgctctgtagagaatggtctggtgaggggagttgagaggttattttgcagttcaaaaagggctaagtggaaagtgtagtggggaggggaaaagaggggaaaaaataaactatctcttggaaaatgggggtaatcggatacagtaccacttggaattaattgggtgtgggaaacctggttctgagtggtttgtgagttttcagcagacttcggacaagcctttagagctccttgtgcctaaccctttttctgaaagaaaatagagggttagccctcctccccattactcccacaaacttgttagaattggtacgttgccacctgaaaaagcattttgcaggagaggttttaggctgtagcgttagtaggaagtgttaaacgaaaaaccttagccaagttaaatttaacattttgagcaaagaatgattcacgaatcgggcag

SEQ ID NO: 6600 - DNA, 6000 bp, Homo sapiens
actatgttaacactatgatttattttctttagaatcactcaattgtgtattttatttatttatttacttatttttgagatttatttatttatttatttttgagacagagtctcactctgagacccaggctggagtacagtggtgcaatttcagcttactacatcttccgcctcctgggttcaagtgattttgtgcctcagcctcctgagtagctgggattacaggcatgcactaccacacctggctaatttttgtttagtatagatggggtttcaccatgttggccaggttggtcttgaactcccgacctcaggtaatccacccacctcagcctcccaaagtgctgggattacaggcgtgagccactgcacccagaccaatttggtattttttttttccagacctaacagttgaactcaagagctaacaatcagaagttttcttaagtctgcttaaatctctaaagctatcctcggtagtcaccagtatctatcaagattacggtataggccaggcacagtggctcacacctgtaatcccagcacattgggaggccaaggcgggtggatcatttgaggtcaggagtttgagaccagcctggccaacatggtgaaaccccgtctctactaaaaatacaaaaattagccgggcatggtggcacatgcctataatcgcagctactcgggaggctgaggcagaactgcttgaacctgggaggcagaggctgcagtgagctgagattgtgccactgcattccagcctgggtgacagagcgagactttgtctcaaaaaaaaaaaaaaaaaaaaaaaaagattatggtatacataattgtaggcaactggttcagagaaaatactggagatgactgagtaaatcaatgattttcagagttacttgctaatttgaggtcttctaaatttttcactattcacttcgcagttatttaatagtaagcttagactaacaaattccaccagccacataaaccacctgatggtgagaacaggtagcagtaatgtggttgttcttttatttgatcctagtttccatatattacagcaaatttatgttactgtggcaaagacccatcaggggttaccttctgattatatccctgaaacctggagagggagagaagaaataagcaaattcaagaatcactggcttagatcttgggaatgattacaatgatgctgttattcttgtggcaaacaaaatatatcctagaaccagggaacttaagaataaagggagatcttatcagtcatcaagctctaaccttttctgatgcatgagtttcctttctgttctggaaaagtagttgtccaacctttgcttgaatgtctccaataaggcctgattcttacctgaaaaatgaggtaatatgattactaagtccccttcaagttctaatagtcttttcaatgaaatgtaaacttctattggctaatcatttatttttttaaagtttcttcctttttagtaagtgaaattagtttcctctattctgaggttacaattctttggcatatgtgttactattaaaaaaaatacttaatgtcatgctatccttatttatccaggtataagtatacattacacttcccttatgattttcctactaattctgggagggatggttcagaaatcttaagaaacttacatgaggtcacttatacagatagtaactggacagctggagcctaactaaggtctttggacttcaaaatccagtattttccccattgcacctataaaatgacctatttaagacctataaaatgtcttataagctattatgacacatatcatctatctaaaaatattttccaaatagccaaatatatgttataagctaagtgactgaccaggtgcagtggctcaatcccagcattttgggaggctgaggtgggtggatagcttgagcccaaaagttctacatcagcctgggcaacatggcaaaaccccatctctacaaaaaatacaaaaatgagccggcatggtggtgtgcacctgtagtcccagctactcaggaggctgaggcaggaggatcacttgagcccaggagcttgaggctgcagtgagccatgatcacgccactgctctcttgcctgggtgacagaaagagaccctgtctcaaagaaaaaacgtataagctaagtcataaaacctagcatcacaaacatgggtgccaacattaggtatttcttggtgggatgcagtaagacagcatcacctatgtggtattctggccaaagtttgatatggctctaatcatgagggaataattaggaaaatctacaacatggaacaatttgtaagacaacctggctggtcttttcaaaagtgtcagtcataaagaaaaggggttgagagggctgatttagagtgagaaaataaggccaggcatgatggttcacgcctgtaatcccagcactttgggaggctgaggtgggcagatcacgtgcggtcaggagttccagaccagcctggccaacatggtgaaaccccatctttactaaaaacacaaaaattatctgggcagagtggcgggtgcctataatcccagctatttgggaggctgaggcagaagaatcacttgaacccaggaggcagaggttgcagtgagctgagaaaataagcctgggcaataaggcgagacctagtttctacaaaaaagtaaaaaattagccagcgtggtggcaagtgcttgtagtcctagctactcaggaggctgagacaggaggattgcctgagctcaggagttgaaggcttcagggagctatgatcatgacagagcaaggccctgtctctggaaaaaaaaaaaaaaagagggaaaggaactaaagagtaatgacaaagagctgtaagatccaaattaagttgtcattttaataattcagagtgcctacactcagatcttaggtcactgtttctttcacataagtttcacctagaaggtaagagttaaactatctccaaggtctctggcgactctgacattgtagttctttcagtacactcataatatacaataaattgtgaacaaacaagtaccacctatgagcccaattacgaagagaaaatgtaactaaaataaaaaataatggccacgtgcggtggctcacgcttgtaatactagcactttggtaggccgaggcgggtgaatcaagtcaggagttcgagaccaacctggccaacatggtgaaaccccgtctctaataaaaatacaaaaaaaattagctgggcgtggtggcgggcgcctgtaatccagctactcaggaggcctgaggcagaagaatcgcttgaacctgggaggcggaggttgcagtgagccaagatcgcgccactgcactccagcctgtgccacagagtgagactttgtctcaaaaaacaacacaaaactcattagagaaactcagcaagttacaaaaaaataataattaaaagggtctttaacgctgagcccttaaagtctttttttttcttttttttttaagacagtcttgatctgtcactcaggctggagcacaatggcgcgatctcagctcactgcaacctccacctgccgggttcaagcaattctcttgcctcagcctcctgagtagctgggactacaggcgcgcgccaccatgcccagttaattttttgtattttcagtagaggcggggtttcaccttgctggccaggctggtctcgaactcctgatctcgtgatccgcccgccttggcctcccaaagtgctgggattacaggcgtgagccaccgcgctcagactttaaagtccattttaagtctagacttctatgaaggtagactgccgagatgtaaaagaaataaaattagttatttagcttttagatcggattacattttctgctttgattattctaaagcctccagtaaggcgtaaagggaaagctctaagtagcgcatcctgggaaatgagcagatcagggaaggggtgttagacctggtattatgtctaaagacgattttcatttaaaggaggatcttcccccgggcagctcaaggtcacatcgtaaataccttatagtctaattcagtgtcccaaaacaggaccccgactccccagatccgggttgggggtggctcagggcctaaagttcctaccctcgcccaggtgacaccatctccaggaaggtctgcacccgacccggcgaagcgctgtcccgcttcgcaccccccactgctccaggtacgtgcggcggcctcctcgggagaccccgccactttcctggagcgtagcctgccaccccccgtccgggaaccccggattctcacggcagagaacagacaccatacttaagcacaggctctcgcatccgacatcagtacaaggctgggggttgttgggggacggttgagccttgggagggagggtcagggtctggacaggagccgcggccgccagatgggaaagaacacgtgggagcagtaatgtcaagtgacacttaaacccttagacgccgattcgttataacgcgaggaaatctagaagaaaaagcaggtaccatcagcgaattctaaaatctcctaaggattaacttcggttattttctgcttagacaacgctttctattcccgacttcctctccaataatgacccgaatctgtcgaaacttcttggaagcctaatttacctaatcccacgtccctaacggtcttcggaagcgaagcagtgtcaacagtccctggtaaacacaagtagtattacaagtcgggagctcttcaagtcttggatgagactgtagagcggtcttgtgcggcaatgtgctaccttaaaataaataaataaataaacccctgttatgtccggagtttgtttccacccggagaggaatggaagagcaccagagagcgcttagctttctggttggatgttttgggtgagtttcttggcgcgcatgcgtgttgtgtctcaagggcgggtttgaagggaagtgggtgttgacctgcgggcaactgacgctgttgtcagattacacccacgacggtgcgggtctcgggcgttctggagatacgtaggggtgaatttatgtttccgacgattgcatctggaggggtgtgtaagactctgtggctgaagaaagctattacgcttcttatgtgggtcattattttaaaaatagcatttcgcttttatttgcttgactgcctcttctcaacaaattttaagcccgccactacatgtgtttggttttgccctaccagctctggggttggggagtgcactgttatggttattgttgctcctgtggccattctcttgtcatccccactttcacattttggcgtggtgtattaatagactgagtgggattaatgggtaaatatgactttatagtcagctctaatcctggattcaatatcagaatttagattttcagctttgtggatgttcgacattttaaaaacagttattgcaaagaggtgaaaattttgttctgaagtcttaaggaaacagagaaagtttttccgtccttaagtgtgggacttgttttgtgaccaacaatatgaaaggctctgaggtcagcttggagaagaaaaaaaagattaagatgccagtgaagagacttcgtgaggtagtttctcaaaatcatggagatcatttggttttgctgaaagatgagttgccctgtgttcctccggcattgtctgcaaataaacgtcttcctgttggaacggggactagtttgaatggaacatcacgtggtatgtgattccatgtagtttttcaaccagttttagtttagtaaatctttagtccttatttgtttaaattcccaaacgtaagatataagtctagtttgtacagatgtttgaaaactgaccctgtttcccgggaaaatggccaggaagcctataaaatgtttgaatagatggaatgaatgaaactttaacgtcccctgttgtgctttttttttttttttttgcattgacttttgcatatttttttttttatatttatggtggata

SEQ ID NO: 6601 - DNA, 6000 bp, Homo sapiens
ggcttctccagctctccatgctgccttccaggtagttcaatcacaacatggtggaagataaagtcttcccagtagcttagaacatttagggcataataaccagtatctcagcaacttaccaaaacctattcctttcccggctatatatgccatgaaaaagatactataaatcccaatctctaaatccttaaaagttattcaaccctccccaccctctcagcacccagtgggtacaattaatgcatgcatgaaagacggcctggattcggtcaaatttcattgattcaaattttaccgaattggaccgaaatgattcacaatgattcaaaactttggaaaggtgtttccttttcttaatatactttctacagagagggcacagtacacattaaatcaaagagaaatgtttacaatatgaacccgtaggcactgtgaaatatcgttcttgcatacaatctatgtgttaactactaattatcagcgatcacagtttgaagtctaccaacccatctgcttctcagagtaaggacttaaaattccaaaatgcacacatgcaacaaagactggaaaagttggtgagcaatgaacctatctttgctatactgtttatacattaaataatattaaaatcattatctctgcaagtgagaaataaaagcaccccatttaaacacagcaagagtgaaaatgaagccccagaggtcactgctgctcattagtgtcttagatttccttctggagttgttctgtccacagagaacaggtgtgaactcatcttttttgttttgccctaaacaacattttaaagaaataatccatacttcaggctggcctttctccaattagttctactctagtgcctgacaaaatacttagtgaaatatctcaggcaaggtattcgattgctgcaggctttaaaatatctcttcaaaggataatttgctgcctgtggctgatgggcaggcttctggaggccccagggcatccttccttaaacaggtgcagtgatcaatggcaccaggaagagccctaacaagccaaggcctcctgcatccaaggctgctcacttttatggtccttcaagcaaactcacctcattaatgatgatcctgctggccatccgtagtcgggtcctgggtccaaacttattggtgatcatgattcgtaagcctgcttcagggaaggtgaacttgggagggctggagctcataatctcgtccaccatcaccacggggttcttgccatactgtggcttctccttcactgttgagcgcaacaccgtgattagtgctgatctctctgaggacaacacccaagtgctggggccactgacttcccctcaccttgtgagctgccctaggctgtggtcctggcagctggcagccaccgggaagtctggatgcctggcttcaactcctcatgtcaggcaaagtgggtcactagctttgaaacacctgctgacctagtgtgtgaagcccagtgtgtccccttgctccaggaccactcgtgggcaattgatgctcttttcgcctctcttctggggcccagtcttggctaattacaagggtctttcagttcgttatctaagccttaccagggcagccaacctacaatacacacgggggcctaccacttttcacccatgactatgaggggacctttctttcccccacgtacagaggctcagatgaaattttgcaaattgacaagggtccccggggtggaaaatgttgcagagcagtgggcactggctctgaacttcctacgaggccacctgctctgtctgcaggacagaatgcttgtaactttgttctttataagggcaagtagtgaggtcaaagatttagatcatgggacctagacaggcaactaagacccaggagaggagcctgcttgtttgagggtgcacggtgagccgctggctgagcccagtgactataaaccctgacaccctccggagggaggctggtctctctgaccctttccttcccctcacaatggggaggaacaaaactccctgtccccagacctctttcttgccatcttcataaacctgcactgggccggtatccttgggaatttcacatttgactccagatccctaggagggtctagttacaaaactgctcatgaacacagcatgcagaagcaggcagagtgttcccctccaaagggctataaaaatggataggactgtccctctgcactggttaccagctcctggtgtgtcctttacgggttttagggtaaccagcgaataggtccggagagcaaacccgtgtaagagttaatagcacaaaagcacaccagacacacacactcctcaccaaacaggcagcaaggctcagcagacaggaggcgtgtgggttagaaaacaaagccaggagaacatgcatttgtcagagatggacgctaacctctaacgaggcgcgcagtgcgttggtgggctgggcttgtggttggctgttttgcttgaaatgcacgtgttatcgcgtggatgaaagctgactacttacaatttagaagaggaggagagttaaggagacaaaggccaacagaaactgccagagatgattagcgtgcggtgggtgccgagagtctggggcagcactcttggtggtggcgaagatgccaggggttatgtgctggagagtgttattagcgggctccttctatggggagcatcaacacttggggcctctggcctttgggatgactcctgtcctggctgattcgatggctctgcttccactctgaggagcaggagccccctccacagctcatgccctcagcccctcactgctgcatgaaagctcaaatccctccctgctcagaagcctccatcccagaggaagacggaacccacagaaaacgcagcttcaggctccatcctacagaaccaaccccatgccaggtactgctggaggaacaactgggctcagaaggagagagcctggagtctgtgagacaagagccaggcctcccccttctctaattccaggagtacaggcctgcacccccacttccttccacactctctaggtagtattctctcttggcccttatctaaatgcattcactctgataaaagctacaggaagatggaattctccttccttccccaggatgcctgcctcccgggacagcttgtcctggtgtcccctgaccaatgacagaacaagggtgtgtgcccatgcccggagtggctgccgggaaaagaactcaatgacagcacattctcccagcagtccagccccaggccaggcatcacccccaactctccccactccaaaccaaggctgtgcccagggccagggcagcctggaagggtccacagtgtgcctcctgggcgaggccggcaggcaagtggcccaggctgtgttcaaggccacctgagaagcaccaggaggctgctttggtgagccaagccacacagcctttaagaacgtttcagtactcaaacgccttttatcagtgtggtggggaaaaggctttctgcccacttttcctgtcaagaagctggaagataaaactttgggttttctatgggaaacccaaaaactgagaacagctcgatcgggcctgagagtgtgtgctcttgaagaatctcccagccagcaacccgtgcattcctttgggtggggtggccacacagcgacctgcttggagctgggcacagggaaagaaaccccaatgtcatctccagccaaaagattccatggcaccgcccttaggaaaggaaaagccccaaagccctggcctccccagtcccacccagggtgttaccgggggctccttcctcctgcttcagtcgagtctacgcaggggacagtgcagaacagtgactcacacatggccctctgggagcctcttatgataggggcagtaaaagtggggtgaagaaatccccacgtctgcctctccaggtctcccctttctccaattccaggcgtccaggcctgtaccccacttccctccacactttctgaggactgttttctcccttggcccttatctaaatgcattccctctgataaaagctgcaggaagatgggattctccctccttccccagtgcttgggggcagtcctgtgtccagtcttccagttttccagaaaatgtcctggacttaaagagatttgggagaaaataaacttgcaaggaagtgctactgtcacaggcacagagtgatggagacagtcacagcagtgccagaaaaggcactgtgtaggcgggggcctctgggagcctgggttgctctgggaaggtgaggagctgaggcccccatgctgtgaatgaggaatgtttcctgcagggtcctgggaggtctcctgggttggcacaggtggtgggtggctcttggatgggcatctgccactggcctgagtgactcagcacacaatacttctcttcttcaccatgaaggcccagaggacccagaagcaccatatatacgacagggcagcaaccagcctctgtcctgccagcctgtgtgtggggaccaggctgtgtgtggggaccgtctcggggccactgcgtccatagagctaaaatccgacacagccgccctcatggctccttccccttctgaggttgtcctggaaacgggcttcccctggggtagtctgctcagcatttatgaaacacgacacacgaatcaaactccatgcccatcagctcctcagctctgtcctttgtgggtgggcctcagcagccaggctgtggcctggaccgcaccccgccaccctggcaggtttcctccttctatacggagagactcctccctcttgggggttacctgagacagggcagaacagactcccaaaatgcacatgggaggaagcccctgccttcatcggctccaggatgatgactggagagggggcccagaaatacagattctgcaccccagatgtcccagacacatctgagaccactccatcccaccagtgacatcacaaaagagttcacctaaaagaggaggtgattagccccaggccatggagaaagcgggggaaagagcccccagacaccagtgcaaggcgctcacctggtgaaggccttgcccaacactgtgggtggaggtcagacctgtttttccataccaattgcaagaaccagcccctgctctcctactggtctgggctagagtgaacgctctctccttcccggcagctgccccaacaaagggagccgcctggtcattggtcttggattattcaggtttccaaggaagccatcggtcaggcccagatgattcagagaattcagtaagacacgacagcagatggctctggaggcccagacccccagttcccggacaagggggccaaagagccgctggggagacgaggctgctgccccaggggaaggggctccccggcggggctgtctgaggctggcctggggatgcctgctcagcttcatgtctgcctttcctggccttgttcttcctccgggcaacagttcccagcccgagaacccatgctttgtccagagccgttctccatccaggactgggtctggcatttgagaaaccgcagggaggcccaggctggctctgctgccccagctcctcagctgcctgtcgtgggcccttacaggggtcagggataccactgcattctgaagagccaagcaggccttacgcctttcccagaaggcatgggaaagcgcccagaaacgtggctgtggtttttctctttcctggtgtagtttccctccacccctgccccacctaagcaaaccccatctcccatactgactctccctcctctcttagggcacctgtggtcaaaggtaagagagtgacaatttagaggggggacattgtgagagggtgtgtgtgtgtgtgtgtgtgtgtgtgtgtgtgtgtgtgtgtacacaaaagaggagagagtggcttccaggacacatttctgcccactcctgtctgctcagccttaccttgccccagcaatggcacggaagggtcatcatagctaccgtcatagaaatcat

SEQ ID NO: 6602 - DNA, 6000 bp, Homo sapiens
atgtccctgcagagtcgactgccttcacctccaccctttcaggtcccattattctttgttctgtgttttttttttttttttttttttttttttgagacagagtctcgctctgtcgcccaggctggagtgcagtggcgcgatctctgctcactgcaagctccgcctcccaggttcatgccattctcctgcctcagcctcccgagtgagtagctaggactacaggcgcccgccaccacgcccggctaattttttgtatttttagtagagatggggtttcactgtgttagccaggatggtctcgatctcctgacctggtgatctgcctgcctcagcctcccaaagtgctgggattacaggcatgagccaccacacccggactctttgctctttatcttaccaacaccatcccccaacccggtgtcattaaggatccaggtagctactacataatctgagagtagcacaaatccatctgcctccaggggcctgtcttgccttggagttggtaattcctagcatgagacattcctttggattaaggccctgttttcagaaagccttggttcaaatataaatgtgatgggataaaaatcagacacacagaattgggaacaagaagggttcagaacagagactactactgcctttgaaagggcaatctggtttgaaagcctagagtgggcccaccttcaaaataaaaattcaagggtgttattttagtgtaatgggtgagaatacaagtcagactgctgaaacctagttcactactttttaggagtgtaatctcagacaagttacttaagcagcctttagttcagtttcctcatctgtggaatggaaatattacctacttcacacagttattgctgagtgctttccacactgcctaggacattttgagggcttagtaattttaaactattcaaaagaaatgcattcttgtttttttttggttttcttctttcttttacaatattccttcccttcaagcctcatcctgactctatcccaagttctatgatgtgttctttttttttttttgagacagtctcactctgtcagcccagctagagtgcagtggtgcaatcatggctcactgtagcctcaacctccctggctccccaggctcaagcaatcctcctgggtcagcctcccaagtagctgggattacagatgtgaaccaccatgcccggctaattttttgttatagagagagggtctcactatgttgtctaggcttgtctcaaacttttgggctcaagtgatcctccggcctcggtctcccaaagtgctaggattacaggtgtgagccactgtgaccagccacaatgtgttcttcattcctaagtccagaaaggcccaccagggaaaggaaagtcctcaccagagaagagactggtggtgagaatgatgttccacacccaacgctcgcctccaatctgccggtagaagtggctggacacgtagccagagatgcagcaggtcagggcatacaacaagatggctgctgagttaatggccccatgacggtgcacattgaacatgcccagcagtgccatgacaataatgcctgcaggacggtagcggaaagcccaagttaggcctcacctgtgtctcttctagcaatttcagaggaatcagccccccttctcccagacccagggcctccagcaaaacaatctcccccagttttgctatccagaaaatctacaatagaatacgtgcattcttgctagagccaccctatcccttaggtctgcccctctggatagaagagaagatccacagaccttttctgaacaaactccctacctagttctatcccatgagataaatccccaattcatttttatcacctcaccagtgccaagggccaggaactgggcacccacgccaagcacagcacagagcagaccacggtatggggggaagcggaagacatctgtatggataattttccagccattgtcaccctggtcaaagtcatcaccagaacctgcagaggtggtctcctcatctaagttgtaccgagccaggtcattccgaagcacacgcattagaatgacagccacaaaacccaccagtaaaaacacaagcaccatggagttgatgatggacaaccaatggatttccagtgttcgaggaaagaaaccaccatcgtcaccacggcgcctgtcactccgacgctccactgaagtctcagaccagcgcacgctataagtgtgggtaaggcctaggaactcgtcaggtcgtaacccatccaagctgtggggcttgacgtcccgcactgaaacattggcaaatataattcggtctccatggaattctaggtggaagtccaaatgggtccagagtcctatcttgtggctgtgtggcaggaaaccactctcctccatgtagcccacaaagccccggattggcaagtcatctaccacaaattcaaagtagtacagttcttcaatggcctggcgcagctgctccacctataaagagcaagtcaggagttggtcacacaagatctccccaggcgcagagttacagcaaagtttctcaccttcagcactactgatattttggggtggataattcttttttttcgagatggagtcttgctctgtcacccaggctggagtgcagtggtgcgatctcggcttactgcaacttctgcctcctgggttcaagcaattctcctgcctcagcctcccgagtagctgggattacaggcgcccaccaccacacccagctaatttttgtatttttagtagagacagggtttcaccatgttggccaggctagtctcaaattcctgacctcatgatctgcctgcctcggcctcccaaagtgctgggattggtcgggtgcggaggctcatgcctgtaatcccaacactttgggaggccgaggcgggcagatcacgaggtcaggagatcgagaccatcctggctaacacggtgaaaccccgtctctactaaaaatacaaaaaattagctgggcgtggtggcgggcgcctgtagtcccagctactcgggaggctgaggcaggagaatggcgtgaacccgggaggtggagcttgcagtgagccgagattgcgccacggcactccagcctgggcgacagagcaagactctgtctcaaaaaaaaaaaaaaagtgctgggattacaggagtgagccaccacacccagcctgggttggataattctttgtcatagtggggttatcccgtgcactgtaggatgtagctttcctggcctcttcccattctatgctggtagtacccccccagctgtaacaacaaaaaatgtctccagacattgctaaatgtcccttgggggacaaaactgttccctgttgacaatcactgggttagactctagtatgttgagattctccaaaaaagagcaagtatggcttgacagggttaaggcctagaaaaaggagagcggtgaggtataaggaggtctggagtggactaaggagaagtaccaggattcactaaagaaaaagcatgacagggaagtttaggtagagactacaggaaacagctaagaaacagccaagaggtaggcatggaaggaaacagaactatgtgggactgatagttgggacctcatgaccaacagagaagcttgcagtaagaaaccctgggctctgatatcagttctgcaaatcactgtccatgtaatcttgaaaaaagtaacttctgagcaagtatgtatcttagtcaactgaattagaatagcatcacctaacctgcctgccacactgggttgtattgtagttagaatcaaatcagacaatttccataaaggtaccctgaaccataaatgtaaggcactgttagtctctgggaaggagggctacgtgatagccaatgtggagaggctgacctgtgcagaactgagctgcatgtggcacagaattctcttctccacgttttcccgaaagcggatctcatacaaagactcagccattcggtccccatccagcacttcacccaggctaaggcttttgtgacgtatcttctcagggcagcagactggaagctgatagtagtggtaagtttcctgagggttatggtagggtcccactttgttgacatacagaataacagggtcgccggccttgtagtgtgtcacgccttccacccctggcccatggcctgtgcccagcaacagtatcaggattggcaaccactggcagctccaacttcgagggttccctacgactgtcatccttaaggcagtggaacctgtttgggggaatcctgaggttatagaaaccagggaggttacagaaaccccaggtcaggtgcctcgaactgaggtcccctggctccacttgctcccattggccccctccccgcctcaccctaccccacgtctctctatcccaaagaccccgctccacctctgctctctcatcctcccaacctggggttcaccccacccgcagcccgtctggcccggggcctctactacgcgccctggcccgtttccatggcaacgccgctcggtctcgcacctcgggtcccttcccgccacagccccggggtcctcaccgcgcgggaagggctggccgaggcggcgccagcggccttcgcgcccccgtagctgcctttgggctcctgctggggtctctcccacagcggcgcggtagcggcgggttggagaggacctgccgaccgacttctacggggttgcccgttgctgcgcctgacagcggcggctgcggctacaccgcgctggacaccgctctggcttactcaagaactccccgttgcgccttctccatctggaggcccggcccagctccggggaccccgtgaggctcggcttgccccgcccgtcttcggcgaggcgggggtcctcccggcgatcggcagcgcggcccaggacacgtcagtcttaccacttccgccctcaccggcggcgacctcagcctggcggaaagctccttgcctggaacgcagagggccttcgctgctgcggcccctggggactccttcgcgacggcttcccggggagggggctgaggcctggcagcgaggaccctgacaccccttcgggagaggagtggctgctaggccgctcgcttgctcctggaaagatttggggtttgagagctcttggccaggaggctcgcgctggccgaggcccgagagctgtccccgcgggacgggactagcgagggccggggagatggagcgcaggcggcgtctgggttcgaagcactttccggctgaaccacctgctgctgaggctgagccctgagaggcggttcgtggcccccaaaccggggaaggggcgaagctttgggcatctgtcccatgcaagggtcccaacatctgaatctcacctcactcgtctcccacctgtcacgaatggccagcgccaaagtgataaatatgtaataggaatgtcttcccgaggctgtgctggagacttccctggccgcacagtgaccgttcagagcccacgataagcaagccgaaacccggtttggcgcagaggcgcgcaaggagagaggtctgtcctttgactctgtgagttgggcagcctaacatggttattgttaattgacggtaaagtatctcgaggtccgttagtctatgtttttgttcttatttatcactgtgtatgtctttgggcttctcttcactttgtatggcagattattttgaaaaagtttacccttgtgtttgtctcagctgttttaaaggggatctgccgtctagggagttccccttgaaaatcggacctttgagcagtgacttctgttttgccacctgggagcaacgtgtaaggaagtggacttaagcttctctctccccaggggaagaagcacagtggaaaaatcacaagtgacttctggcctgaaaagcccttaatttacctgcttctacaattactgccctttctgacccagttctttccctgcagatataggtgaggttcaaagaagcagatggtggagttttgttagacaatcagtgaattttc

SEQ ID NO: 6603 - DNA, 6000 bp, Homo sapiens; identical to SEQ ID NO: 2791

SEQ ID NO: 6604 - DNA, 6000 bp, Homo sapiens
aatgaaatgctgcgtgcaccgtgtgatgacgccctgggaggaaccttgcagtcaggttttcttctaagcagatgccatcattggcgagacggcagcacggcctaaagcagcggcttagaggaagaaggcagggccctgggagccccagcagccaagggaggccagccaggcttgcgggtgtggggtggctgctccacgggccatcggagtctttaaagactgcacaagagatgcattttaagagaaaaaaagcaaacatttccttaaataccaatgctgtttctggttgtgatctctccatctcaggtgaatgtgtacgtgcttggaaagacgtttcttctcttggcaagagagctctgcatcaatgcgccggccataggtaggcatctgggtgagatgctggggtgtccggcaggctgctgtagggaccagcgtgccaaatgtcctttgaacagtggagggaaatcctgtccaagcatgggacccctcaaggtaagaaatgtttcttaaagctgctaggagctcagtaatgtggggccttattttctaagacacagtctcgctgttgtccaggctggagtgcagtggcacaatcgtagctcactgcagcctcaaactcctggcctcaagtgatcctcgtgccttcgcctcccaaagcactgggattacaggcatgagaccgcacctggcctggggcttgctttctgctgcaaaaccagaaggcctgttgtcagtgcctgtcaggtggcaggaaggtgtagacagggaaacaagtgctgcgtgctgggagcatcttgtgtggacaaggtttaagggacacacctggctccaggtgcctctggacagatggggacagtggggcagctcctggttgtgctttccagccacagccctcttttgtggtttttctgccacttttgttctgtgttgtgtgcgagtttgtggaactcctgtatgcctttcttgatgtgtgttaggtgtagggtaagtcctgtctctccctcgaggcagcagcagtgttcatgcatgcagaatctaacctagcggaaaagtctagaaggaaaggatcaaaacagcactcactgcccgatggttctgacctaccctttctttaccaagcagatgactggtttccatggcccgcttagaggcccctttcttactttgcctgtttgcatctaggagcgtatgtcctttgggtagagaagcaccaggtggggctgggtcaccaacaggactgagcaacacgggctgcagcagcagaggggcaccggctgaggctatacactcggcccatgccctctcccaggtgccaagaggggccatccctcttttcgggggtcatacaggttttccagaaaacaactgcctacagggtatgcagagtgggaggagagagacaaggggtgggagagcctgtttcaccctatagtccactcctgcaacaggctgtcccgcagcagtgtcacagctagtgacagtccccagggtccagaacgctgggcccagcagaatgctcccccgacagtctgttcatagggtaggactctgaggtgctagtgatgcattaggacatagagacaaccaggcacctggtgtttcctagggtggcccagaagccagccagcaacccaggggacagatgggcttcactggggcgcagtttgctcctaaccacatagcatgttcagcatgacaggttttctcctcgggatgggagggagctgttctgttgcatgagaaagagaataccccactgtacaactgctgtagtcatttactgacacgtgggtgttattttaggcaacctttattacagaagtccactattttaagtgactttttgccaattttagatttgaagggaaggtctcaagttaagcttggaaccacttagaatccaagagggtagcaggaagatccaacccctcaaagcaggtggcatgggtgccactgggaggggatctggggcctgtcttgagccgtaaatcttcctccacctgagacgtgcaccccactgtaccagagatgcctaagactccaatccctgggttctggctgtgtggaaaatgtctctacacagtcaagcttcagctgactacatgtcaaagagagacaaagttaagagcagcctttcatggtgtcaagaagcagttagcatcttgacttcccctccactcactcgctgacctgctgcagcctccccgggcacctcaggcatagaaaatgagctcagggatctgcccaccctggaccccagtcccgttggtgctgtccgaggagcactggaactggaaggccacctttccacactgcacttccgtcatcccctcctgcccaaagtagctgagttcgctgccgtccaggacggcactggccgtgtagaaggtgtcttgttcaacctggaccgggtgttcaaaccagaccgggaaggtgttactggatccgtctgacatgaacttggtcaagttctgagccagaaccaccccgagccgcttgagctcaatcttcacgctgtactcagccttcccagagctggagccatacaggcccagccctgcaataaatacccttctgtccactgcaaactggatgctgtcgcagcgcccgcggtaccgccactggttgctgcggtaggcagaagactggaatcggtggcacctctgcggggcgaggcccttcctcttggtcaggggaaagtccaggcggggcttgttggtggccgtgtaccacaggaagatgctgtgggtctcctccagagtcaggatgtctgactgggcagcgccgttggcaaactcctctagggtcatggttggaattcggaccagatagagggctcgccccagaacatgcctcttgtttcgtggggtgattggcagcccctgcctcttgcactccgcctcggcccagttcaggacggcctcgaagaccaccgcctctttggtgttgagggcctcccgagtgacaatgatctccagcgtctgccggtctatctcacagaagccttcggaccgtagggccatctcggcctgtgcgtcaatgacctcccagcagcgctgcgtcagctcgggctcctcaaacagccggctctgggacagcaggacgcaggcgttcttggcttccaaacttgtctccagaaagttgacacaggcttttgccaatgctgggacgatgtacttcttagcagcgtacagagtggccagcaccgtgtcggcttccagatcgatctcatcactgtacatgtacctaggcgaggcagggcccgcgtcaggggctggctcccaagcacccatcgcggggctgggcctgggagaggagtccatcagctcctgtgtgcttcccttcagaagcctccggaggccgcctaaaacggacccacccgtccctccccagtagagtggacttactttaagaggatcagaaaggctgcgggctccacgtctggaatgtgaatttcagatttgacttccgccaggtctccgtagaacatggcatagaagacggagctgccgacagccaagacgtactgggaggagaaagcgccgccgtgagcctggctctcccgcaggctgcgtgtcagccacacggcggacggggcggacggggcacgcgttccgagaggggccgccgctacccaccttgtgggcgggcaccgtcctggtcgcccccgggggccccacgacgaagtgcacgtcggccatgagctcgttgttgaacatgagcgcgttcctgcaaaggtagaggcacgggctgggggcgtgggcgcgcgcgggcgcgggggccgcggggcacgggctcacctctcgcgcagcgtggggcggcagcaccgccagccggggctctcctggtggttgttgccgagtgtgggcggcgcgggcgcgggcggcggcggcgctggcgcgggggcgctgggcgggctgcgcggcccggccttcctgcccacggcggcgccggcgttgctgttggctaggtccgcggccgcggcgctggcgggagcgtagagttccgccgccatcttcgcgggcggggcggcgggggcagcctcggcgcctgtggacgccgcgccccgcgccctcgcgccgcgccggggcctcgggagcggctctgcaagcaaaagcaaggaggtcaggcactgagcgacgcggccgtgcaggcaggctaggggcagcagcatgggcggcggcggcgctgtgacccgcggggctgccacccgctcccctgccacccccgcccctgcgaccctgcccgagcccagcctagcgcagcccggccaggcccggccgcggggggcgccgtcccgcccgcccgcccgcccgagcccgtacccgccgcggcgccggtgcgtcacgctgcgtcagggccgcgccccgcgcgacgtcgctgcctcgcggccccgcccccaggcccgacatcctcgaagctgctcgagcttctgcccagcaaccggcgcgagccgcgcgctgtgcagaggtagccgtggaaggcggctcccggcgctggcaggcggccgcccccagacccgcagtgccatgcgcaggtgcttgcgcccgttcttcagttagcgatcttttggttaggaacgcaggtggacctgcttgtttggccatttgcattccggagtctgcctctggccgcggcctgtgggatggtcgttgggcttcctcgttcgttcagatgcttcgcgatttagcttgctacggacgccagcagccagcgcttgcagagagcgcggtccactctgctctgagggctttacaggggcaggcgctgctatttcccggcattttcctcgaggaaataggcacagagaggttagtcgcgcgctgaaggtcacacagccggcgggtgggcaagtcaggatctggccctgggcctgcagccctggagcttgggccccagggcgcgccctgcctctgtggctctgcctgtggatcgcagtcgcaggctcgctccttgtggggcctctagcctcccggcctggggctaatcctgggaggtgcgtggcatggggcactggctttgctgatgaggagaccagacttcagaggccgtgtcacctggcctgggccgcacagctggtgcatgccaagctcgcgtgcagacgaagctccagaggcctggctgtcaggagggttcctccccgaggacacacacgcaacctcctggaccgccaggctttagacttttaaaacttccatatgcaggaaaccccacaggacgcagccagcatctcgggtcatgggtgcacctgtcaccgcagtcctgggctaaacagtgaacaggagctctgtgtctctgtggtcgttacagttgtagtgaatgttccctgggagagtcctcttcagaagatatttgcggtattttcaacaaaggactctccaggatggaggagcaactacaagtcaggaaggaaaaggctgacaacccagttttttaaaaaacgggcaaaggacgtgaacagacaccatgcaatggcccagagtgcacaaatcatcatttctcccaggaatggggtgcccgagcccccaggcggctgaacttgagacttgtcacgtagtgttggtggaatgcagagcagctggagatcacctgctgcaggtgggtgcgtaactccgcacggccaagccgtttggaaagctgtagcatatgcatgagagtccggaaagttccgagagaaagtgtgtggatgcacccgccaaggacacacccaccgaggccacagctgcgatttcatagtgtgggaccccactggcaaagacacgctggctgctgtggccgtggtttctgtcccagccgtctgtttccatagaaaaaggtaacgggcataagcagtttccaggagaaatacaaatggccagagtggagacagcctacatgtccatcagcaacagaaaggatcagcaggttgtggtgggtccatttggggaatgcagtgagaaggaataacttacagcagcacacaagacctgggcgacagctgtctccgggggtgccaggata

SEQ ID NO: 6605 - DNA, 6000 bp, Homo sapiens
gattatcacctaaacaaggttaagtacttgttggaaaagtatttattagcacttatgtgatttggcctatcactacactcacaaaagtataagagaaaaacagagaaggaaagagtttttttttttttaaaaattatgtatggcattagggttctccagagaaacagaaccaacagaataaatagacatatagaaagagatttattacaaaaaattggttcatggagttatggaggctgacaagtcccaagatccgcagttggcaaactggagattggcaagctggagacccaggagaactgatggtgtagttctagtcaaagtccaaatgcctgagaaccaggagagccattactgttgtttcagttcaaaagccaggaggctcaagactcaggaagagctgatgtttcagttcaagtccaaaggcaggaaacagccaccgccccagttcgaaggtagtcaggcagagggaatcccctctactcagcttttttgttctattttagccttcaaccatttggataagggccacccacatgggggaggacagtctgctctactcagtctacccattcaaatgttaattttatccagaaacaccttcacagatacacccagaaataatgttttactacctatttgggcatcccttaacccagtcaagttgacacataaaattatcatgacaactaattaaaactttggaaacacaaggtgcctctacgttgggaggataccttcttatactattcattacaggagaggactgggaggaaaaattacttttaacagcattatctagagtgagaggttgcctatttttttactccatttcccattaactgctttgaatgtagcttcagaaagttttgaataaaaattagctagcacataaatgtgttggctggtaattctaatcacctgccttcacctatggctgggtatctgattgctgccaggtgttaacacttaccagctcatatcaatgtaacaactactgtggtctgaatgtttgtgtccccagccccccaaattcatgtattgaaacctcatcaccaatatgatggtattaggggatgggatctttgggaggtaattaggtcatgagggctctggtgccacagatgagattagtgcctttataaaataaccactaataggaaccaggtgttttaacatgtgcctgtagtcccaactacttgggaggctgaggtgggaggatcgctcaagcccaggagtttgaggctagcctgggcaacatagtaaaacccctgtctctaaaaaataaaataaaataaataaaactaggggtactaataaaaaaggcacccttctaccacatgaggagacagctagaagacactatctgtgaaccaaaaagcagtccctcgacaggcactgaatctgccagaaccttgaacccggacttcccagtcttcagaactatgagaaataaacttctgctttttataagctgccctgtataaggtattttgaactactatagtctgaacttctatagacttaaacaatacctgtacctggtaagtaattgaaagggactgtaatttatgtgttttttgaccttttcaggtttaatttcagaaaaaaaatctgaaatggtacattttagtttttgttttgttttgtttttttgagacagagtttcactctgtcatccaggctggagtgcagtggtggtaccagctccctgcaacctccgcccctgggttcaagcgattctcctgcctcagccttccgagtagctgggattataggtgactgccaccacacccggctaatttttgtatttttaacagagacgaggtttcgccatgttggccaggctggtctcgaattcctgacctcaggtgatccactggcctcagcctcccaaaatgttatgattacaggcatgagccaacatgctcagcctgaaatggtacattttttttttacaaaaggaaaacagatattaatattatgggagattatattttccttaaatgactgcaataatatctctacttaatctctcattccacatgctcttcttataatgtgactaacactcctcccaattagtgtcccctttacttaaatgtggtgtttttgtagctgcttcaacaagtagagtacagtggaagtgacgctgtacaacctctgagattaggtcataaaaatcaatgcaagctggtctgagtctgagtgcagtggtgtttacaactaattgatcacaactactttacagatttctttgttccttctccactcccactgcttcacttggctaacctaaaaagaaagagagaaaaaaaaacgtcagtgcagcttctgccttgtcctcttgggactcttgtctctcttgggatgctcacttttggagcatagctgccaggctgtggggaagccaaacagccacatggagaggccacatatagatgttccagctgagttcccagtcaacagccaacatcaactgccagacatagagtgaacaagccttcagatcccagacccaggcagcaacgctgagctacacttctggagttatgctctaagccacgaaatttgttatggtttgttgtgcactggtagatgaccagacaattataaaaaacactactacagacatttaatacatatttaaatcgtgtccaatcttttacatcacaaatcttaagatcttttgactcatccttaaaaaaaactcatacagcacacaactattaagaattgtgccactctattcctgtctttagcccttcatttttgagaggcaatccttcctcaagtctgagaatcatggtgatctcagctgattgggttatttcttgattctactgaccatataccctaacaccaattgaggggttgtagagaatttagtgatatcttttcagaatgaaaacatgagagcggtttcttgctttctccattctctacacttgcaaaactgattcttttctatacctttatcccaactgttactagttttgaattcgggatggagggtgaagatgggtaaagggatatttttataactgttatcaaacaactctatttacacagattcttcaacccttcctaaatgagtatgctggatgttggtgaattattataatttttggtttctaatgattatagtgtaaggggttttatcttgaaaactatgtttggactcctggaactaatgttaaccgctggtaatggcgttcttgggggtaaaatacaattagtgtaattagtaattttccgtctctttctctttcccctttttggtctccaaaatgtttaaaataattctcacatagattactatgtgaaggtattgtgaaactccaaatatgtacaagacacggatttttaccctttcaagagtaaataaggattaccagtgaaaaggaaatagccatattgtaccaggatcatccttggggcaaccaaggaataactgtagttttaatcaattctcgagttgttgtccttggtcccagtcacataatcaacatgtcaaagtcttctaccatgtacctcacttattaaaaagaaacgagtttccataaagtcgaccacgcatctttgttctctttatcccagatcctctctctgcatccgtagtttcctctcccacttggcatctctttaccatttcttcttgtttacttgactatcccagctcccaacattttctgtcccggaatccactaagcctgggttatactgtgtacatgttagaaatgatattcaataaaaaggcccaggaaaccatgcactgagttcctatatttcatttttcttaaatgctccagctacacccaaggactgactgaggggccgggagactgggctccgtgcccaggtggcaggggcgtgtaattctaacaccgcaggcagcccctgctgacgagatacagaggagtaacgacagttaatagtaaacgaagcgaagccccgggaggtgtagcgagcatgtccacgacagccagtcactgatcctccggcctcccacgcttccagccgagacagtcacgctccgcggggccaagatggcgccctccccgcggcagcctgggcgcgaggggcggggtcgcgcgtgccacgtgaccatcctcgccagccgcgcgcccccggctgccccaggcgcgcaccgagtctggcggccgcgcagacggtgccactgccccactgggggcgtcctccttcgtccccgcccggctgtcaagctgtgttctagcggccgagggaccgaggggggctaagaaagggggcgcccagccatgcagaggcaaaaaggcgctgcggaacggggtccccgtcgccagtgctgaggcaggaggtcggagccacaagtgaggggctgggaagcaggacccagcacgggcgtcttggcaggcggccgggcgcagggccaggctgctggggacgctcagggctttccacccaagccatgggcgctgtcgggcactcgggggtcccctcgtggctccggccactcggcgtgggcattacgttggcttcacatcgccatccagcctcgaagccaacaggactgaaaaatagcttcggccaaacgttctcctcccgctaaggagaggggtcgagtgcgtcagcccgaggggactggagagggatgccctagccctcgaggggcggaggacccgcggttgaaggaggcagcgggagcggagagcgccctccttgaccatcgaatgcctccttctgtgtttccattcctgtcgagtgggctgggccacgctgaccaccctggaggagggacggacgacgctcggcgggctctgaccgtgccgccttcttgtggctgctgactgggatccaggagggagtgggcatggggcgcagccgcgcctccctccctccccgcctcccgggcgccggggttggcgatgtggagacgtgaggggacccgtcggctgctccggcttctccaggactccgccaggcgcccgcgcgtccctcctcacccggaggaggagaggctccgcgcggggctccgaggcgggcggcgcgcggagccggagtcccagcctcgccatgggacataacgggagctggatctctccaaatgccagcgagccgcacaacgcgtccggcgccgaggctgcgggtgtgaaccgcagcgcgctcggggagttcggcgaggcgcagctgtaccgccagttcaccaccaccgtgcaggtcgtcatcttcataggctcgctgctcggtaagcctcccgcggggcgcctccggaccgggcctccccgagggtacaggctcggagagccgggagcagggccgcccagccgccgtgggtttcgggtgcctggcaaagtgcagagagttgaaggaagcttaaggatcccgggtagctgcagtgtagttaagcagggacggtggactccagcccccacgcgggagcagaagagttcaaatagggctttctcgtggcccgaggatggagcgggatccaggcgggagtccccctcctcagatggccccggcggaatgctcctgggtgcccggctggcttcagctcttgtttacaaatagcgaggaataaagattctgtgggaatttgttactgataattgaacggaatgttacccattctgttaaagatgttttgcgatcccatctttccatatatatctcgaaataataatatatacaattattttgatagacccttattttgtgcgtgttttactgcgtgcttcttcggaacaccaacctgctggtaaacaaccctgtgaagttaaactgtatgtcgcctgtcgattatttaaaaaaaacaaaaccaaacccactctacttccccatctatgtgttgtttaaggtacagaataaaggtaggataaaacacacacacacacatcccagatttaggtatacttgttcagggaagaaaagatcaacgaattaaaatgagtggctagtaaaatattagcctactagtgtgagaattacctgtacttctcactactcttaaatgataat

SEQ ID NO: 6606 - DNA, 6000 bp, Homo sapiens
attttctgggatttcatatttccttatttttgttttttaccttttttggcttgaattttttgagtttttatgcattcttttccagtttcttaagatgctaataagttcatctatttgagcaattgagaacatttaaagcaatagactgcctctgagcacagctttgtccatattacattaaccttttataccctgggttcccactagtttttaaataatctactatcaaataaaagatttgttaataataaattttaaatcattaacacttaacgcattattttcagtcacactaagttgattccttcgtttctttcaggttgcttcacagtcttcccttctatctgattcagtggaccaagtaaatgactctctggtaacagaatttgtattacttggacttgcacaatccttggaaatgcagtttttcctttttctcttcttctctttattctatgtgggaattatcctgggaaacctcttcattgtgttcacagtgatctttgatcctcacttacactcccccatgtatattctgctggccaacctatcgctcattgacttgagcctttcatctaccacagttcctaggttgatctacgatctttttactgattgtaaagttatttccttccataattgtatgatacaaaagttctttatccatgttacgggaggagttgaaatggtgctgctgatagtcatggcatatgataggtacactgcgatctgcaaacctctccactatccaactattatgaatcccaaaatgtgcatgtttttggtagcagcagcttgggtcattggggtgattcatgctatgtctcagtttgtttttgtcataaatttacccttctgtggccctaataatgtggggagcttttattgtgattttcctcgggttattaaacttgcatgcatggacacttatgggctagaatttgtggtcactgccaacagtggattcatatcgatgggcaccttctttttcttaattgtatcatacatttttattctggtcactgtccaacgacattcctcaaatgatttatccaaagcattcttcacttcgtaggctcacatcaccgtagtggttttgttttttgctccatgcatgtttctctacgtgtggcctttccctactaagtcattggataaattttttgccatcatgaactttgttgtcacccctgtcttaaatcctgccatctatactttaaggaacaaagatatgaagtttgcaatgagaaggctgaatcaacatattttaaattctatggagatgacataacacatttggttgatgagagcacaggataaatgccatggaccatcaagactcctgtgatcaccatgatcactatggaacgcgcacatttttagtattgcctgaaaaaactgaaaaatctgcaaaaaggatgcattaaatctaagaattgtatttcagataaagttgcaacattttttgttaatcataaaaagtatatatttctatctaatgtgtgtatctaattaacagcaatgactatctttaattttgatgtagttattttatatctgtatataagcacatacacatatatatgacctaggtttatttatcagtatttttatgctgataataagcatcactggaaattaattttcttatggaaattatgtggatccaatggataaaatatgagtttatataaattagtaaatgccaaaatcaaggaagaaacaatttttattttaattgtactttaagttagataaatggtaaggtcaacagcttgttacaacccttaagtattattttcaggctgattgtcaatatgttttgtacaatgttctcacttataggtgggaattgaacaatgagaacacatggacacaggaaggggaacatcacacaccggggcctgttgtggggtggggggaagggggagggatagcattaggagatataactagtgttaaatgacgagttaatgggtgcagcacacccacatggcacatgtatacatatgtaacaaacctgcacattgtgcacatgtaccctagaacttaaagtataataaaaaaaatagactctagtactctgtattatgcaaaatttgtctatgttacacttttttaacaacacaatcctattgcccttgaaatcttcttcaaagcatttctcgagtcactcttaaaaagcatctacaacctaaaagtataggaagagatttatttcctggagaagagactccattgagatcttaaaagcacatttaatgtgcctgtgcttaacttaaggtgcttaggacaaagaaggcgattgacatctttcaggtaaaacctgttaagtttggtggtcaaggaacacaactgagacatcacttggatgtatttctatgactattttaagaaacataaattgtggtgactcactcagctcacttttaactactgcatggtaattaaagatgcaaaataaaataagttacaagaagtgaggttttttattggttaaagcaatttttctatattttctccacaagttggtcataaaagttctaagcattcctctttttataaaatcgaagcattattacttactctcttgttaacctatctggattttaattttgtaactttattatatttgttttgctgtgattctttaaaaagcacctttagactcagtgagatagcaaaaatatccaaataggccaaaaaattgtggcaatgtcctctcactcaggaaaattctgtgtgttttctctaatggccaagggaaaacttgtgagactataaaagttagtctcagtacacaaagctcagactggctattcccagatctcttcaggtacatctagtccattcataaagggcttttaattaaccaagtggtttactaaaaaggacaattcactacatattattctcttacagttttatgctactatgcttcaagggactacagcaattttcacagaattatatataattctaatggttgaattccatgaataatctatggcatgaaagattttacctgtcaacagtggctggctcttcatggttgctacaatgagtgtgtaagattctgaagaactcctttaataagcctaaacttaatgttcaacttagaataaatacaattcttctaaatttttttgaataatttttgaaaagtcagaaatgagctttgaaagaattatggtggtgaaggatcccctcagcagcacaaattcaggagagagatgtcttaactacgttagcaagaaattccttttgctaaagaatagcattcctgaattcttactaacagccatgatagaaagtcttttgctacagatgagaaccctcgggtcaacctcatccttggcatatttcatgtgaagatataacttcaagattgtccttgcctatcaatgaaatgaattaattttatgtcaatgcatatttaaggtctattctaaattgcacactttgattcaaaagaaacagtccaaccaaccagtcaggacagaaattatctcacaataaaaatcctatcatttgtactgtcaatgattagtatgattatatttattaccgtgctaagcagaagagaactgaagtgaatgttcatgatttattccactattagacttctctttattcttaaaaatatttaagatcactaaatttttataggactttaaaaacagtaatgtgctgcttgagtgtgtaggactaagaaatgggattcagagtagtaaagagaaaagtagaatttccaagcactatgaattactgttctttaaaaaacagcaaaaatcaaataacagtattcctccaaaaaagatggcaagtgtaaactctataccttcatgtctcccgtggaatgttagtgatcaatttccacttctcccttttacatcttacttgcccattaactcttatacctaatccaaagattgttaatatggctatgcctcactttcaggacaccttttatttgttacttctcttcactgcaaaacttcttgaaacagtacttattttctctcctccatacacaattgaaatggctctcaactcatgcccagaagtcagtgttcagtctctcacctggcagatagcaacttacaaagatgccccaacaatacctccttgtgtctagacagtcatcattatcctttacctttttctgtatttatttctgctcctaaaagggatctctatgtaaagtattgttatactagtgcttgttataattattatcagctccctcccttccaattccaagctccctcccttccaattcacattgagtccagagctaaattaaacaatcattcaaaatttttcagtagttcttgtctctataataaaacagaaatgctttagaaagcattccaaaatctcttaccagttttatctcctatgaaagtccttcacactttctctcatttaaactttattgcattttcctcactttttctcacttcacttttgaattccctattcttttatcctctgttaatttttaagtattacatttgtgatactattttttctttttttctattttttatctttcatttcattttggcctatttttttctcttaagaactttaatatcaccaaataacatgcgtgctacaaactgttttgtagttcaaagaaaaaggagataaacatagagttatggcatagacttaatctggcagagagacaagcataaataatggtattttatattaggaataaacctaacattaatggagacactgagaagctgagataactgaattataaggcatagccagggaagtagtgcgagacaaaattatgatcttgttgaattctgaatgtctttaagtaatagattatagaaagtcactgtaagagtgagcagaatgatataaaatgaggctttgaatttgaatataataattctgacttccttctccttctcttcttcaaggtaactgcagaggctatttcctggaatgaatcaacgagtgaaacgaataactctatggtgactgaattcatttttctgggtctctctgattctcaggaactccagaccttcctatttatgttgttttttgtattctatggaggaatcgtgtttggaaaccttcttattgtcataacagtggtatctgactcccaccttcactctcccatgtacttcctgctagccaacctctcactcattgatctgtctctgtcttcagtcacagcccccaagatgattactgactttttcagccagcgcaaagtcatctctttcaagggctgccttgttcagatatttctccttcacttctttggtgggagtgagatggtgatcctcatagccatgggctttgacagatatatagcaatatgcaaacccctacactacactacaattatgtgtggcaacgcatgtgtcggcattatggctgtcgcatggggaattggctttctccattcggtgagccagttggcctttgccgtgcacttacccttctgtggtcccaatgaggtcgatagtttttattgtgaccttcctagggtaatcaaacttgcctgtacagatacctacaggctagatattatggtcattgctaacagtggtgtgctcactgtgtgttcttttgttcttctaatcatctcatacactatcatcctaatgaccatccagcattgccctttagataagtcgtccaaagctctgtccactttgactgctcacattacagtagttcttttgttctttggaccatgtgtctttatttatgcctggccattccccatcaagtcattagataaattccttgctgtattttattctgtgatcacccctctcttgaacccaattatatacacactgaggaacaaagacatgaagacggcaataagacggctgagaaaatgggatgcacattctagtgtaaagttttagatcttatataactgtgagattaatctcagataatgacacaaaatatagtgaagttggtaagttatttagtaaagctcatgaa

SEQ ID NO: 6607 - DNA, 6000 bp, Homo sapiens
tggaaatgtggtttttcttcaataatttggaagagtatataaagaactggtatttttaaaaaatgtttggtggcatttattaacaaagccatctcttcctgagcttctttgctgagaggtttttaatcagttttttattggtgattcaatcttcttattcactattggtctgtttaaattttcggtttcttcatgattcagtcataggagggtgtacatttccagaaatttatcatttcttcttggccttccaatttattgtcaaataattgtttatagtaatcccttatgatcatttgtatttttatggcatgagttgtattgtttcttctttcatttctgattttatttatttgagtcttctctattttttcttggttagtctagctaagatttgccaacattattttatatttcatcgattatttctattgttttcctattctgtatttgatttatttaatttctgttctaatctctgttatttaattcctttggtaaatttgggcttaatttgttcctttttacttccttgaagtttaaagtaaggtgggtttgtttttggacatttttcttatgtttagagtagatgtttattgctatactgcctcaataccactttagctgcatccataagttttgttattttgcgtttttggtctttttttataggtagatacattctaatttccctcgatatctttttgacataatggtttttcaagagtgtattgatttccacatatttgtgaattttctagttttgcttgttattgatcttagttttatatcattatagatagaaaagatacttttcctacttacataatttctatattcttaaatttacttgtgcttgttatgtggcctaacagatgacctatcctgaaaaatgttatatagtcacttgagaagaatgtgtattctgctgtcactggatagttctgtacatgtctatgaggtccttttgttttataggatgtttaagattgctatttccctactggttttctgctagagattcattcccattattgaaagtggcgtaatgttgtgtctcattgttattttattgctgtctatttctcccttcaaatctgtcaatgtttgccttatatatagttaggtactctgatcttgggtgcctatacatttatagttgttctaacatcctgataattgacctttttatcattatataatgaccttttttatttcatgtgacagtttttaacctaaagtctatttggcctggtataaatttagccactcctgctgtcttttcgttatgatttgcatggaatatttttttccctcccttcactttcagcctttgggcatccttgaatctatagtctcttgttgacagcctatagtttgattttattttttaatgcatttggacgttctttgtcttttgactggggaatttttaatccatttacagtcagctggatgtaggttccacatccacagagtcaaccaaccatgcataaaaaaaatcacacacccccataaaaataacaatgataaaaaatggaataataaaagtaatgcaaactagatggtgtaacaggtatttatatactgtttacattctattagatatgataagtaatctagagatggtttaaagtataggggatggtgtgcatgggttatatgcaaatactatatcacttaatataaaggactttagcatccataaattttggaatccacaggcgatcttgaaacccatctttcatggatactgtgggacaactgtatttacaaagttgtattaataagtaaggacttgctatggcacttcattttattttttctgtctgtgttataattcttctttcttttttctcttgctgttttcttttgtgttcattgatatttttgtattgatatgtatttatttccttttctttttcttttgtatattttctgtagtattttatttttttggttaccttggggcttatgtaaaacatcatatatatggaggcaaagtttattctaagctaataacaactcaactttaatcacataaaaaattatgcacttctcccactttgttattgatgtcacaattacatcttttatatgtgtatatctactattatacttctgtagttatagtaatttctactttgttgtcttttgactttcatattagaaaaaggtgcaccaccattacaatgttgcacaattttgtatttgtttaaataattagcttttccagtaagttttatattttaatatgcttagttatgcttagttttgctatttagtattattttgtttgagttaaagggctcacctgtcatttattttatgacaaatctagtggtgatgaagttgtctctctcagcttttgcttgagaaagtctttatctattcttcatttttgaagaaaatttttttccagaaattgcattcttggttgagaatttctctctttcagcattgtcttgcttcttcaaaattcactctttttgacttttgacatataattataatatgtctttgtgtggacttcccttgaatttgttttatttcagttccatttggcctcatgtatctgtatgtcctttttcttctacagatttggcaagtttttagccagcactgtactttccttcttatttttctcttctccatctggaacttttgtgatcagtatattatttcactttatgatgtcccttaagtccgtaggttcatttgctcttttttattcttttttcttttgctcctttgtctatgtaatttgaaatgactggtgtctggattagctgattccttcttctgtttgatcaagtctacttgtgaacaccccctagtgattttttttatttccgtcatagaattcttagctccagaatttctaattgtttcttgtaaaatttctatatctttacttcaatatttttatcttgctcatctatcattgttgtgatttcatttgtgtctcagtgttctcttgtggcatgctgaattatcatggagccccagagctctcctttcctcatgtgtgctgcttctttcatatgtgataactataatgaactttaacaaatctcaaattcgagtacattcccaatcaccttctaaaagtaacctcctaacctccactgattcctcagatgtggtagtttgaaagttgttcccatagatttcaactacaggccaaccagaggggacccatggccactagaatggtccagtgacctttatacttcagtgtgtgtaaaaatcacctgggatcctatttaacattcaagtttctgagccttcccctagccagtagattttatatacaaaatgtgagggaaccattacccttttcaagtgattaaaaaaaatcagaggtgaagcaattagatttggctacatttaatttgatgttttatctttcaagagattgggatggttctagtgaaaattatagctaatctgaatatggcttctaactgttactgggtgcttatgtcttttctttactctgatcaacaatattgggcaggtgtagtggctcacgcccataatcccagcactttgagaagccaaggcgggaggttcacttgagcccaggagtttgagaccagcctggacaacctggggagacctccatctctgcaaaataaaacaaacaaacagacagacataaaaacacctagctgggcgtgttggtatacacctttggtcccagctacttgggaagctgaggtaggaggattgcttgagccacaaggtcaatgctccagtgagccgtgattgtgtcactgcactctagcctggaaaacagagcaagaccctgtctcaaaaaacaaacagcatacgtcttattgttttgttcgcttgtttctgaaataatctcgttagtaaagcactatacttgataaacagtctgatttaatgaataaggatttaaactttagattttggagagacaagattaactaaccgttgatcacaaggagcacactgtgcaacaagctactctgataggacaaaagtcctaggagggctatataagcaaaatctcattcaaggactgaactttaagccctattcacttttagctaatcaagtgatgggcaagttgacatctatagggaagagagaagaggatgtgtttctgagctttccttcttcagtcaggcaactctgtgattcattaatttcctcccttccttctccacaccctggcatgttggcccatagccacaaggtggcaggataaccagtaacattttattcaagccaactgaagccctgcgggggctttgaagttcacacacactgtccaccttccacatactgatgctgggagcaatttagagcaaacatcatccagagtcatattactagatgactggattgcttcttttgtccctcaatcctgctctcctttcagtgctaactcaagaaaacactaagtttacactttgcaggagcccctggaatagttaaagctttaaaccatttcacatccaactcaatgatctgttacaaaaaatacctgttgattttctgttattttaatggatacctagcttccttttataaattggcattacaatagtctggtattagtattgatctggaatctatgtgcttccagatcagtcccattccttttacttttagaataagacaaaatgtagctcagacaccattcttccatgaaaccacatctctctaagaagatgctggaaagtcagtctttctcaaaaagtagttttcccctcaagtttcaacacattactccactgtaagtttagacagtataaatatgtataaaatatatatatataatatatatatattttagtataatattatgcttcagcttttcctgcatgtttttctttcttttctcttacacccttctctgtgatctcatctgacaatcactaccatggcaaccaagcctctgtgacgttccagcaagctcattgtcttctcttcactaaactttagttagtagttggtcccagtcagtaacactctgggagggctcaggccacatcacgaaatgtgacaggatagccttgaactcatcaattgctgggtaagaaagaattttaatgcaatggcaaacaaccaatcaaacaagcaaacaaaaacaataaacccttccttgaggaccaagaagacattgattagctaacctaagagctccaggtggagacctaggtcctgattgggtttctgaatttgaccactaggcagaaaactagcacccaaaaccagttggaataaaattacccacctacagtggagccaaggcccccagatcctttttgtcaggtaagaataggttgaaataacctggctggttgtgggacaggccccctctgtgagtggtgcagttaaggacacccagactgccctttcactctgctttccctggggtaatgtgtatggctcctagtctttcacgttctcttctgtaattcgggaggaggaagagaagatactcactgcacatattgtgtcagttaatactaatctgagagcaataatttatgatcttttgaggtgaggtttgatttttaccactgtgctgttcctgtctcctaatatgttgtatcagattgtaactaagttgaggtgagaattaattgaggactatatatttgagcctccttagaatctcacccacctttgagataacttcatgttttaggttttctcaagtcagagtgttgagtccttaaatcagtatatgctgggcagtgaaaaaacactggtacactttgattgcctaagcttagtgaacagcaggggcggtgggaggcaggcctttttaacacctgtctttgctgagtttcatgctgaaaaagccttgaggctcagactcagcccacaggtctctgcaatccctccatctcccttctgccctttccatgcatagccttcacagcagttttttgtgaattatttatttttttgagctctctcttaaggttaatttttcttaagaaatatttactctca

SEQ ID NO: 6608 - DNA, 6000 bp, Homo sapiens
gagacataccatatctctaaaaaggagaaatttcccaggaacatgtacatgggagtgtgacgtcgccggtcacaccacagggcgcaagcaatggctccatttcctgttatggtcagtgcatatgttgtagtgaagagtgagaagaggaagatctgaattgtccactcaaaagataaatcttggagtataaattcatttactaaagcaaagctggaatttggctcagagacattcattgggccagtgacctgcaaggtcaagagacacattatcagtcaggactgttttacaaaatgagttccttttttaagaatgaagagaagacaatgaacatgaagtcatttttcaaaagaataattaggaagagaatatagtttactttttcttggctatacagtatatgagttttgggcttagtaggtagctgattgaacaaaaacttctgccagcttctaaatctctccttaatatgcaatcgtgatagaactaggtaaagttaaattccttttgtaaggtcattattttgggacagaaatgatttaatatagtttctggatagcatacaacccaaagttagtactttgagaaggcacaaatgtgttagtttcttactgcaaacccaacttatagtgcaatagactcagcaaggaaagttttgaccatttacatttcagctaaacatattacttaacattatttacatatgcaaaagaaatgcacatattttaaaataaattggtagctatcacgttaaagccattatctctgaatttctattgctgctgttgttagcttaagtgattatctaatgttgcttaccaatattgacttttaatattaatattgtaaagctgcattgttttctgtagaaagggaaggctttaagtttctgattaatcttttaccttaatttcataaactgatacagtgattattatattgataaaatcaatacagtattgatttagtcattatgtacaaaagtttgcaaagatctagacattaaactttatttttgaaggtatttcataaaatttggagattgattttccttatatgctttttataaaattgaaaaattttactaaatgacagaaattaaacacttttttttgttataggtaaacttcctcctacattcttctaaaaatatatttagggatttgagttacctgaaaaaacttttttttcctcagaaatatggagggatgtgagttctagacgtcaagagggcttgcattttgagaagaaacacaaattttcagaagtttttcttccaatttgatctctacaccagtgctctaggaattcttttggtatgactagttagaagttatgtttgtgcctcttttagtaatagatgcctctttaattggcttccaaccagaaacattaataaaccaacattaggaaattatggaaacggattgacatgggagtgtcatgattctcagcagtgctcaaaaggtgaagccatcatcgttttgacatgaaccaaatctctaaatgatttattttataaaccatattctgcctccacctagacagttttattgtggccccaaaattaaaaatgcactttataaaactcactttctcctgggatgtagcttctatagcattaggaaagttatcttccaagccaatgaatctttaaaaagttaatgattagatattctctgaagaatcagtaaagagtaatgacaactattctaagacatcattatttacaaagagcttgcccaccagacggattccaaaaaatcttccagaagacacagtctgaggagaaataagatacaaaatgttaccaaaagttctgacataatgtttaggaacatttcaagtgttactgtgcatatatgttggaggatatacagcccagtgaggaaaatactgatgttccaacattgtcacatattgagcaaaaacttacagaatttagaaataacttttagaaggatggcacttttttggcagattcctttagatatgagaaaaaagtataagaagtagcaacgtttaagttaattgacagaaatacttgagaggaacatgtgacttcccaattaacatgagagaagtattgacttttatttgtgtcccttctatttttactttatggcatttaggggccaatatagtgtagctaaacactcatgtgtgagtgaatgctcataccaagtgctgtgaagtagttgaggacatcagggatgtatgccctaggactacagacatctgtctaaaagcacacttccactttgaaagactatggaggaaaatgtttattcagacctttattatcacttaatcataatacttagaaactcctaaaacatagctttgatcttgttgtctgctccaaaagccatcaatgatttcaagttcccaagttctccacaaattgacttcaaattactttcctggtgttatctttccctactctcttttacagataaattagacagtagacagcatttcattctctgaataggttcagtttcctatgttctcttttttgtgatcattttctgtgtttggaattctatttatctccacctacacctgtaaaaaccctccttcaagatccagttcaaaagacatttttccccccagaatgttttcccctcttcccctaagcaaagcaccttttccatccttgcattttttcttttttgagacatagtctcgttctgtccccaggctggaatgcagtggtgtgatctcagctcactgcaacctccgcctcctgggttcaaacaattctcctgcttcagcctcctgagtagctgggactacaggtgcgcgccaccatgcccagctaatttttgtatttttagtggagacagggtttcacaatgttggccaggatggtctctatctcttgaccttgtgatccacttgcctcggcctcccaaagtgctgggattacaggtgtgagctaccatgcctggccccatccttgaatttttattttaccatctttgtgtctttgtcatgatactaatcataagctgccctatatcaatgttcatccatgatattggcttgaagttttttcttgttgttgtgtctctaccaggttttggtatcaggatgatgctggcctcatagaatgagttggacagttctcagttttttggaatcatttcagcaaaaatggtactggctcttctttgcatatctggtagaatttggctgtgaatccatctagtcctgagctttttaaaatatatatatattttggttggtaggctatttattactgatgcaattttggagcaggttattggtgtgtccaggaatttacccatctcttacaggttttctagtttgtgtgcatagaggtggttgtagtagtttctgatggttattttttatttctgtggggtcagtggtaacatgacctttttcatttctagttgtgatgtttctttcaaaagattagaatggtaaaaattatatctattctgattagggcttctaggcattattaaatgtttacacctttaatttactctggtcaacagtatatttttggggactttttcttaaataatcttgtcactaaaccactatactttataaacagcctgattaaatgaacatgcatttgaacattagactctggatagacaagattaattaacctttgacacaagaagctcacagtacaacaggccactctgataggacaaaagtcctaggaagtctatgtcggcaaaatcccacctaagggctgaactttaagctctattcacttttagctaattaagtaaatatactgccatcccatgctgatagtgatgagcagtctccggggagtttgacttctatagggagggagggaggcgatgtgtttctgcactttgcttcttcagtcagacattctgtgacttcttcatttccttccgctcctcttcaagccctggcatgttggctcagaagcacaagagggcaggataatcctcactgtctcattcacactgactgaaaccctgggctttgaaatacagactcactcctcccaagctctactctgatgctgggagcaatttagagcaaatgttatccaaagtgacattacctagatcactaggttctttctttcaccctcctccaatcctgctgttctttcacttctaagtcaaggaaactccaagtttacactttgcaggagcccctggaatatttggggtttcatattgcacatcaaaactatttctcactgacccaatcatctattaaaaatcttgttgaatttctgccattttaatggctatctgccttcatatgaagttcttggtattataatagtcagtgtgcttccaaattaatcccaattcgtttacttttactttaagatgaaatgtaggcagagcacagtggctcacacctgtaatcccagcactttgggaggccaaggcgggtggatcatgaggtcaggagttcaagaccagcctggccaacatagtgaaaccctgtctctactaaaaatagaaaaaaaaaaaacagccaggcatcgtggcaggcacctgtaatcccagctacttgggattctgaggcaaggagaatcgtttgaacctgggaggtggtggaggttgcaatgagccgaagtcgcgccactgcactccagcctgggtgacagtgcaagactccgtctcaaaaaaaaaaaaaaaaaaagaagaagaaatgtagcttagaaaccattcttccataaaaccaaaaccatatctccttaagaggatgttggaaaatcagcctttctcataaagtagttttccccacaagtttaaacacattactccactataagtttagagactattttaaaaaactattatgcttcagcttttcctgcagttctctctttcttgtctcttacatacttctctgtgatctggtccaacaattattgccatggcaacaaaggctctgtgacatctctagcaagctcattgtcttctgccttattaaactttaatgggtaactagtagacagtaacactctgggagggctcaaaccacataaccaaatgtgccaagataatcctgagctcactattgtcaggtaaggcaaagtattttagtgcaatagcaaacaattaattaaacaaacaaaaacaagaaacctttcttgggacaggaagccattaattagctaagctcagagccactcattgaaactaggtcctgattgggtttctggatttgaccactgggcagaaactaggacccaaaaccaattggaatgaaatggtccgcagatattgttttcatgtaaggataggtttggaagtatccagacttagtggtgggccaggcctcccctgcgagcagtacagttcaggacacctggactgccctttccctctgccttccctggggtaatgtgaatggcttagtctttcgtgttctcaactgtaacatggaggaggaagagaagagcctcactgcacatattgggtcattaagaatgatcttagagccataatttacaatattttgaagttaggtttgatttttaccactccactactcctctcccaatatgttgtgccaaattgtaagtaatttgcaattagaacacattgaagacatatatttgagctccttagagagtctcacccacctttgtggtaactttttgtacttcaggttttctcaagtcagagtgttgagtccttaaatcagtgttgggtagtgataaaattttgatacattgggtagtgataaaattttaattgcctaagtttagtaaatgggggacaggcttgcttatcaacagtctttgtggcattttatgctgaaaaagccttgaggctcagactcagcccacagttctctgcactccctccacttcccttctgtgcctttcatgtgtatcctttacagcaatttttttttgtgagttcttttcctttttgagatctctcttaaggttaatggtgtacagtagatatccagaacttattcatcccttttagctgaaacattgta

SEQ ID NO: 6609 - DNA, 6000 bp, Homo sapiens
aaagttttatttcttattcatacaaacttgttgtgtgtctgggtggttctccagggcatttgccctcccatatggtgactgagacatagactacttcaatcttttggctcttccgtttcaacataaagctccttccacaattgcaatggcagaacagaagagagatttgagaatcacaaacaacttttcactgcctcagcccacaagtgactcgtcacttttgctcacattttattagtcataatagtcacatgaccctgcccacctgcaaaggcagctgagaaatatagtcttcagtatgcctggaagaagaggaaaacgagatattgttgaatattagtaatgtctacacaataatctgcattatctatgtctttttacattggcatagaaatagccatttggaaatagaactgtttattccagatgggtagccaggggccataaaaactcctcttttctcagcatgctgctgcttgggcttaccaatacaaaatacttccatttctccagctcttctcttctctccctgtttagtaagaggccacatgggggcatgtgagggtgtgtgatggggagcaggagggaggaggagaccttcaatgataaggaggaagaagaaaggcaacataaaacctttatgttccccaactacctcggtctttgcaatgatcctaaatcctattccatctcttcttccctccaccgaaccctcctcctgcttttcaataaatacctaagaaagttggaattgggaattcttctgaacacaaaggtaagacaagtgattatcacctaaacaaggttaagtacttgttggaaaagtatttattagcacttatgtgatttggcctatcactacactcacaaaagtataagagaaaaacagagaaggaaagagtttttttttttttaaaaattatgtatggcattagggttctccagagaaacagaaccaacagaataaatagacatatagaaagagatttattacaaaaaattggttcatggagttatggaggctgacaagtcccaagatccgcagttggcaaactggagattggcaagctggagacccaggagaactgatggtgtagttctagtcaaagtccaaatgcctgagaaccaggagagccattactgttgtttcagttcaaaagccaggaggctcaagactcaggaagagctgatgtttcagttcaagtccaaaggcaggaaacagccaccgccccagttcgaaggtagtcaggcagagggaatcccctctactcagcttttttgttctattttagccttcaaccatttggataagggccacccacatgggggaggacagtctgctctactcagtctacccattcaaatgttaattttatccagaaacaccttcacagatacacccagaaataatgttttactacctatttgggcatcccttaacccagtcaagttgacacataaaattatcatgacaactaattaaaactttggaaacacaaggtgcctctacgttgggaggataccttcttatactattcattacaggagaggactgggaggaaaaattacttttaacagcattatctagagtgagaggttgcctatttttttactccatttcccattaactgctttgaatgtagcttcagaaagttttgaataaaaattagctagcacataaatgtgttggctggtaattctaatcacctgccttcacctatggctgggtatctgattgctgccaggtgttaacacttaccagctcatatcaatgtaacaactactgtggtctgaatgtttgtgtccccagccccccaaattcatgtattgaaacctcatcaccaatatgatggtattaggggatgggatctttgggaggtaattaggtcatgagggctctggtgccacagatgagattagtgcctttataaaataaccactaataggaaccaggtgttttaacatgtgcctgtagtcccaactacttgggaggctgaggtgggaggatcgctcaagcccaggagtttgaggctagcctgggcaacatagtaaaacccctgtctctaaaaaataaaataaaataaataaaactaggggtactaataaaaaaggcacccttctaccacatgaggagacagctagaagacactatctgtgaaccaaaaagcagtccctcgacaggcactgaatctgccagaaccttgaacccggacttcccagtcttcagaactatgagaaataaacttctgctttttataagctgccctgtataaggtattttgaactactatagtctgaacttctatagacttaaacaatacctgtacctggtaagtaattgaaagggactgtaatttatgtgttttttgaccttttcaggtttaatttcagaaaaaaaatctgaaatggtacattttagtttttgttttgttttgtttttttgagacagagtttcactctgtcatccaggctggagtgcagtggtggtaccagctccctgcaacctccgcccctgggttcaagcgattctcctgcctcagccttccgagtagctgggattataggtgactgccaccacacccggctaatttttgtatttttaacagagacgaggtttcgccatgttggccaggctggtctcgaattcctgacctcaggtgatccactggcctcagcctcccaaaatgttatgattacaggcatgagccaacatgctcagcctgaaatggtacattttttttttacaaaaggaaaacagatattaatattatgggagattatattttccttaaatgactgcaataatatctctacttaatctctcattccacatgctcttcttataatgtgactaacactcctcccaattagtgtcccctttacttaaatgtggtgtttttgtagctgcttcaacaagtagagtacagtggaagtgacgctgtacaacctctgagattaggtcataaaaatcaatgcaagctggtctgagtctgagtgcagtggtgtttacaactaattgatcacaactactttacagatttctttgttccttctccactcccactgcttcacttggctaacctaaaaagaaagagagaaaaaaaaacgtcagtgcagcttctgccttgtcctcttgggactcttgtctctcttgggatgctcacttttggagcatagctgccaggctgtggggaagccaaacagccacatggagaggccacatatagatgttccagctgagttcccagtcaacagccaacatcaactgccagacatagagtgaacaagccttcagatcccagacccaggcagcaacgctgagctacacttctggagttatgctctaagccacgaaatttgttatggtttgttgtgcactggtagatgaccagacaattataaaaaacactactacagacatttaatacatatttaaatcgtgtccaatcttttacatcacaaatcttaagatcttttgactcatccttaaaaaaaactcatacagcacacaactattaagaattgtgccactctattcctgtctttagcccttcatttttgagaggcaatccttcctcaagtctgagaatcatggtgatctcagctgattgggttatttcttgattctactgaccatataccctaacaccaattgaggggttgtagagaatttagtgatatcttttcagaatgaaaacatgagagcggtttcttgctttctccattctctacacttgcaaaactgattcttttctatacctttatcccaactgttactagttttgaattcgggatggagggtgaagatgggtaaagggatatttttataactgttatcaaacaactctatttacacagattcttcaacccttcctaaatgagtatgctggatgttggtgaattattataatttttggtttctaatgattatagtgtaaggggttttatcttgaaaactatgtttggactcctggaactaatgttaaccgctggtaatggcgttcttgggggtaaaatacaattagtgtaattagtaattttccgtctctttctctttcccctttttggtctccaaaatgtttaaaataattctcacatagattactatgtgaaggtattgtgaaactccaaatatgtacaagacacggatttttaccctttcaagagtaaataaggattaccagtgaaaaggaaatagccatattgtaccaggatcatccttggggcaaccaaggaataactgtagttttaatcaattctcgagttgttgtccttggtcccagtcacataatcaacatgtcaaagtcttctaccatgtacctcacttattaaaaagaaacgagtttccataaagtcgaccacgcatctttgttctctttatcccagatcctctctctgcatccgtagtttcctctcccacttggcatctctttaccatttcttcttgtttacttgactatcccagctcccaacattttctgtcccggaatccactaagcctgggttatactgtgtacatgttagaaatgatattcaataaaaaggcccaggaaaccatgcactgagttcctatatttcatttttcttaaatgctccagctacacccaaggactgactgaggggccgggagactgggctccgtgcccaggtggcaggggcgtgtaattctaacaccgcaggcagcccctgctgacgagatacagaggagtaacgacagttaatagtaaacgaagcgaagccccgggaggtgtagcgagcatgtccacgacagccagtcactgatcctccggcctcccacgcttccagccgagacagtcacgctccgcggggccaagatggcgccctccccgcggcagcctgggcgcgaggggcggggtcgcgcgtgccacgtgaccatcctcgccagccgcgcgcccccggctgccccaggcgcgcaccgagtctggcggccgcgcagacggtgccactgccccactgggggcgtcctccttcgtccccgcccggctgtcaagctgtgttctagcggccgagggaccgaggggggctaagaaagggggcgcccagccatgcagaggcaaaaaggcgctgcggaacggggtccccgtcgccagtgctgaggcaggaggtcggagccacaagtgaggggctgggaagcaggacccagcacgggcgtcttggcaggcggccgggcgcagggccaggctgctggggacgctcagggctttccacccaagccatgggcgctgtcgggcactcgggggtcccctcgtggctccggccactcggcgtgggcattacgttggcttcacatcgccatccagcctcgaagccaacaggactgaaaaatagcttcggccaaacgttctcctcccgctaaggagaggggtcgagtgcgtcagcccgaggggactggagagggatgccctagccctcgaggggcggaggacccgcggttgaaggaggcagcgggagcggagagcgccctccttgaccatcgaatgcctccttctgtgtttccattcctgtcgagtgggctgggccacgctgaccaccctggaggagggacggacgacgctcggcgggctctgaccgtgccgccttcttgtggctgctgactgggatccaggagggagtgggcatggggcgcagccgcgcctccctccctccccgcctcccgggcgccggggttggcgatgtggagacgtgaggggacccgtcggctgctccggcttctccaggactccgccaggcgcccgcgcgtccctcctcacccggaggaggagaggctccgcgcggggctccgaggcgggcggcgcgcggagccggagtcccagcctcgccatgggacataacgggagctggatctctccaaatgccagcgagccgcacaacgcgtccggcgccgaggctgcgggtgtgaaccgcagcgcgctcggggagttcggcgaggcgcagctgtaccgccagttcaccaccaccgtgcaggtcgtcatcttcata

SEQ ID NO: 6610 - DNA, 6000 bp, Homo sapiens
atttactgacctaatcctctactgttgaacatttggttgaaaacagttttagaaactataaacaatgttgtaacaaactccattgtgtttggcattcgttcattgtcaaaatttcactagtgctactcacatgattagaaatgattacatactgctacaaataacaaaatattagtgtaccatagatttaagaactataatgtttttatttgaagatgacatgattgtttacatggaaaattcttgagaatctacaaaacaagtaaaactaatacatttatttaataagatcagaccatgtaaaatatgcatgcaaaaatcaattgtatgttatgtactagtgacaaacagttgaaaatggaattaaataaaaacaattaaacagagaataccacaaaaaacataaaaattttaggatttaatttgtaaatacatgcaatatctctacattgaaaattacgaaacataactgagagaaataaaaaatagctaaataaataaacataccattttcatggatcaaatactcaacatttttaatatggcagttctctccaaagtgatatatagattcaactaatcacaagcataatcttacctgggtttttatagaaactgacaagttgattctaaaatttatatggtaattcttgcctccctgacagtagctcagcctccaggactctcttccagcatggctgaagacacctcttcacataagatggtgacaacaaatcacaggcgcagtctcaccaaaatcacagatcagttgaaaatcctcatcaataccttcaatcaaaaaccttacccaggttatgctaccaaacaaaaacttgctttagaaatcaatacggaagagtccagaatccagatttggtttcagaattgaagagctggattccagaaaagaccagaacctgggactttagaatcaagccagagccatgggcaagatcgacctgatgcagagtttcaaagtagagaagccagatggtgttgtaccacctacagcgcctctcaattaagcactctcatcaaggcatctatgaaaagcccataccctgggattgattccagagaacaagttgctgaagaaattggtgttccagagttaagagtccaaatctggttccaaaactgaagatctagatttcatctccagagaaacagggaacctgttgtgtccttagaacaagaagaccaggggcaagatttctgagggacatcaaggtacagaagatacacaaaatggcaccaacctcactagcaattctcatttctatagagccagaaggtggtggacacagtcaagttcagtgtatttgatattatcaacttgggccccaaatctctctcacagtcttcctgggagtctatccttctgctgaaactgcaagctaagccctctgaagatggtaaaggacacggccaggtgcggtggctcatgcttgtaatcccagcactttgggacaccgaggcagaaagactgcctgagcccaggagttcaaaaccagcctgggcagcatagcaagaccctgtctctattataaaaaatgaaataaaataaataaaaaggactgtaggaggcagagacaggtacaggaggcaccacactaccctattgacacagcctggatccagagttcagcggaccttgagacaatgaaaataaacttattaataatcaaaataaataaataaaaataaaatgtatatggtaattcaaaagacttaaatatcaaagtcaatcttgaaaaagaagagaaaagttagaagacaaacaatctaaatcaaaacttactataatgctataatgatcaacaaactcgtcctggtatgaagatcaacaaatagatcaacagaacagactggagttcagaaataggcctatagttacagaacgtgatttttacaaaggtgtcaaatcttttcaactaatagggttggagtaactaaaatccatatggaaaacaacaaaccttgaccccttacctcataccacactcaaacactaattcaagataaatcagagacctaattatgaaaggtaaaattatagggcttcttggagaaatcacggaacatctttgcaagctgggggtaggcagagtttctttagacaggttacaggaaggcagtgaccataaatgggaaaatttttataaattagactatcaaaattaaatacttttgattaaaagacatcatgaagaaaatatatactagactacagataggaaaacaatatttactaaaaacaactcaatacaaactcaataataaaagccaaacaatcgaatcaataactggaggaaaaaaaaaaaacatgtgaataagaagatacgtgcatggccaataaacatggaaaaaggttctgaaaagcatttgctattgaaaatgcaaatttaaaccacaataggacaccaatcaacactcactagcatggataaaattaaaacgagtaacatcaaatggcgggaaaggtgtggagcaactgaaatctgtgtacgttgttggtagaaacgtaaaatggtgtgaccactctgaaaaatatctgctcagttctttatttttttatattttatttttattttttagatggagtctcactcttgtcgcccaggctggagtgcagtggagcgaactcggctcactgcagcctccgcctctcgggttcaagcgattctccctcctcagcctcccaagtagctgggattacaggcgggtgccaccacaccctgctaatttttgtatttttagtagagacagggtttcaccatgttggccaggctggccttcagctcctgaggtcaggtgatgctgggattacaggtgtgagccactgtgcctggcctgatcgtttctttaataactaagcatatatgtgtcaagttggctaggccatggtacccagatacgtggtcaaacaccaatttagatattgctgtgaagttattttttggaggagattaacatttcaatcagtagactgtgaataaggcagatgaccctctgtaatgtggatgggcctcattcaatctgttgaaggccttaagagaaatgactgatgttcccccaaacagaggaaagcctccagattgtctttggatttgggctacacctttaatatttccctggccaaccctgctggcctaccctgccgatattaaacttgccaaccccagagtcatgtgaagcaattccttaaaataaacacacacactctctctctctctcactctctctcctcacacatacactcaaacatacacacacacacacactattgattctgtctttagaaaaccctgacaaatacactattacttgacccagcaattctatacaagaaaatgaagtcaaatgtccctaaaactaattgtacaagactgttcgtgtgggtttattcacaataggcagaaactggaaacagatcaggtgaccactgatagcagaatggataaacaaaccatattatattcatacagtggaatactgcttagcagcagaaagccatgaattactgataaatacaacaacatggcttaatcggaaaaacattttatctgagtgaaaaagccttacacaaaagagtatttatgatgtgattccatttatctaaagaatagggaaaactaatcaatgatgaaaaaggaaatcagaatagcagttgcctctggggatgggatggaggccggggcttactggaaacaggaatgaaggagctttctggagtaagggtattgttccatgtgttaatggaggttgggttatacaggtgcatgcatctttcaaagttcatcaaatagtacagtaaaattagatcatttcattttaggtaaattttatcttaaagaaaaaagaaatataactagatattaaactctaggtagcagtatacatggtgaagtgtttaggggtgaaatatgctgatgtttgaatctcactttgaaatgcactaaaaataagagaaattaatggatagagagatggataggtatatcagaataagtgtagagagatgttaattgtagaaaccagatggcaggtgtttgctatacagttattcccagtttcctacatgtttgaaatttctcctaataacatgttggaaaaaaagagaagtttatttctcttcaagaaataaagatccagaagcaggcaatcctggacttagatggcaactccatcatgactagcaattcagcctccttcagttttcttctactttccttagcatgccacctcatagctggatctctcagcaactattccactctgcagccagcaagacactcacagcatccaagcaattctttcctgtctctcctgcctcatcattatttctctctctactggattgctgtcatcagcatacaaaactgtagttatttttctcatctgaaaaagattcttctcttggccaggcatagtggctcatgcctgtaatctcagcactttgggaggttgaagcaggaggatcacctgaggtcaggagttcgagaccagtgcggccaacatggcaaaactctgtctcaactataaatataaaaattagccgggtatggtggtgcatacctgtaatcccagctactcaggaggctgaggcaggagaatcacttgaaccccaggaggtcacagtgagacgagattgtgccactgaactccagtttgcgcgacagagcaagactccatctctctctatatatatatatgtatatatattctatatatatgtgtatatatatatgtgtatatattctatatatgtatatatattctacatatatgtgtatatatgtatatatattctatgtatgtgtatatatacacatatatatatgtatacccaacttcctcttcttttagctgctgtcctgtttctttgccctcctctatgcaaaaaaaaaaaaaaaaaaatcctcaaaaaaataaagatgcttcccctgtgtgattccgtcctgcgcagctgttctcttgagcagtggttgtttatatccatccaccttctctcccatctaagtgtgtgccgccacctgatggaagattcgatgggcatgtatgtggacatgagccccctgaggccccagaactatcttttcggttgtgaactaaaggccgacaaagattaccactttaaggtggataatgatgaaaatggacaccagttatttttaagaacagtcagtttaggggcgggtgcaaaggatgaattggacattgtcgaagagaggcaatgaattacgaaggcagtccaattaaagtaacactggcaactttgaaaatgtctgtacagccaacggtttcccttggggactctgaaataacaccaccagtgatcttacggttgaagtgtggttcagggccagtgcatattagtggacagcacttagtagctgtggaggaagacgcagagtcagaagacgaagaggaggaggatgtgagactcttaagtatatctggaaagcggtctgccactggaggtggtagcaaggttccacagaaacaagtaaaacttgctgctgatgaagatgatggtgatgatgattttgatgatgaggaaactgaaggaaaagcaccagtgaagaaatctatacaagatactccagccaaaaaatgcacaaaagtcaaatcagaatagaaaagacaaaaccatcattaacaccaagaacaaaaggacaagaatttttcaaaaaacaggaaaaaactcctaaaacaccaaaaggacctagctctgtagaagacattaaagcaaaaatgcaagcaaatgtagaaaaaggtctttcttttcccaaagtggaagccaagttcttcaattatgtgaagaactgcttccggaggatttaccaggaggctattcaagatctctggcagtggaggaagtctctttaagaaaatagtttaacagtccccggtatgtgatgttccccttcctgtgtccatgtgttctcattgttgtggggtggggggaggggggagggatagcattaggagacatac

SEQ ID NO: 6611 - DNA, 6000 bp, Homo sapiens
tgatctgcctgcctcagccacccaaagtgctgggattacaggcgtgagccactgtgctgggcctaaaaaaatttttttaaatagaaaaataaaatgaagtaaaaaatattttttcaatgagtgattgcttagtcatatgtaatgctatgtagccaatagaaaaaaatgagatacctctatacaaattttaagtaagaaaaacacattgcagaatgatacttgaataatactatttatttcaaatttgtgtgtgtgtgtgtgtgtgtgtagataaactcgcacaccaaactggaaggatatataccaaagtctaggaataaagagtagggaggagagactttatttactttcttttttttttttttttttttttttttttgagatggagtctcgctttgttgcccaggctggagtgcagtggcaccatctcggctcactgcaacctccacctcctgagttcaagtgattcttgtgcctcagcctcccaagtagctgagactacgggtgtgtgccaccacacccaggtaatttttgtatttttagtagagatggggtttcaccatatttaccaggcaggtctcgaaatcctgacctcatgatcctcctgcctcggcctcccaaagtgctgggattacacacgtgagccactgtgccgggcccattactttctgtcacatgcgtccgtgtgaagagaccatcaaacaggctttgtgtgagcaataaagctttttaagcacctgggtgcaggtgggctgagtccgaaaagagagtcagcaaagggagataggggtggggccgttttataggatttgggtaggtagtggaaaattacagtcaaagggggttgttctctggtgggcaggggcggggggtcacaaggtgttcagtgtgggagcttctgagccaggagaaggaatttctcaaggtaacgtcatcagttaaggcagggaccagccattttcacttcttttgtgattcttcacttgcttcaggccatctggatgtatacatgcaggcttgagctcagaggcctgacactttctatacttctatatattgtttgatttttttcaagaagcatgtgcattgaatatgaatgtatatggatgattctgcaggttcaaagctaaagtgattctgagtgttttccttttcatgccatgaaagagcccaaatgtggttgtatcgtgttatgtatgagagtcaggatcttacactgatttgtagtgaggaaattcactggttctgtgctccatggtattgttgcagaagggaagtttatgaatcaaatcactccactcttgtgccttaacgtcaccacagagctgaccaaaagtctgactcgtgtttctttttatattgttagatttcctttctctgcttggttttgagcatttgtcaccagaatgcatgggatttaaatccccaaatctagaattaatatttgatgactgtaacaaggtatctgaaccacactttggaattctggactttgggtcttgatttaccctggtacttactataacctttttgagaccttggcaatgaaattattgactttgagccttggcatcttcatctgtatcatgaagatgttaataatattaatcccacagtattattgccaagatcaaatgggataacctacatgaaagcctttgaaaattataagcaatatacaaataaatataacattattattttattagtcctaataacaaaaagatacttaatgctcactgactacagggttagagaatgaagactccctgccttacttctcttttccatcccatgcaaaatgttccccccaacaccaccccgcaaaaaaagatttgcttggcagtacaattttgattgtttagtgtttccatagtggtgtaccaggaatcataggcaagacaaggaacttgtagcaaaatatttcctttttctgtccccagcccagatttgtccccagcaataccagattatttataccttttctttcctttatacttggctcttatgacagccagggcacatggcctgtacagtgttttattaaaggatcttccagtaggattgtaatggttttaaaagatgatcacaaattctttgacatttctccattgagtgtgggatctatattcccttcctttgaatctgggtggattcatgactgctttgactaatagagaatggcagaagtgttgctatgtgaatttcaagcctaagttacagaagaccatgcagcctctgccttgttaactaggacatttgttgatagattcttgtcatcataaaaagtccagctaccctgagccactgtgctagagaggcaatgtgtagatgctgtggtcagtaatccctgtttagcctggtcttctagccaagatatcagaaatacgagggaaaccagcttggacccgccacaccactctacgtgccagatcaatgccaagtgtcctccaccaatgcctcatggaacagaattctccaactgagttctgcttaaattcatgacctacaaaattgttttggggtagcttgttatgtaatacttggtaaccagaacaggaacgataatcccatttcagttcaacttttggccagattaagcacaattatgggggtcaatttatctttcttttttctctctttgcagtgaattttttttttttttgaggcagggtcttgctttgttgaccaggctggagtacagtgtgcccatcttggctcactgcagcctcaacttcttgggatcaagcaatcctcccacctcagcctcccaagtagctgggactataggtgcatgtcactatgcttggctaatttttggtttattttttgtagagatggcatctcactctgttgcccaggctggtctcaaactcctgggctcaagtgatcctcccattatggcctcccaaagtgctgggattataggtgtgagccacgatgcctggccttcctacagcactcagtattccaagagatctcccatccaagcactaaccaggcccaactctgcttagtttctaagatcagataagttctttaaaaaaaaataaaagcggttactgacttttcttgatagctgggtattttgataaagacttccaaagagatatcctaagcttgaactcttcccccaaatagggaccaccagagcttctttgctgtcatcttgcttgagaaacttccttgcactggggctactgagtcaacaacattcttcataaaaataattttcctttgggaggctgaggctggtggatcacttgaggtcaggagtttgagaccagcctggccaacatggtgaaaccctgtctctataaaaaaatacaaaaattagccaggtgtagagacaggtgcctgtaatcccagctactcaggagattgaacctgggaggcggaggttgcagtgagccaagattgtgccattgcactccagcctgggtgacagagcaagcctccatctcaaaaaaaaagaaagaattttgtaagaatattcataggtactcaccgtttctcttaggtaaagagctaagagtggaattcctgggttatgggatagatatatgtttaacttggtaggaaattgctaatttttcaaagtgtttatatcattttacacctccattaggaaagtatgagtgatcatttctcatctcaccaacatttggtattgtcaggtgggtttttttttttcatttaattttggtgaattctaatttatctgttttttgttgttgttgttgctgttgttgctgctgctggtgtttttgatattgtatcttagaaattgttggctaatccaaagtcacgaagatttacacctgtgttttctcctaagcgttttatagctttatctcttacatttaggtgtatgacccctttgagttaacttttgtacatgatgtgaagaaatggtccaaactgattcttttgcatgtggatatccagatgtcccagcaccatttgttgtaaagactgttccttccttactgagttgctttgatccctttgtggaaaatcagctgaccataaatgtatggatttatttctggactctcaattctactgatgtatatgcctatccttatgcatagttttaattgtggtaatttgttgtagtcttaattgtggcaattcatcatagtcttaatttgcatttaattgtattttcctgatgactaataattgccctagaaagttccttcttacccgtgccagtcaatccctttctgcatccccattcccccagagctagccattgttttgattagtttccactgcaaatgagttttaacctgttttacaccattatataaaaggaatcacacagtgtacactttttagtgtggacttctttctctcagcatgtttttgagatttatccatttatggtgtatattatagtttgttgctttcagaagaaatttttaccacaaagattttcaaatttttctcaacttatttctttttatttaatttgtatatgaaaaattttagcctgttttttacatttctcatctaattgcaggttattttcaacttacaattataggtttgccaagttttggatctctaatgttttgcttatttctggtttttgtcaagcccatgcacttgacttctgctagtcccttgaaggctgtaccagagtcaagggccatcttcttccttttaaagctcacatacattgccatctttttattagctgacctaagtgtatatttatccaaacatctaatttattccagctttagatcttcttgcatctgagttattaaaatacacatttaatttacaatacctactagtatttatcaaaaatttactgaaattattcatggtatttggggggaaacactatctaaaaaggacccatgattgattatttgtttatttatttatttagtgcacttgattttgcagatgagtctggaagtgttagttgcaaagatatgcatttacttctctggctacaaaaaagaatagaaatgcacaaagcagagcagtgtgaagaagaagaggcgatgacccctagaccgaccaaagcccgtgctccactgcccagtgcctatgtcccaccactgtcgctgccaccctgcccgagagaaaggctgaaggggatgctaaaggagataaaaccaaggttaagtaggaactgcagagaagatccacaaggttgtctgctaaacctgctcctccaaagccacagccgaagcccagaaaggcctctgcaaagaagagagagaaggtacctacagagaagaagggaaaagctgatgctggcaaggaggggaataaccctgcagaaaatggagatgccaaaacagactaggcacagaaagctaaaggtgctggagatgccaagtgaagtgtgtgcatttttgataactgtgtacttctggtgactgtacagtttgaaatactattttttaatcaagttttataaaaatgcagattttgtttagcttttttttttttttttaagctatgttagtacacagaatacttcattgttgttttggggagaagggccatatgtcactaatagaaagcccctgaagctggactgatgtggggaaaacaccttttccttctggttttgagagacttcctcttgggtcccaggaagagggattccctgactttgatacacatggccaccttggtataaaagccttgtggtatggaaaaacaaattcgttttttatgtcctcttctctgtttctacctttcagaatggacttaaatcccttaaacccagacatcttctgggacctgacccccaataattggttaccagtgtgtcaggcaatctggactttgccctcaaaagagcagtggttcctgtttctaggttgtggatcttcagataaattctgtcattttcctttcacttcctgaaagccagggtcggttcatgaaaagctatgaaacagcatgctaaatgtgaaatgtcaaccctcactaaactttgccggttcagagcatcagatgaagact

SEQ ID NO: 6612 - DNA, 6000 bp, Homo sapiens
gggatgttccttgctgagaaaaagaattcagcgatatttctcccatttgcttttgaaagaagagaaatatggctctgttctgccgggctcactggtggtcagagtttaaggttagctctcttattccctgaacaattgctgttatcctgttcttttttcaaggtgcccagatttcatattgttcaaacacacatgctctacaatttgtgcagttaactcaattatcacatggtcctgaggcgacatacgtcctcctcggcttacgagatgacaggattaagagattaaagtaaagacaggcataggaaatcacaagaatattgattggggaagtgataagtgtccatgaaatcttcacaatttatgtttagagattgcagtaaagacaagcataagaaattataaaagtattaatttggggaactaataaatgtccatgaaatcttcacaatccacgttcttctgccatggcttcagtcggtccctccctttgggggtccctgacttcccgcaacagggaatgccactattcattttggaaggacaaagggcaattttaactagtgataggggttgaggtaaagaaaaaatgatcatctgctttgctgttttgatgcttctgttgtaacaaaaccaaaacatacaagagtaattggggaacaatttatacataagaaaactatttgatttcctaatacatgatttttaaaaatactgttttaaagctgttgaagtcttgtcattgttacagaagcacaggccagacttcttgcttctgtgcctctgtaacaatgacaagatttcaacagctttattggggtataattgacatataataaactgcacatatataaaatgtgtgatttggtaagttttgacaagtgtcttatgatgaaaacattgccataaacaaaacaccgaacatccccatcacaccaaagtttctttttgacccactgtaatcccttcaccctccttgcctcctctactcctaggggcccactcatctgctttctgtaactatacatgggcttccatttcctaggcttttatataaatgtgatcgttgagtacacactgtttttttggtctgcttgtttcacttactaattattttgagactcagctatgttaaggcatgtatcaatagttcatccccctgcctttttttttttttttgaggctttttttttaggagttttgctcttgttccccaggctggagtgcaatggtgcgatctcagctcactgcaagctccgcctcccgggttcccgctgttctcctgtctcagcctcccgagtagctgttactataggtgccgccaccaccacacccagctaatttttgtaattttagtagagacggggtttcaccgtgttagccgggatggtctcaatctcctaacctcgtgatccgcccatctcggcctcccaaagggctgggattacaggtgtgagccaccgcacccggcctgcaagtatttttatggatacatttctgttgagtaaatactcaggagtagaactgccaggtcatttggtcggtgtatgtttaactttttaagaaactgtcaaccaattttccaaggaaattgtcccattttacaattccaccagtagtgtatgagaaggagttagagttttaaaaccttaaaaatatctcatgacaactgcttgaacactcagagtatacaagatgtacaacatcacgggctggagaagtgatgtgggcatgtaagaagcctgcagcatattagcaaggtatatatagacttataaagacaatgcactgtgcagtgtcgggggaggtgtccggtgggaggtccaaataatgacagaaagctgattagatgaggtggagctccagctggcagaaaggagtgacaagcaaatttgttcgttaggttaaattaacatatcgacacctaagcattcctgttcatgtgaacaaaccactactttattactcatctgcctcctagagcagcagtccccaacccttttggtaccaaggactgatttcatagaagacaatttttccacagacgctggggaaggggggcgcggggaggatgttttcgggatgaaagtgtcccacctcagatcatcaggcattatttagattctcataaggagcgtgcaacctagatccctcgcatgcacaattcacaataaggttcgcactcttggggacctctgtcctagaggtatttgttggcatctgtatcagttagttattgctacataccaatctaccccaaaataagtggctcagacaatagtaatttatccttcctcatgtgtttatgggttaatggggcagttttggtcagtggctggtctcaatggtagtcagccagcatttacctaggtggatttgctgcttgccttgccccatgtggtcccctcctccagcaggctagtccaggcatcataatttagtctggaactgccacatgttcttggccaaagcccaaggccagtacagattcaggaaatagaggggagctgcaaagtcactgcaaaatgtgtgggaaattggagccatttttcatcaatctaccacatcacctgagaccaacttgtcaaccgtctttcaatattcaatggaattccttatctgagagtgtcaactagccaaaacatggctgagaccaaagaaagtaatagatcctctgagccagttctgagatgcaagtaataggtcctctgagccagttttaagatgattgctaggctcacggcagattaaaagctttaaaattagaagctgcatagtgacctaaaccaaaaccagagtggtcaggggctgtgtatacagtctagaacacaacagtccaataggattagagcctgaaaaggacaaatgatatttggtgttttgtttcaaaaagtgcataattcattttataaagatcctccccccacatgatttgaatttcatataatagtgtttttgtgtctagtcacaacctggaacaacattcctaagggactctacacctgcaaccaaggaatcattgatttactaggagatctaactctagctggctactctttgcttcttacaaatgagctctgtctttgactacttttgcagaaaccacgttggtggatcccaaggaatttctcctttccaggaggagccaaggcaggatagcctaacagttagtttcctatacatctcatgaaaaataaatctgcgctttgggaggctgaggcgggtgaatcacgaggtcaagagatcgagaccatcctggccaacatggtgaaaccctgtctctaataaaaatgcaaaaattggctgggtgtggtggctcacacctgtaatcccagcactttgggaggccgaggcgggcggatcacgaggtcaggagttcgaaaccagcctggccaacatggtgaaaccccatctctactaaaaatacaaaaattagctgggcgtggtggtgtgcacctgtaatcccagctactggggaggctgaggcaggagaatggcttcattgaacccaggaggcagaggttgcagtgagccgagatcgtgtcactgcgctccagcctgggtgacaagaaagactccgtcttaaaaaaaaaaaaaaattagccgggcgtggcggcgcgcgcctacagtcccagctattcgggaggctgaggcaggagaatcgcttgaaccggggaggcggagtttgcagtgagccgagatcgtgccactgcactccagtctggcgacagagcgagactctgtctcaaaatcaatcattcaatcaatctgctctcagtgtctcgaggcgggctttcaccaaacgtcaacctcacatctattccgcgaccgggtcagtaaggaagggcccagcggtcgtcgaactaccacagctatttcggccccgccccgtcccgcccccagctttggacccaccctttcccccgcttcttgccctcttgggagctctgttcccctttggcatcgcccggggacaccaattaaatgcagcttcacactgtgactgcccctgggaaccctcattttattttatttatttatttatttttgagaaggagtctcgctctgtcgcccaggtggagtgcagtggctgatctcggctcactgcaacctccgcctcccgagttcaagcgattcccctgcctcagcctctggagtagctgagattactggcgcgcaccaacacgtccagctaatttttgtatttttagtagagatgcggtttccccatgttggtcacgttggtctcgaactcctgacctcgtgatctgcccgcctcggcctcccaaagtgctgtgattacaggtgtgagccaccgcgcccggccggaaccctcatttattctatttttttttgagacggagtctcgctctgtcgcccaggctggagtgcagtggcgggatctccgatcactgcaagctccgcctcccgggttcgcgcccttctcctgcctcagtgtcccgagtagctgggactacaagcacccgccaccacgcccggctaattttttgtatttttagtaggggcggggtttcaccgtgttagccaggatggtctcgatctgctgacctcgggatccgcccgccttggtctcccaaagtgctgggattacaggcgtgagccacagcgccgggcccggaatcctcgttttaaataagggccacgccggagtttgattttgaactgatcggccaacgccacctggcagcatactgtactgcttaactacgcttccagcttcgtccctcgccaggtcccgcctggatcctgcgccccgcccccgtccccacactctacgcgccccgccctccgcgctcagccgactggggccttgtaaaggaaccggaacccggcgggagagagccccgggggcggggtgtacgtggtgcggcactgcgcgtgcgcgcgaggcctcttgcgtcatttagccgcgcctaggttttccggcgccggccctaggtcccggcagcggtggtgacggcggtgccggaggttgtccttggcaggttttcctcggcgcttctccatggaggaggcggtgcgaacggcttcagccccgaatgctcgcatctcccactggacggcgacgaaggcggtggccgtgcgagcgcaggactgggcggcctgtgtgggggtgtgagccgcggtgcccaaggctgcgccggcgaggggaagccgcgcggccggccggccgactagggtgaggtcgccactccttcctttcaggcaagcgcgaaggggctgacttggtggcgagccagcccgccttgtgtcggagaagggttcttcgggcaactttcctttccgggtgttctgaagcggttttcctgtaatcctcagtgaggaaacccaccgtgaatcggattgccgttcagtcccacggaagcctggctcgttggccatgtcggggacgcatgttcattaagttcattaaaataatttcatttgtcttggtgagttttagaaggtggcttcagctgctgcggggatcataactgacagttaaacaagccttagaagtctgctgtgacgttttgagcctgactgttttaatttccttttataaaatcacggaatcctatttccctctctatacaattgctcaaaactgtgtgtttagtttggtgtttgtgcctccttaatttcttttctaggttgttagttcatttaatacaggactgcatgttaagttctgtttctagaaatcctgtgtatagccatgtgcccggttaatactttttttagtaagaggaaatatcagagtcgagagtttccattccagtaagctgcctgtcgaagcagtagttgtgctcgattgagtaggttttatgttgattggttggcaaaatgagtatgaaggctagtaaccaaattataaaacgtacttagtaactttaagtcttttgcctacttctgtgttttcttctttctaggctggagctactcggccagggtttaagactttaaatgagaataaagggtggtatttacgaggaaatg

SEQ ID NO: 6613 - DNA, 6000 bp, Homo sapiens
gcggaggttgcagtgagctgagatcgcaccattgcactccagcctgggcaacagaatgaaactgtctcataaaacaaatataacatgaaatggtaacgtctttctttaaaaccaaagaaaatatgcaaggcggatgtcttcctgtcacttcgcacagtctactcccatagcgcctgagccccagaccccaaactcactgtcctgctcggggacccccagaccacagtgaacattacgggtaccccaagtactctcctatcctcacctcgctcctgcagtaaatggctaaatgaataactcagaagtgaagccaaaaagaaaaagaaaatgcacatggggaacaggagaggagagcagaggccacagtgtggaggcctgggctgatacactgcaaagagatctttggggctccgaagagatctttgaggctccaggtctcatgagtgggggccaggctccctagagaaacccttcttgtctagggctggggagcccaccagagtgacccaatcagttctcagggcctgtgatggggccacatggttttgagaagccggtgttcagctccatcctaaagagcactcatgcacgttggggaggagggccggggtgcacagctctgacctgagtcagacccacctcaggactgagcccagcagaaggaggcccagagtcactgaccataaaaggagcagatgccctcccccgtgttggttgagatgagtcttgggcattaactctaataatttctaactgcacccagaaatactgattcacacagcaactagtaaataatagccttttagagctaaaaaaaaaaaagccttgtatggtttattatgaattaacatatgcattttacacaaactagaggcaccgtggtgggccagcagcagcctgttaggggccacagcaaggagactggatttcctcaagtgcaatgggagttactggctaggctttaaggttttagccacaggaaagatgaatgtatttcagagcaacgtgggtggattcaaaatgaggtttagaactagatccattaaatttttttttttttttagacggagtctgactcttattgcccaggctggagtgcagtggtgctatctcggctcactgcaacctctgccacccaggttcaagggattctcctacctcagcctcccgagtagctgggattacaggcacctgccattgtgtctggctaatttttgtatttttagtagagacggggtttcaccatcttggccaggctggtcttcaactcctgacctcatgatccacccaccttggcctcccaaactgctgaattttttatctgaaaaatctcccaccgggcgcggtggctcacgcctgtaatcccagcactttgggaggccaaggcgggcacatcatgaggtcaggagatcgagaccatcctggcaaacgcagtgaaaccccatctctactaaaaacataaaaaattagccaggcatggtggcgggtgcttgtagtcccagctacttgggaggctgaggcaggagaatggcgtgaatccgggaggtggagcttgcagtgagccaagatcgcgccactgcactccagcctgggcaacagagcgagactccatctcaaaaaaaaaaaaaaagaaaagaaaagaaaagaaaaaaaagaaaaatctcccctctccaaaaatctcccggcatttctacagaagtctctacctaggtaaggagaagaaacaattcttggccgggtacagtggctcacgcctgtaatcccagcactttgggaggccgaagctggtggatcacgaagtcagtagttcaagaccagcctggccgagatggtgaaaccctgtctctactaaaaatacaaaaaaattcgccaggcgtggtggcaggcgtctgtaatcccagctacttgggaggctgaagcagagaattggttgaacccatgaagcgtaggttgcagtgagccaagatcacgccactgcactccagcctgggtgacagagcaagactccatctcaaaacataagacgaaaaaaaaattttttagggagctgaaaagtgaactgatttcctcatttctccttgcaaggaatcaattgatagcccaaaattgaaacccagagttaaaataaacgtaactcccaccctcttagtgtttctcacttttttttttttttttttgagacagggtctcacttctgttgcccaggctggagtgcagtggcgtgatcatggctcactgtagcctcaacttctggggtcaagtgatcctcccatagcctcctgagtagctgggactacaagcacatgtcaccatgcctggctaatttttgtatttttttgcagagatggggtttcatcatgttgcccaggctgatctcaaactcctgggctcaagtgatctgctggccttggcctcccaaagtactgggattataggcatgagccactgtacctggcctactaactttaattttaggtgtatcttttaggaagtaatatctcatggcaaaataatgtttgtcattcagtagttactgtagtttcatttcagtttttcttttgttaaattcaagcaaaatatagttttatgtttttaattaaaatcccatatgtgtttccccatcagataaaatatgcctgtcatttaacctatgtactcacatggaaaaatgtctggggtggagttcttttttttttctttttttttttgagacggagtctcactccgtcgcccaggctggagtgcagtggtgccatctcggctcactgcaagctccgcctcccgggttcacgccattctcctgcctcagcctcctgagtagctgggactacaggcgccctccaccatgcccggctaattttttgtatttttagtagagaccgggtttcatcgtgttagctaggatggtctcgatctcttgacctcctgatccatccacctgacctccggatccgtccgcctccgcctcccaaagtgctgggattacagtcatgagccacctccccggccctattttatatttcttcacaaaataataatgctgtatgcaaagctgccaaaaggtttatacttttcgtttgtttttgagacaatcttgctctgttgcccaggctggagtgcagtggtgcaataacagctcactgcaacctccacctcaagccatcctcccacctctgcctccagagtatctggggttggaggtaaaagccaccacgccccgctaattaatttttttctttttttggtagagacgggtctcgctacgttgcccaggctggtcttgaacgtctgagctcaagcgagcctcccacctcggtccccaaagtgctgggattataggtgtgagccactgtgcccagcttgtagcatcgtttatagacaacaaaacctggcagcaaccggccaggcgcggtggttcacgcctgtaatcccagcactttgggaggtagagcggacggatcacctgaggtcaggagttcaagaccagccttgccaagatggtgaaaccgcgtctctactcaaaatacaaaaattaacccgggcgtggtggcggacgcctgtaattctagatactcggaggctgaggccgagaatcgcttgaatccgggaggcggaaggttgcagtgagccgagatcgcgccattgcactccagcctgggcgacagagcgagactctgtctcaaaaaaacaaaccaacctggtagctacctaacacccaacaatggctgaatggttagacaaattattatactgtcattagaataatcatatttatgtaccgatacagaaactgatatatattaaataaaaaggaaatttcgtatattgtaattggaaacatgtaaaagtatgtatacattatgggaaaacacctaaaatactaataattaggtgagggttgtggaattgagtcactttaaaaaatatttttttccaaaaaaaataaaataactttttcctatttttcaagcttgtaattttgttgttgtttctttttttttttttttttgagacggagtctcgctctgtcgcccaggctcgagtgcagttgtgtgatctccgctcactgcaagctctgcctcccgggttcacacccttctcctggctcagcctcccgagtagctgggactacaggcctccgccacgacgcccagctaattttttgtatttttagtagagacggggtttcactgtgttagccaggatggtctcgatctcctgaccttgtgatccacccgcctcggcctcccgaagtgctgggattacaggcgtgagccaccgcgcccggcttgttgtagtttattaaaacgaggaaactagactatgggatcacaagcccagagccccatgtagctgactctagcgccaagggcggaagagaaacgcccagcgccagggctctccttcgatctctgcagcggcgcgccgggcttcgcgctccggtgagttgggccggcctccgctggaggctcttcggggaccgctgcccgccggtgcgtcctgccgcgctccgctgcccggatattgcagaggacaccactcagaaagtatgcgtgtttctccgcgctggaaacttaaccaggagtcctgcatttccatttgcgaaatccgggaacccccgccccacccagcgcctcaccggcccctcactgccgccgcgtccggcgccactgctgtccccgcagcctaaggcgccggtccctggcacccccgtcccgcccccgcccctcttcctgctcctcccccacccgtccccctcccctcccccgcccgcgcctcccggtcaccccccatcccgccccgcggggcgcggcgcgcaggcgcaggctcggagggcgggcgcgggcggaatggggactgcagctgcggcagcggcggcggcggcggcggcggcggccggggagggggcgcgtagcccgagccccgccgccgtgtcgctcggcctgggcgtggccgtcgtgtcgagcctggtgaacgggtccacgttcgtgctacagaagaagggcatcgtgcgtgccaagcggcgaggtagggcgggcggcaggcggcaggcggcgggcgggtgggggaggcgggcggcggagaaggcggtcgcaggtgggggcgcccgggtcggggcaggggacggggtcggggcccgggcccaggttgggggaaggctgcgcgggcgggtgctccccgcggcgtgcccaggctgccgccgcgtcctggcgctcgggcccgggagcggcccaggaatcacaggtgcgtcctgagcgtccggcgcttcgccgacgccacggcttttctccgttctcagcggctggagcggcttgctttggtgtgcgggcttccccggctgactttttccctcggtccaagacctgccccgcgccgcccggcagccctcgccgtggcccgcaacccgcggccgggagcctcctgcggacgcggtgctggggtgctcgagcccagcgcccgcctggaagcgccgcttcagccgatgcgcggcccgctcctagggtacgctcggtagagcaagacctgggatttccagtcccccgcaggggcctcgctggtgcaaaaggaagacccgggcgggctctcagggctgtgcgttcctggggtgctcttacggagcccgctgcgccttagacctgcaccaaatgaatacaagtgatcttcagtttggagaacacgcgcggcagatccaaaaccaagccctggacgggccaaggccacttcccaggtggatgtgccgcagcaccgcactccgtagtgctctgcggggtagagctctctgtcagtgtcgtttgtgctgggaggccccggacgggaccggtttgccaatgcaggatatggcaggctgtgaaacagtccgtttccattgcttccagagggactgagaaagtcttgtggttcttggccatactcttagaagaagaatattaagagctctctgggaaggatgtggcccccgactcttgggttgtgagagaaagtgaactcgtaatttacatg

SEQ ID NO: 6614 - DNA, 6000 bp, Homo sapiens
cctcccaaagtgctgggattacaggcatgagtcactgtgcccggccagaattttgtatttttaggattatgtacataatcatagatttagcttactcaatcattagtcaattacttttgtccaaaatttcacagctctgtattttggaagtttttggatgatgctgaggccatattaattaataggtagcatctgtgcctggtttttcatattacaaatttcagaatctggctggacccaggtgggaggattgcttgagcccaggagtttgaggccaccctgggcaacatagggggaccctgtctctttctaaaaattaaaaataaaaatagtttatttatttttgagatgaagtcttgctctgtcacccaggagtgcagtggcacaatctcggctcactgcaacctccacctcccaggttcaagcaattctccttccttgacctcccaagtggctggaattacaggtgtgcatcaccatgcccagctaatttttgcatttttagtagagacgagatttcaccatgttgtctaggctggtcttgaactcctaacctcaagtgatcctgcccacctcgtatcctaaagtgctgggattacaggaatgaaccaccacgcccagccaaaaattaaaaatatttaaaataaaaattttaaaaatgtcagaatctgttatgcctatttgtaagggcagtcactagagtaaatattaaacaatgctgtcaggttaaaatgttttagactgtgattcttacttattccataattatttatttcaccagccattagaggtactgattcttggtatctgaaaactggaaacaatcttgatgattgtctcattcaattctctatacttcttagttggaaagtaacacccagagtctctttttatgccctgtgtgcatctcgcgcatctaggtgcgatctcatcacatagctctaacccccaggtgtctcccagcatcccccacagctgtgtcaccagtgtggacctttgctgtcatgtccggtcttcgatacgccactgcccacttgccatctcacacttaacatggcttatgctgagcttgcattttctccttaaaccacttcatttatttttctcactgaaacatccaacctgttggccagtcacattagctctgcctggaagacgtacttccaatttgtccatgtctgtctatccaatgccaggtgtaagccacctcttaatttacacctctcctgctccaactctgctcggaatcaattttctatctattaaaagagcatataagatcttctcatctcacgcctctctgcttggggcagcccatggctccctattgcagttggagcaaatccagagacttgtcctttccaaaggctagtgaagccctaaatgctggccactctgctgctcctcatggctaccctctcctgcatccagacctgctcttgaccccagactgacatcaccactgccagcacgactcctgctcctgagggctggtgggcacctccagttctgcctcatcttctgtcttcccaactcactagatgaaacttgggtttttagctgttgggccaccctcacctcctctcttgcacatcccacaaccattccaacagcatgtcccgcatgctctgaggaggctatgtcccacatccaccatggccacccagcctgagccacagcacctttgcaggatcactgcagtggccgctcgccacgacgtctcccttcttctgccctggccctctacattctatttacattgcagcaggagtgatctctggaaacctcggtaaagccacttgatgccacttctcaaaatcctcccaagctttccctctcgctcaaaagccaaaatcctcaccgggatccacaaggccccacatgacctcactctcggccacgtctccaatctcccactcagctccagctaccccggcttccttgctgggcctgaaatccctgaacgctccctatcccgccccgtgcttaccatttcttccctaggtgcctgcacagcttgtgtccctaggcctccgctcagtgttgcttgagaagcctccttggaccgcccaattgacaggagcaagagcaggatcccacccctcccagccctggtttcaggtgtcccttcattttctgagccatctttgttgggattcccacgtgaggacttagtgttccggggagcagaaacttactgtgtttcccaggtgtccccattgcctaaagcagaagctgtggggttgaaggttttagaatgagtgtgaggcagaagccccacctgtttcttaaacacattgagatttctccttctttgggaccttttgacagagctgccccctctgtctggaagcctcttccacctgatcttgtcccattcaggtttcaactccagtgcctctcttcgaaaaggccatccctcatcccttccaaagccctccgtgggctctcatggtttttcgttcagttgctgcagctccatgacaacatcttgtcctctctagctctccgatgaattcctgtgcctggaacattgccgggcatacagcaggggatgagtaagtatttgccgaacaaggacacttacagtggttctcatggcctatagcaggcccttgttagagccctgtggtgcagatggccaacccagagttgaccagaccacatcagagcctcatcctcgccccagcaggccagggtctcagagtccagctggcagaagacacctgagctcaaaacccctccacgattccccagatcacacagcttggagacctttccagaggtgagctgagctaggccttcctggaaatcctgactttgcactggggaagagcaggtggaaaaagattccagacttgaggagcattgtgactcacagaatcttggaaccttagagcggaatgtggatgggatgagtaaggactgttctgagaaggataaggagacctctcaccttggggctgggcctgaaccagggaggggctgaagaaaatcagcaagctggttcccctcagggcctcaagggacctctgcctgaggaatcagcatttggctttgtaagcaccaggagtactcctggaagctccagggtaagcaaatggaatgaggcggtaattactttggcaacagtgtggactggctgaagctgggagtctggtaggcgcggacacccctggagactttgggcgaagggtccacggggatgcctgtgaagacaggaggccgaagtgtagggaggccgaaggcctcgggggtcaccaggtgggctggtagaggaaaacacggagccatgggatgtgaggcctcaagactgcaggcgctgtgggccttcatttgcagttgatgctccgtttgggtttctgctggttgactgtgagacctgactcctttccccaacaatgcagacttcagccaaacctttccctgatctgggcctctacatgtcaaaagcccacccctgtgactgggggatgggattattttcttcacacctgtcaccactctaccttctaacactgggttctgggcaacattgtggatggtggcaaaactgggcagagatgtaagaatgtcataactggagccgggtaagccagggtgctggaggggagggcctccccaagccagggtcctggcgaagacgtgatttgagtccatccagggcagtgccttgttagcaggcacccccaggaagagcctggggccacggccaaccgcccagccacggcctcctgggcaagaaataactgcttctcatctctgtacttcttgagtgggaggcaaacagtcacagccatgaaacatctgtggggtctcactgcggacgtgggggactcccagctcctttttccatgccgtgcttattctcccaccccttctcggatgccccatgatgtggaggggagcccttcgccccacacttctgggacaccctcctgacgctcccctctcctccccacaaccatcctcgcctccccacaaccatcctcgcctcccccgccgtccgggccatgacagccacctcagagctacagcgcacaaggagcgtttcggtcctcatgatttcccagggagggaaacagacactcaaatacctgcaaaccaaattctgtctttgctatagcgatatatttctcctttccatgaagaaagaacagaaaaaagaaaaagaatttatttaggagaggaaggaaaggcagtaatgatgatggtggaaaggaaacggtctagttcgcccaacaacggaatctgaaagtggtgggggctgggaagtggggtaggaaagaagttcttagaggcaacgcggaatcgcccttcccagggctccccaggagcagaggtcctgcgtaaaaaagacttaaaaattggagcactggatgccatggatcctttggattttgattccagttgatccctggagtaaggtcctaaccggggtctcccgaggtcgtttcgccgtccaggatggagcaggtctggcccctggaagggcgcgcgggctgcttggggacgggggcgccttttctcgcgcttcgcggtttcctctctcctactgcaggcagcgcgcgtttgcagcgttttgggaccgaactgatgcttctgggaaacgaaactaaacctctctgaagtttccagctcgggctttttttgtttcccgctatccggcgtggcccagtccgggcgcggaacgagggcggggccgtggccaccgcggcggaaacgacccgggccgggggcgggcggcgaggacaagggggctctgtgcggcacccgcccagcttgcgccctggggactgcggccgggcggcggggctggacgggagtggacggggctgggcgcgggctgggcgcgctgggccggccaggcggcgcgctgaccgcggtctccgtgcgtcccgcaggcggggagctcgcaccgccgcgcccgggccgcgagtgatgataacctaagaggccggcgcgggcgggcgtgagcggcggaggagccgggcgcggcgacacgcggccatggagcgggagccggcggggaccgaggagcccgggcctccgggacggcggaggcgccgagagggcaggacgcgcacggtgcgctccaacctgctgccgcccccgggcgccgaggaccctgcggctggcgcggccaagggcgagcggcgacggcggcgcgggtgtgcccagcacctggccgacaaccggctcaagactaccaagtacacgctgctgtccttcctgcccaagaacctgttcgagcagttccaccgcccggccaacgtgtactttgtcttcatcgcgctgctcaacttcgtgccggcggtgaacgccttccagcccggcctggcactggcgccggtgctcttcatcctggccatcacggccttcagggacctgtgggaggactacagccgccaccgctccgaccacaagatcaaccacctgggctgcctggtcttcagcaggtgagttgggcgggcgggcgagcgagcgcgcggtggcgcagggcagggcgccccgggaacttggtgttgggcacagtgattggcaggggctgggtgcttagaaggcagctccactcagggtggagggcccggctgcgcgggacccggtgccgaccgaagccacagcgccgccaaggcctctctgtgcctccgccgcagctaaaggggcgccctggatgcggggacgcgtggggatcccctgtcactccgtgtcggggccagaatgatcccaaggctagaaaccgacggccgctggacatcctcatccacagccgctcccacctgaagtgaaaggcaggaaaagccagcctggccccctggcctgaagtccctgcctcagtcttcggccaggcacagtggtctctgaacagccggcacaggacagtaaagctcagtctgctaacagctcggctcaggacagcagcaaagtgaaactgccgccaagtgctgatatgtctggcacggcccaggtaccagggcaggggaaataacagcagtgtcc

SEQ ID NO: 6615 - DNA, 6000 bp, Homo sapiens
cctccagccaggcagccaccagacagaaagtgacactgcccgtttggggcttttgtgcactcaagatgctgtgggtatgcatacttaaaccccacaccttgcttggatccctttcagcagtggcagtggagcagagtgggagaggaccagcaggggtatcaagagctgtgggagcgggcagcccagataccctcctaggaggcgacaggaccctgtgagagcagaggccccagtccccagtgtgtgcctcattttcccattgaccttcacttacaaaacacacatccaaaacgaaagtccttacaattcaagacagcaaccacattaaaccccaactgcaagcccttctgccctagggtcttgtatacctgcagtagtgcacaccttggtaggtagcctggggagccctgactgtgtttaagatgggaaacactagaagacgcttgaattctcagaggtagaattcattagctaaggacaggatgaagatgatacagaaagaggacacagctgagagggtcagccccccaagatggaattcataacccttggggggaagatggagaggaaaagcggatgcccagggtagacttgtcagtgttttggcaggaagggaagggagtttctattccttaatgtctgttttctctatggattatgagatgagatgttttgcctgggctggggagggagtcttaaaggaatcataggaaagtgtagatcagagtggagaagctgtgaagaatggaggacaaaccgctaagggatgagccagaggcctgtatgccagcctgcctggattccagtcatggatttatggagcttccgacctgcctggttgtgcaatatttgggaccctgaaaaaagaaaactccaccttagccccagtcagaggtaagggtagccccataggaggaattctttcgaggaataactttctgtatactgaattgaatttaaaaagacttgttttttagtgtttatgtcttctttttaaaaaaaaaaaaatgaaatggtgttggtaatagctttctttttgtatttctaaactgtggtaatatgtacataatataaaatttgccattttaattatctttacatatacagtttataatgtttgttttaaaatgtttttactttataagattaaaaagttggtactcctatattgcacctctaagatcgttttaaaatttttactggtctatgaaatttagaaacattatgagccttaaaagaatctttcccccatttaacattgttacatgactttattggcagaggaaaattctgtaacaatttgtagaatctttaatggtatggcataggagtggaatcaggattacttttggttgttataacatcttgataaagtgcttctccttctaatattttgtatatattctcttctctgacattatcgagattgtctaatgcttcactaccgtaaataaatacttcctctttgtcaagcgtaaactcacagttcatataaaaataacataaatatgctttcctaaggatcttttttgcaattaaaaccatacatatacatatatacaaattaggtgtggatatagttgttcatttggtcaaggctgttttattaagtagttctatctaaaatgtgtaaagattttgcacacataatgcttttttcattctgagccgcagacaccaaaaatcccacaggaagttgtcttttaagtgttgtggttttttagtttcctgttcagttgcagagatgatcagaaataagataaatctgtacaatcgaaagagatttgtggttaaacattatagtaactctaaatgagaatccttaattaacttgtatttcttcccatattgatctagaggagctatgatgacatgcgtgtgtaagcataaaagtcagaaaatacttttttggtgttccatggataaactctttaattgttaaatgggtgattctttcagattattctttatactttccacttgttgtcaaagcacctacctaaaaaataaactgcaggaataaagctttgtttttaattgttggcaacagttttacctttattttacagatgataaaagccttctcttgtttatttaaagaacagactttatgaagtttaatttagatattaaaaataccactgaaaaattttaaagtgatactattagtcactgaaatactaaatataatttttaaagaataatattttcaagatgaaatatttttgtttgatttcattttttaaaccatggcaaagataaaactgttaaatatataactatttttaattagtgacaaatagttgcaatctagcatttaaattacacattgggcaacttgtaaaagtgacaaataaggaaaagtgaaaaatgtcagtgcatttgtagatagtgtctctagatttaggtgctattaaagacaccacacctagttctaggcagcttatgcaattgcacatcttcttaaatggtaaagataatgtgaaaggtctttcatcaccaccttttaaaattaaaaaatacttcccaaacctttttaaatggtgtttgcatatgaagaaatttaatcacaattttttttttttaatggggtctcactgtttcccaggctggtctcaaactcctggcctcaaagaatcctctggtcttggcctcccaaagtgctgggatgatgatgatgatgatgatgatgatgatgatgatttgagacggagtttcgctcttgttgcccaggctggagtgcaatggcatgatctcagctcattgcaacctccgcctctcgggttcaagcgattctcctgcctcagcctcctgaatagctggcattactggcgtctgtcaccatgcccggctactttcctatttttagtagagatggggtttcaccatgtcggccaggctggtttcgaactcctgacctcaagtgatctgcctgccttggcctctcaagtgctgggattacaggcttgagccactgcgcacggccccaagtgctgggattataaacgtgagcaactacgcctggccaccattttttttttttttttttttttttttttttttttttgagacagagtcttgctggttgcccaggctggagtacagtggcacgatctggactcactgcaacctccgcctcctgggttcaagtgattcttctgcctcagcctcccgagtagctgggactacaggcacgcgccacaccaggctaatttttgtatttttaataaagacggagtttcaccatattggccaggctggtctcaaactcctgacctcgtgatccgctcgcctcggcctcccaaagtgctgggattacaggcgtgagccaccacgcctggcccacaattcttaaaagaataaataatactttgtccaaaagcaaaacaattacaacatgactttaaaacaaaaatgacttcaaccatttttatgaagaacaaaaaggaataagggtttggtttgcagaaggctcttttctggttcagacagctttgggttgcaagatgtgtggcacttcgaagccttaattgatacttatgtatcacctacacatacttctttgttaaatttgttcttttcatacagttgaattctaaagagaaaaccattgtctaaagcctgatgtttatgatttcttccatttcttctgtgccggttgtggcactataccagatactttaaagatgttatcattgatgttactaaggatttctggcattttttgaagacctttacatttacaagtgtagattagtgagtctaggattggtttcttaccatgttccttggtgtttagcaaagccgtcaacattgtgggaagtttgtgtagtggctgattaaactggaccatggactgcacgtgtttacacccttttctgcccaactttgagttggagggacagcattggaatgcagggcagcttgacccgttcggtcaacaagaatttcagcaatcttgatggccaaaaataaacttttcaagattcctgtctagatgggcgggaaagagactttggatatatcttgaggtctaatgtggggtgtgggccgagatgtcacaggtctctagggtgtttctcaggctgctgcctccgggtgcccatgacctcatcaccagtttcagccttggcagtcggcgccggtgaacgagagcaacgcttctgaccctgccggagctcctcggagatgaaagccatgacgcgccttgcagaaaatgcattccgccttccgtgggaacaacgccgaggcacgcggtgacagccgtgaccatgctgtttgcccagtgaaggaaacaactgtcgggtatcggctctgccggcctttccagccgcactcatgcatggggctcaccccatgatgtgcgtggcttgtcgaggagcaagtggacaagtctcttaaggaaagctttggtgcacaggcgctttctccttgggggcgaattctgccagaccttggataaaaacaaacaggaagactcgcacggcagcggaaactgtcttccaagttacttgggttacccggcttttccttccgcgcttggggtcgggaccccggccgctcgtcccgccccctcccccgccgcggccccgccccctccccgcctcgcctcgcctcgcctcgtccagccccgcccccgccgggccgggcatgctcagtgggccgggccggcaggtttgcgtggccgctgagttgccggcgccggctgagccagcggacgccgcgttccttggcggccgccggttcccgggaagttacgtggcgaagccggcttccgaggagacgccgggaggccacgggtgctgctgacgggcgggcgaccgggcgaggccgacgtggccgggctgcgaaagctgcgggaggccgagtgggtggccgcgctcggagggaggtgccggtcgggcgcgccccgtggagaagacccgggcggggcgggcgcttcccggacttttgtccgagttgaattccctccccctgggccgggcccttccggccgcccccgcccgtgccccgctcgctctcgggagatgtttatttgggctgtggcgtgaggagcgggcgggccagcgccgcggagtttcgggtccgaggagcctcgcgcggcgctggagagagacaagatgtccgccagagctgcggccgccaaggtgagcgcctccgcggccgccagggccagaccgggccgaccgtcgccgcccgcccaccggcatctggcccgcgtcccgccctccctcgctggcggctgtctgggccccggggcggcggggtgggcagggctggcgcggggccgcgggccgcgggccgcgggccgcggggagcccctcgggcgggggcggcgcgggccgcactgggggcggccggggagggggctgcgggcgcccggccgccgtactgggcaggtgcatagctgccggcgcctgtgcctggctgcggctcgctgagggcggggacacgcaacaggtccctcgcggagaaactcggctccagtgagggttcgggggctggaagccggctctcagcgggtcggggcttggggtgccacctcctgctggccgggagctgctgtctttggaggagtggttggtccccggcgaaaccctgtagtttcgatctgatgtcactccctgcggtatgcgcacgccagcgataaggctttgagactgcaaaacactccactcagcctgtgaggcgtagtaggtcgggttttctttcatgctgtattacttatttaaggtaactttgaaaataacctctttaacatttaataatttaacttgaattaaactttcacaagtaatacaaagtattcctacgaatggacaataagatgagcacttaaaaattagtaaaggccggtgagttcagccgaaaaaagtaacgtttttcctgttacttttcctatgtgctctgaaatattattgcattttcccattgctttgaaactaacttgtgtattacattaaaaagccaaagttcctgaaaaacagctaggatgctcct

SEQ ID NO: 6616 - DNA, 6000 bp, Homo sapiens; identical to SEQ ID NO: 1835

SEQ ID NO: 6617 - DNA, 6000 bp, Homo sapiens
atagcactgacttcaaagaaatctctttgtgcaggtttaatgagcccccctgggaagctcctgatgtgaatgggaatcacgacttgatataaaagtgaaagattatgtgtcagcaggaatgatttgattcttaatgcagtgttaatttatttgctgtgatttcacacatctgctttggccacaataccatattacattaatccctgagatattattacacataggtatattctctatatacgaggtagtcggggaatgggggaatttgtatatgtaatttttttaaaggctatatactcttttattcaaagaactagcaggcagaagactttagatttccttaccatttggatacataatctcttgggcctaagacatgatttggcatttgggtccatgagatggcaaaataattttgaagatagcagattctggagaatcttagaccacaaagcaagccactatatttagggctacttaagattggtacatcggacagctttactctctttggaaacattacttcataaattttgtctgaacagcaaaatcaagtgttttcctaaacatttgaactgaggcttatacatagggaaggacacatgaaagaaaaaaagagaaaaaccactttgcagcaaataaaaatagattccatctgccacttaggttcttttgagtctcccaagacaggttggggttgccccttaagaagacaagttgatggtttcattaggaaacagatgcacgtaggccactgggagagataaagctcagttaatcctagctatttgtgaatgaaatgtaggagagttcaacacagagatcaattccaaatcgaatgcagtccctcccatgccacacaaatttcaggaggctacagatgctggtccttcccaatccaggactgagctcagctagctggggttgcctctctgatgctgcagcccaagccttacctgctcagctgcattcccccggtcagttcagcgggtgtctggactgcagtattgagagaataatggaagtgagggcagggggctggtggttagtaagaaggctttctactgaggggtccaggctatcctaagtgtgtaggaactttcacttcgcaaagggagcccctttctcctttctgacttgaatattacttgtgattgtggaggacacccaggacccacttctcctcaggaaaagtgcagttctgctaggctgaggggaatagagagccagaatagctgaccttcactttcaacaaatgcttgagtttaaagacgctatgaaaagaaccatgacatatgagcatgctctctgatctctaggaatttacagtccagtagaatagaggtcagtagattaatgttcattcttacaacatatacaaagctcctatgaggtttcatttacaaaacatttgaagctgcaaggctgaaaggttcacctgggagtctgtggttgagaagagaatgaaattttgagcacatataaggataagaacaaattcagacacccctatgtagtaaatggaatcattgttagtagctctacattctctcctgtattataacattcaacaacaccctttgctccatgcctttgcagtttttcccactagatgtggataatatttccctgctctgttaatggaaaatactatttggtaagacatagatttgcagatcaacaatctaggtatttttttcctctaaatgtctggaggtgagcatgttcccactttaattccccttttcttcttcaaatatcacatttttttcatacttttaaataattttgatcttctctaggattctgaataccacattcttcatagcttttcctttgctacccatatgattttaggcaagctagctaagctttgggtcagttttaacactatgaaacaaatggatgatagatttcctcatccctaggattcactcctgccctaatagtcatggaactaaaagttctcaggtttttattgttattggagctgtggatgagaacccgttaataacacagctacctcaatcttgtttccatagatttcaatttagcagaattgggatgggatcgcagcatctgtctttttaatgaagatccccagacagtctgttgtgcagcaaaggttattctatgagcattctacgaatttcattgtttctcatccaaaactattattttaataaacagaatggcttttaaataagatgtaatggaaagaacttcccagctgccttaaacgggggttttcaatcagaggagagttgagataatcagaatctatcaagaagatacaatgccctgaggaaactgagagatgcccggatccacagagaaccatttcacatttaatgcacatttgtttatcggaacaaattattaattgaaaatggagttgactggacttgaaggaggaagtacaatgtagtaagtgtgaaatttatgagtggttattaaaaataaaaatggttatttctgaagtgtggtggtgagactaagatttttatttaaaagtagcctacacagtccaactgatgagttttaaaatataggttctatatatatgcgtctttgtgcacttatacacctatgttgtttgcacatgtttatatgtggaatctatatggcatattaaagtatatttcaaaataatacacaaatgatcaacaattcagtcatagcgtagtgtctgataattgcatttcctgcagtctatgttcttaggatcataatctttaacggtttgggaaagccaacacataaaatgacaattttgagttgtgcagcctattttgggacatttaaagatgttaaacagatttccctttggacttactcattcacttcttggctaagatcatttactataagagagtctgccagacaaggagggaatacagggacctagggccaaggggagtagaagggaaacctgggaaaacacaccaagtttgggttaggggatcaccattccatctggaagctaactggataatagggtatccattcgtcctcacccttgaacctcctccgtgttcagaaggaaactaataaatcactttatccctctctccattgttagtggactcttttactcctttgcagtgaaaggctgctttcttggggtaaagatgtcaaccctagcagaggatttcagtgatctttctggcggcgaagcttagaccgtgtgtttaaacatcattttatgaagaagtacactgtgagtggactgagggccatgccctgcacctttcttcccagtccctgggccaccaactacccaaccacctcggttgttccagaagtgaaggctcaccatggtgtggcttatgtaatatacatatgtgctatgatccctgtggataattaaggctaggtccctttatatgcctaggacaagttagcaaccctttcaaggtcgtgttttcgaaaggatgacaattactttcccattggacttttggtacatttacatcaaacactgccagctacagtgtctcctaatactgacccctgggctaattagcagcttagtgaggttgtttcaatttttcagcaaccaattaagtagttgctctagacagaactgacaacacaatgtgaattttaaaaaccgggatctgctggttgaggggagaaagccaaacccagtaaggcaagtgggggcagggcgaggctgtgagtggctctgtttctgctagcagaatactgggtcttaaattcagattaaatcacagtttacctgacgagtaccccgcccccccttcccattagtaaaataatagcaataatttaaaaagagccgagcatctgggttagtgcaaggggaagcgagacctttaaccatggccaccccacttgctctttgcgaggcacctgttagatgcgctcgtgtgccctgacccctataccgagagacagctccacacctgcatttacccttcagcctaaatggattcccatcaagcctttctcacttcactgtcggatccacagaggcaccgaaccgcagccactctgcagaagcactctcagccactctgtcccctaagggagatttaaaagtggtcgcccccactcgccctccctcagccagcatctccatctagggaaggaatttcagttgtctccaggaggcaaaaagcgaaaaggtgagggatgcaccgagagaagagaagatacctactcactcccctccccactcacccacgcgtccgctcccggctccccctccgcctgcttgggtctggcggtcaggtgaggttacctgggctccccgagaagccccgaggggcgctgcagtccttcctttcgaaatcgccccgctccccgccgggcctccaggactcttgcccctctccccccgcgcgcgtccccggcccctcgggctccgacgcgcagcgacagccgcacggcgcgctctgctcccctccgccgacctggcgtgacgcaggcggagactacttaagggcggattagaggcggcggccgcggatccccgagcccagcattcggctccgcgcgctcggccctggcctcgcaggctgccgcgccggagcgccaggtgcccgctgaagtagcaggaacagagccggtgttcggaccctcccctggcccccaacctgcggcggagagcggcgctgagacttctcctgggcgggcgagcgctggaggacctgcaggctgccaccccgccccgcccctcgtcccggcgtccgcgggatccagacccgaaccccggacggcgcccgaggttcgtgccctctctctagaccgcgccaactgccccatcggtcgggacgcgcttggatttctttccccatttcttctcttttaagtacaataaaaggaaagggggattcgaggattttttaaaaaattgcttctttaattgggaggcaattcactcccattctggaagtgcggcccggggaggggccaggagcgggaacgtgcccggtgctgcccagtctttgtctgctgcctccggatgcacagcgatgggggaatggaccatcttggagaggctgctagaagccgcggtgcagcagcactccactatgatcgggaggtaagggcgccaagccggcggtcagggggccccgtcgggcggcccccgggagtcccttctcacacctggactgagtctcccgctccaatccccagtccgtcctctgcctcctccccatcgtcctaggtcaaggctccggtgttcccggcgatgagggattacccgacgccccgcgatgcccccctcctctagctactcctaaccagctgcccatcccttccccatcaagcaccactggggcttcactcttcccacatcagaaaaggagccgctggctcagtcttggtccctccactctccagagtcagagccaatctccatttggttccctaaatagaatctacaaagaaggcaggattgcatttggacagaaaagggcaaatggggagatggatttgctcttcagagcagatgcctcttttctcaacaaataattactaaaccaaacttatttggcggtgtaaacttaccgagcctacacacccaattgccatttttgggtctgtatctatatctatgtctctatctacctagctttatatatatatgagttcaatatatatgaatatatattcatagccatctgcttatataaagcattaaatttaatattcatgttgagaataaactaaatatacacatggagtagttatttacacaccctgtgtgtagacctcgaagcatgcaccatctgtaaaggtattctgtgtgcatttgccatatccagagtgaaggtgtgttttgtgtttctatacattctatatagagagatgaaatctatctgttgcaagtagactatgtccagtgtatggagatgtgtgtacctgggatctctataatatgaaatattcccagcctaccagcactcagcagaaaaggaagagacaaaaagctttcccagattcctagttcagtaccagcccgggatg

SEQ ID NO: 6618 - DNA, 6000 bp, Homo sapiens
acagagtctcgctctgttgctcaggctagagtgcagtggcctgatgatcttggttcactgcaacctctagctcccaggttcaagcgattctcctgcctcaacctcctgagtagctgggattacaggcacacagcaccatgcctggctaatttttttttttttttgagacggagtcttgctctgttgcccaggctggagtgcagtggcgcgctcggctcactgcaacctccgcccctgggttcaagcgactcccctgcttcagcctcccaagtagctgggactacaagcacccaccaccatgtccagctaatttttgtattttcggtagagatggggtttcaccatgttggccaggctggtcttgaattcctaatttcgtgtgatccgcctgcctcagcctcccaagtgctgagattacaggcgtggcccactacacatggccaatttcatgctttttaatggctgcttctcagttcccagttttccccaacatctgctctgtagtctttaaccctgatccttgtgctagaaggacagatgtttgtctaggacctgatctctgccctcatgatttggtttcatgtgatcgttatccacacaccttatgtatgtatatacattcctaccctccccctcagcacgtcatttcccctgtcacagttgcctgtgtccctggagtgttacacagtgcctcctgaagacaacctggccctccttcagctctacttccggaccctggttactggtgcgctccgcccacgttggtgccccgtgctctatgctgtggctgtggctcatgtcaatagcttcatcttctctcaggacccacagagctcagtaagttacatctccatcttcagaggaaggaagggagctagcaattgagctgcctctgggccagctggggaagaggtaagtgtcaagcaaggccagtggtgggtaccagccctcggctcagtgccacctctccctgttctgcttctaggatgaggtcaaagctgcccgcaggagtatgctgcagaaaacatggctgctggcagatgaggtagggtcagggccattaggagggtgggatattagaggatcttgggggacagagaccacaacaggatctcattacccacttcataagttttctttcctttctgcagggtctccggcagcacctcctgcactataagcttcccaattccacgctcccagagggctttgagctctattctcagttgccccctctgcgtcagcactacctccagagactgacttcaacagtgctccaaaatggggtatcagagacctaggatagttgatatagatggaaagatgggtacgttgtcctgtatccagcctttcaacagatgtctggccagacgaagaacattgtgtcctaatggtaggcaggagaccaaggagcagaaggcttgccttcctgggagcaggttgtttgagctgttttagagcagtgagccctaccattacatcctgatatctggggcttctgaaggtctgtactgggagtgaagagtggcttagctatttacccgctctttggggacagggcaaactaaatgcatcccttcttacctaactcccaacccctgccctgggctgaggcatatgaatgctatagttgtgcattaaaataaatgttttttatctcctggaaatttgatctggactgatttcagccatgttagttcagggttagtatctgggggtgggttatcccaggtgaggagcaggactgctgtgagagagatggggaagaatcataagtgggaggtaaaaactttgtccacatctggagacaacaagaatgtggggcctgccaggcacagtggtacacacctgtagtcccaactacttgggaggctgaggcaggatgatcacttgattccaggaattcaattccagcctagccaacatagtgagaccccatgtctgtctgtctgtcggtcggtcggtctgtctatctatctatctatctatctatctatctatctatctatctatttctgagacagggtcttgctctgttgcccaggctggagtgcagtggcgtgatcatagctcactgcagcctcgacctcctgggctcaagccattctcccacctcagcctcctgagtggctgggaccacaggcaagtgccaccacgcctggctaattttttgtatttgtagagacggagtttcaccatgttgcccaggttggtcttgaattcctgagctcaagcaatccacccacctcagactcccaaagtgctaagattacaggcatgagccgctacacttggcctattttggtagtttctacattgttctttggtctgaattctaaactttaggctttcttagactgtcttttgctgtgtggattacttattgtgtttgcaagtaaccagagtcagagcagtgtgccaaggcctagccctgtcagtaggtagagagaacccagtcttcataaatggagctgctgaacacagaattatccaataggtttttttgggtttttttttttttttttttgacacgaagtcttgctctgttgcccaggctggagtgcagtggggcaatctcagctcaccacaacctccccctccctagttcaagccattctcctgcctcagcctcccaagtagctgggattacaggcgcgtgccaccacgcctggctaatttttgtatttttagtagagatggggttttgccatgttggccaggctggtcttgaactcgaactcctgacctcatgatccgcccgcctcagccttcaaaagtgctggtattacaggcatgagccactgggcccagcctttttttcttttttttttttgagacagagtcttactctgtagcccaagccagagtgtagtggcatgatcttggctcactgcaacctccgtttctgaggctcaagtgattctcatgcctcagcctcccgagtagcaggggctacaggcatgcaccaccacaccgggctagttttttgtatttttattagaagcggtgttttgccatgttgcccagggtggtctcagactcctaagctcaggcaatccgcccacctcagcctcctaaagtgctgggattataagtgtgagccacagcatgtggccccaataggttttattaagcaactactgtatcagcaaataccaatgattctcaaactttgtgacaaaaatcatctggaggatattttaaaacagatcactgggtcctaccaccagaagctgctgattcagtacatctggggtgaaacccaagaatctgcatttctaacaagttcccaggtaatactgatgctgatgttcagaacaaaccacacaaccacaatttgaagagcagtggcttaaagagactttgcaaggtaaattctgtgatctcatagtgtgatatctagtgttaagtagggcatagagaccagggtttttttgttttttgttttttttgagatggagtctcactctgtcacccaggctggagtgtagtggtgcaatctcggctcactgcaacctctgccttccaggttcaagcaattctctgcctcagcctcccaagtagctgggattacaggcacctgccaccacgcacggctaatttttgtatttttagtagagacggggtttcaccatcttagccaggctggtcttgaactcctgaccttgtgatccaccccacccccaccgtccccttggcctcccaaagtgctgggattacaggtgtaagccaccacgcctggctgagaccagactttttacaaaatcactgttctgtttacaccttgaattatactcagactttaccaagtagctaactactataacttctcttttgaagtattttgtattaaacataggtctcagactttcaagttaggattttttttttttttttttttttgagatggggctttgctcttgttgcccaggctggagtgcaatggtgcgatctcgtctctgcaacctctgcctcccaggttcaagccattctcctgcctcagcctccagagtagctgggattacaggcgtgcgctaccacgtgtgtctgattttgtatttttagtagagacgggattttgccatgatggtctagctagtctcgaactcctgacctcaggtgatctgcccgcctcagcctcccaaagtgctaggattacaggcatgaaccaccgcacccggcaaatgatcatttaagcaaatgatcgaagactcaagacacaaaactacctgaagggagtggctcccacatttgtagggtaccttacagagcaatttcccttcatatgattttgcaggtggtggggaaactctcagggcagttgtggcctgtgctacatcacccattgaccagaggtgccagtactagtgctcaagatcaatcgatcgatcggtctacctacctatcatctattgaccttcagtgctactaaaaacactcggatcttctaacgtctggtccagtctttcaccccatcacagtgagaggctgtgcacaggggtaacacaggcaacggaattatatgaggcaaacacagagatccaggtttctgggagtagcaatgaggttcagccttgcagtcacaaaggcaccactaaaaggcacaagtaatggcaggtaatgaggccttacttggagcagtttagagtacttcccacgtgtggtgacgcatgccacacactcaccaccaccaccactgccacaaatgaagtgcacactccactgctcctgtcctcaggaacctggaagcccccacctggtgtccgaggtgtggctcccactttaagcgtggggcacctcctctccggcctcaaacctaccggagctcccagcaggctgcggcacatctgacggctggaaactagaacccctgggtggggactccttaaggctcctcccggaagcgtagggacctcgctgcccacacgcccctccctttcctcctctggcgtcctggggtctgaggtgggcgtggccagaccagctttaggtccggggagtgtctcgccagcggcagcacacccctgtaagtggtggccagggctgccgtggcaaaatgagctgtcaactttaggttgacaggggtgtggccgcgaccgcaagggcttttgttgccgggtggacccaacagggatgggctgctggggacagctgctggtgtggttcggagccgcgggtaagtgctatctggcggtcaggggaccgtccagcctgaggcactttcctaggcttgggggtggccggtcaacaggccaggtgtcagtggttcctccagaggcctcgaactctcacagccaaatttctccggtccgtgcttctggagtgcgggccgagaagcgccaagtgcgtgcgaatcccagagtctggatcacgcagcttgggaaggaggaacattctttggggtctcagcaccgccttggggcggggccaccaatctaagttgaggaaagcattggggaggctgcaggaccaaattcattgcggcccctaagttattcactgggaaaggcgctcgaggagagaaactggcagacctatcagcgcgcacccgcggggcttctgcgaccggagtcgggtagtggcttccaggctgagagcgcggctgggccgggtgacgggtgtggccgcgaccgcaagggcagctgttgcggggttctctctttctttcatatcctatttccacccgccttaacgtcctgcgccttctcccaacacctttcaggcgccattctctgctctagcccggggtcccaggagacttttctgcggtcctcgcccctgccgctggcaagtcccagcccccgggacccgaaagtcagcgccccgcctagtatcttggagccagcctccccgctgaattctccgggtgagctttagacgcctccttcctctttcgctcaccataccagacccctctggcccagccaggggctcgacgacccttgcctcgctccttgctctcaggcaccgaggggtcttggctgttttctacctgcgggg

SEQ ID NO: 6619 - DNA, 6000 bp, Homo sapiens
atattatcatgtggaagtcattaaaattcactatgatattcagtgaatttcagggcacaaacagtattagtactataataaagtgctaatcaggaactttattattagaatgctaataagatgagtattagtaagaatactaatacaattgattattataacgttgctcaaaggatgacatcttgtctttcttgagatggtggggcaattttcatagatgacatttgtgaacttgttaatttccctccctctttccataaaatggactttaatagtaactaaataatttctagtggatattaaatataatctagtggtttaacaaggttaccaggcattcactgtagacttccctctagatacctgttcagaattaacataatacgcttttcttcctattaaacagagagggaatatgttagaaagctatactgtataatacaatttttgattatttcagtttcaagatcacgtaaagactgttttttttttttttttttttttcaaatgaacattatggccaggcgtggtggctcacgcctgtaatcccagtactttgggaggccgaggtggatggatcatctgaggtcaggaattcaagactagcctgaccaacatggtgaaaccccctctctactaaaaatacaaaaaattagccgggcgtggtggtgcatgcctgtaatcccagctagtcgggaggctgaggcagaagaatcgcttgaacccaggaggtggaggttgtggtgggcagtgattgcgccactgcactccagcctgggtgacagagggagactccgtctcaaaaaaatgcataaaaataaaataaaatgaagattttaaaggcatattttttgtagctctggagaaacaggcaatctttttttttttttagacggagtttcactcttgttgcccaggctggagtgcaatggcacaatctcggctcaccacaatctctgcctcccaggttcaagcaattctcctgcctcagcctcccaagtagctgggattacaggcatgcgccaccatgcctggctaattttgtatttttagtagagacggggtttctgcatgttggtcaggctggtctcaaactcccaacctcaggtgatccgcctgccttggcctcccgaagtgctgggattacaggtgtgagccacctcgcccagccaggcaatcttatataatgttgataggagtacaaatggtataattcctatggagggaaatctggtaatagttaacacatttcaaatgcatttactctttgacccagtaatctcactcctagaaaggtatcctataaatacacctgcatgtgtagaaaatgacctatgtatagctcttcattgtggtagtgctattttagcaaaagattaaaaacaacccaagggtctagcaataagagacagactgaataaattatattaatagtatatctaccccatggaatattatgcagctgtaaaaaggagaaacaatctccatgcactcatatgaatttctcctcagaacaaactataaagcaggaaaaaaaacctatttggtataaaaaggggtgattaaaaaaagagaaaagcaataatataaaaatacatgtatttacaaaaaaatactggaaggataaataagaaatgaagaaattcggttattcgggacaagatgaggaatgggtagaaggggacaggagtggaagcaacatttttcaatgtatagctctttatattatttttgaaccatgtaaaagtgttatctattcaaagcgtcaaaatttaaaactagtttaaaaatattttggcttttaaaataaaatagctgtttattgaaaaatttaaatacttcaggagtaaatgtataaagttaaaagtgagtctcctgtctgatgatttccttaattattaaattatcctttccttggaaagtctatcagttccaaaaatttaataagcatcaattttgaaatactgtcagagatgttttgatctagctactatatttattttccttacctgtaaaatgcgatcttgttacagtctctgaaaatgtttttatctacagcttcatcttcaagactaaataaaaagacattttgagaaatttatttcacacagggcttgtgaatccaacttttgtaccttctctaacgacagtatgaacatgcaaaataaacctttggagtctattctgcaatgcaaaattgtgtcacggccacagtataacataatagcacattatgttgcagaacaatagccttttgtaaaccctctgaggtaaacaacaaaacatcaggttctgggattactccaaaagtaatgggaaaagatcactgtcacttatgaggacatattcttttgaaataatgactgaaggctatgaccacaaaagtaaaatctgaaggaggaaaaccaaaacagcatcccaaaacgaacaaaccaaaaccaaccaaccagacaaactaagaaccataacccacccaccgatttattcaagaaaatattttcagaatattcttcctgagagctgggctctgaggaagatatgaactgtgttcaagctatcagttagggttttaccagcaatcacaatacaagctgacaaatgctttaatagaggtgcaaggtgctagaataagaacagaacagacgtagaaggggaatttcttgctttttaagatgaggtgacaaactaggggccatgttttttaaaaccaagtttccagaagagctgtttctgggataaaacatgaatgagatatatgtatattgaagtttgagtatatgtatttaaactagcctccatctgattaaaacaactacagattataaggagaaaaaaaaattacaccggctttcatgcactagtgtggccgaatgcatctgtagtcagcatgtccatgattatgtagaaagctatgactgaacacaaacgtcgaaatattatgaaaacaagcccaggcagatatacttggccatactaaaaaactgtttgtccttcactgaactcagtctttgtccgtttattttaatttattaaaaaaattttttttgagacaggatctcgctctgcctcctacgttggagtgaagtggcacgatcttggcttgctgcaactgccgcctcctgggctcaggctatcttcctgcctcagcctcctgagtagctgggactacaggcccacatcaccacgtctggctaactttaaaatttttgtagagacagggattcagcatgttgcccaggctggtctgaactcctgggttcaagcaatctgcccacctataggcctcccaaagtgctgggattacaggcatgagcgaaccggcccagtttattttaatcaagtgtacaaagattggagaatcttttgtttcctctttacagcttcgaagaattaactctgggatgatataggaaggggtgattatagatgaatttggaaagcaacatgcctgaaattcacgtgttaagagttctgattgcaacttttccactgttaatgttatttaaccatcctttttttttggagacagggtctcactttgttgcccaagcagtggcaagatcacagctccactgcagcctccaaatccatcctcccagtggtctcccaagtagctgggactccgagggggcggggagggggtctcgaactcctgaactcaagcgatcctcccaccttagcctcccaaagtgctgtgggattacctgcgtgagccactgcacccggcctatttaaccatcctgaaagtattttatgagaggctattaatatcaactaacttcccgcgaattgagagaaaagataaaggtcagcaaataccaaatacgcaaataagaaatgcaattaaaacactattccctgtttctagggaccctggggtcactcgctacagaagcacttggcctttaccttatttcctctttcactgctgcttccatggcttctctgtcactccgaccagctcccagctctcaggacaagggccctgggcgatcttttaaaaaagccgattgggtgtctttctaaaattacaaccagtacttcatcgtcaagtttctgggaagggagtcccctccagattctcatggagtgacaaatcttgactcttgctcctggaatttttcaggcccaaactagcgtttctacaatgatttatttggcaaatttgtcttgattatgggtggctgatgaggaacgtgcttttgttaggaaccgaaactgggcggcggtgagggcgtgtacgcaatgagtcctagagggtaaaaatcaagagcgttaagaacctggaaatgccgagacggcctccctgactgggacgaagcatctgcagatctatctcagtggcggggtcacgccacagattttgaaaactgaccctctctgtctccgttttcggttaagggtgggaagtgccggccgggtctttgctggaggctaggtctccagccagattgtactgcagcatcgtactcttcagggctagaaggggcctttgaaggttgttacactacccagtctaggaatcgcgtgtactccaccaccgccgaattccagcctttgcttaaataccacccaaaccggagaactcactactagacgccacttgggcagccaggcttagggcttttccagactttctggccccaaagtctgacattgacttagaagggatgaagggctggggcgagcggaagtagagagccaaatcctgcacggggtgcctgcctggtcctaaaacctttaacggctgggagacagaaaagactcaggccaggctggcatgtagcgatctctctaacccagctgaccaggttccaacaggatgacgcctgcgcagtaggtccaaagtctcacggcgcacagacgactgtctgagagaggggccgctacgccgcacagcaaacaagctccgcgacgtttccaggacccggataatcccgcccttagagcagagccggaagaaggcgggacgaaccggaagagggtgaaatgctttcggtaggcactccacggctgtgaagatggcggcggctgcgtggcttcaggtgttgcctgtcattcttctgcttctgggagctcacccgtcaccactgtcgtttttcagtgcgggaccggcaaccgtagctgctgccgaccggtccaaatggcacattccgataccgtcggtgagtattcacttcactaacgtctgaacctagaggagcaaggggtggggctacggcggcccaaggggtccatgaaggttccgcaaaagtctcttcaaaaggggtggggttgctgggatggtctgtgtggctagccaactgggacccacctccctggagtggaaagccgcgcacttctgtgattaggctagcgggaatgtaagggccacttcagcaacagaaaggagtggtggagcggcttctcatcagaaaaacagaactttcagtgcctgacttgagatgtaaacttgatgtacaaacggagagttgtttatctttcagatgtttcacagaatccagtgtccccgggttggataagaaagatatgtaaataggagtcttcatttctttctttctttttcttcctctgcacttcttggtccctgggtaattctgcttacgagatggttcgacttcgcttcaactttggaatggctattctaagctttactgtgtgactagaaagcatagagatttaagaaatgtgttttaacatgggaatggttaaaattgaagaaatagtacttaaaatttaatgtggtaaggctagtctttcatttggataattaactacatgggttgaccctttctgccccttacccattttaaaccttatttcagtaacaggtatagtcctgtgagcagacaaaaaccagatgcagggaggaaatgctgaaaagcattagccccattaaacctacgttggcctttttgtttcattctgctctgctcactgactgtaatgtccaaatcttatttgggcttttattatggtaaacgttataccttttgttca

SEQ ID NO: 6620 - DNA, 6000 bp, Homo sapiens
cctgattgtgctttataacattcctccccgtggaggccacctggacttccagtctggctccaaacctcattggcgccccataaaaccagcagaactgccctcagggtggctgttaccagacacccagcaccaatctacagacggagtagaaaaaggaggctctatatactgatgttaaaaaacaaaacaaaacaaaaagccctaagggactgaagagatgctgggcctgtccataaagcctgttgccatgataaggccaagcaggggctagcttatctgcacagcaacccagcctttccgtgctgccttgcctcttcaagatgctattcactgaaacctaacttcacccccataacaccagcagggtgggggttacatatgattctcctatggtttcctctcatccctcggcacctcttgttttcctttttcctgggttccttttgttcttcctttacttctccagcttgtgtggccttttggtacaatgaaagacagcactggaaaggaggggaaaccaaacttctcatcctaggtctaacattaaccaactatgccacattctctttgagcttcagttcccaaatttgctacataagattgcaagacttgccaagaatcttgggatttatctttctatgccttgctgacacctaccttggccctcaaacaccacctcacaagaagccaggtgggaagttagggaatcaactccaaaacgctattccttcccaccccactcagctgggctagctgagtggcatccaggacgggggagtgggtgacctgcctcatcactgccacctaacgtccccctggggtggttcagaaagatgctagctctggtagggtccctccggcctcactagagggcgcccctattactctggagtcgacgcagagaatcaggtttcacagcactgcggagagtgtactaggctgtctccagcccagcgaagctcatgaggacgtgcgaccccggcgcggagaagccatgaaaattaatgggaaaaacagtttttaaaaaacaaaagaaaaaaaggtttatttacagatcgccccaggagactttccctggtgcctgcggatgtccgaggcctcgcgccagcagcgctcagtgcccttcctggagctctcctggcccaggcctggcgggcactgcttcccggcctgcgatgtcccaaggcggggaaggagtccagattgggtccccctcacaggttagtggtgatacattttaagtctgggagagcggcctgcttgtgcagtgggtcgccgaggataagaggtgagccccctctctcctggctgcagtccttggcgctttggtccagaagggtgcgaagagcgctgggccgaacatactggagactcaccacggcccctccgaggaagaggcacaggacgcctgtggcggtggggatcgaaagaaaggagggcatgtggagtcagggctatgttgcccaggctggtctcgaactctggcctcaaacgaccttcctgcctcgacctcccaaagtgctgggattacaggcgtgatgcccgggccttcttccatcttttggagcctaccccttgtgttacctcccgccacacacctctaatctgaattacatgaaacacggcaagacaccaaacccttctgagccccccacttttcatctgtaaaatggtcataacagtgcctgtttctgcgaactattgagaggggcaaatagggtaatagatgtgaattcattctgtaaactggaaagtgcacacccggtgtgaatcctgtctccacccttagcccccggggcccattctctcggtcctcaccggttgccagcgtgacccagaaggcggcgccgtactgagtggtgagcgcggaggagcctaggcggagcgggcagagcggcacgctagagatggaggccaaggcgaagaccccgaagagcgcgaaggctccggtggtcagcagtgccaggcctccgtagagcggggccggcgtggagagcagcacgttggagaggagccagaagcagaacgccaccctgccggggagtggggggacccgctgtgagcgggcttctcccagcccaccggggttcccacagctgcgctcttctttatccctaccccagcgtcaaagccagggactgggatggcagcggtgcaggggaattccccgggggagaagcgggctcctgaggtccaggcggtggctggagtctctccggattccgtctgtgcagatctcgtggatcttctaacccgcgaggctgtcatgcccaccccgagcgcgtcgggtctggctgcagctgctcagcgcctccgaggcctgcatcctcccgctcatacggcccagctcctggcacacacacacgtgcacacagccttccctccagcacttaccatagcgtggccgaggcgtagtgtcccgccaggtggtactggtggtacaggccgcaagggctactcggtgtgaacttctccgccaggtagagcactgggtccggcagccccttctccagtgcgttcgcgtactccgcggcgtaattctctttcagacgccaggtgaactgctcgttgtagtcaatggtctcgttcagctgatgcactggggtccctgtggggtgaggcgggctcatggggctgcccgcggtcggagacctcgcaactaagcggattcagacaggaaagtgggggtgtggcgctctcggcgggagaaatgggttcggtggtggttggagaaaacgcaaatccacgaggaccacaagctatttgagcttgtgggatgtgagaggccctccagctatccctgacacactcacctaaccggggatctcccagctccaggagttcatttagccccagccccctcacctgtgagtgtaatattaatgccctccaggcccacgagcagacggacacgggctgtaacgcgcgctgcgctgaaggctttgtaggatgtgttggtgttcactgtacccacgaaccattctgcactgaagtgcacagctgtagggaaaggcacacggtgggggtgggatgagggtgggaaaatggaattagagagtggtatgggaggtgggacactgcagagagatggggacttagaggtccaatgtggttgcatggtaagggccaaaaagtgggccctagaaggagctggagagtgggaagagggagcagaaaaccaaccccagttccctattgtcccaggtgccctctgcccacctccttcctcaccccgtcctctccccatgggctgcaccacacactcacccacaatttctgcgcctatgaacagactgagaagaactctcaccaaccaaaaccagcgctgcaggaataggcacccgggtcaggcctgagccctgccaaaccagagtccccaagaccacccttgaccccacttcacctggatctttagttatatccagacttttgagactaatgttaggcacgcttttcctgcaagtccctctgggctactggcatttctgatattttgtgaccacgcactttcacctccctagccccatttcccatctaccctaacagcacctcccctccacccccacttcctggcactcttccaccaccttcactcccctagctgtctggcgcctggtcctggttctgcctcctggtccagtcactgcttggtgaggctcagtgagtccagaagtgctaggcacgcaggggtcacctccctcagaagagggaggccccagcctgatctccgaggggaggaggtgggaatgcagatactcctaggtgcaccagttccagggaaagcaacacagattaagatgcagaaaagctgggtcctcccagaactgaaaaatgcacaacctaggttctgggagagggggaaagtctaagacaatgcacccagttggctccaacttctaatccaatgtgggagtctcagtcctgaggatgaggcacccatacacatgtgtctcaacccagtgcaaaggggaacactgcagtctgagctgctggcatctgtccttttggcctgaaggtcatcacccaccggatgggatgagagtgcagctttagtcctgggagaggtgggaggccctccagcacaagaagcctagactgttcctcaggattactggactgggtgcccattctctgcagcagccttcccaaggacccagctggggtccttctccaggatatcctggatggggagctctccctatccttggaaaggggtgcttgctgcaccagactcctgacttcactccacctgagcctcaattcgactattcatggaggctcttgtacagtcttacctgtcctgggtccctcaggagacaatctgcccatgagccttcccccactctacctgcactatgaggacacccttaccgagtggccacggatccccggcaagatgagcaggaagcttgctgctagagccaaaaacactagaataacgatgagcagtggaacgctgaagcctgcggcatgccggggctgggggtaaaaaggcagtacgccgttccacagggtcatgctgcacgccggccgagtgctgcacgcaggcgggcaggcaagccagcaagctggggctgcctggacgcgggagagcgcgtccttggcgtctctttgcgtacaaggctgggaccgagtgggctggtgaagtctgagtcctgcacctctccgttaaggaagcgtggaggtgggctgctctcaacgctctggggttggtaccgacagagtttttctagccggcgagcgaaactatttctcactgtctgtagccgttactttcctggttctgcgggttggcgctgagtttggaagtcgcgcgggaccccttttatagcagcgtgggcgacgtgccacacgggtgtcccagcccaggggctggtctgagctggaagaggttgtgcaaataagggccccacctccacggcaggagggtgagccctaggtccagatgctcacactggcgcaggtctgtcctgagccgacacctgcacagtggcgagaccaaggacccagagagaaaggtgagagtgcagccggggaggctgaggatcggcggagctggaagagtgagggtgaaggcaagaagtagagcacagaagcaaagattttaagaggaaagaagacatctgaacccaacaccaccctaaaccacaggttagaccagagtttgggatctgaccctagccctcgcccatcatgcacaggcgttcattgcagaaggggagtttattggggaaggggggattcattgtggaagggtgctgcagtccctcactcccaggtcagtaacctttttcccttccctgcctcctggaggagaagcggagcctgacggatcgggggcgggtggaggtgaaacattggagacattgggcacaccctgggaggcttgaccagtcctgccctggactgacatgccccagaagactcctgcccagtgggttcctatggtcgggggttaactctctgatggggtggcggatggggaacagtgtcaatgcctccagagctgccaattgtcctggaaagagtggcgtttggatgaaggtcctcggtgatgcttctaacagctaccttccagaagtggaaacagctggtgctcctcctccagtactagctgtaggaacaagaggggaggcatagaggacgccctaacagtggctttcgcataccacctaccacccccaccctcaccccgcaggctgcagggttggcatgctccgtgcaagaccagaggcactgatgctcctgggagctcttctgactggatccctgggtccatcgggcaagtatcaggctcctctagcggcggggtgttccccaggatccctgggaggtggggcggggagaggtgcggcaagcggctccctgagactggaaggtcatttcgccgtgcagctcagcgggatgggaaacttcccagtgcggcccgacacttgggtccggttaggggcgctccgcgagctggggaaggactggccaaggccttcgttgctcgggagg

SEQ ID NO: 6621 - DNA, 6000 bp, Homo sapiens
tttcttaaagctgtatcagtttcagtgctaacctaagctgagattattttaaatacttggagaaagctggcatttaatttagctggagctagtgttttgcagttgtcttccaatgaaagaatctacctcattgggagatgttgagcagtaataacacagctgttcaaaactagtaaaaatcctaaaatgactcgtaagggacagtgcagaggctgccttcacaagattttgtaactcatttgaaatcaaagactgcaaagtaccaaagagggagctctggttattctagcctgggccatcagagtggcattgaacaattgattaaggactctggctgtgtcaggcactgtgctagggatatactggtgggtaaaacagactccctgtccttaaggagccaacagccatataagcaggcaattccagggaacacaggctattgtgggatcaggccagtcccacagcatttcagatttagaaagtaaattccatcagtttacctggaattgactaggtagtcaggaaaaagagaacattaagaagggaaacataattaggaagcaagaactgagctagaactcaccacactctgagggataagctagaatgtttattattattattattactaatatttttgagacagagtttctctcctgttgcccaggctggagtgcagtggtatgatctcggctcagggcaacctccacctcctgggttcaagcaattctcctgcctcagcctccagagtagctgggattacaggtgtgcaccaacacgcctggctaatttttgtatttttagtagagacggggttttgccatatttgccaggctggtctcagatgggttcaagcaattctcctgcctcaacctcccgagtagctgggattacaggtgtgcaccaacacacctggctaatttttgtatttttagtagagatggggttttgccatgtttgccaggctggtctcaaacttctgacctcaggtgatccacccacctcagcctcccagagtgctgagattacaggtgtgaaccaccacacccagcagaatactgatttaatactttacaatgagatcttcatctttccagctatcagatcacttgtgctcagcctgcagggtaactcccctatgccaaggttcccagggatgagcttggtgagctcacaagttagaggaggtgaatagttttgagggatatttcataaaaacccacagaattattcttgtcctcaatagatttaacctttccagaggccagaatattctgattccatccttaggtagatctggatgaacagactccgataggttggccactcaggcttcctttttaaaaactccatgttgataatcacaccctgcaaatgcagtcttttaaatatgttttttgtttattaggtaattcactcacgtgttcaaaggtacaataaggcttacagtggaaaatctctctcattcctgtttcctagtcatccaggtcccctccccagggacaacttaggttatcagtatctgtgtatccttccaaatatattttattgatgcagcccaaataatattttctaaaaaaattgcagctttatttacattccaggcatgagaatatactttagtcaccttgtttgaacttgagtaatacattattgtttctaatttactttgagagatatccttcccctaaactgtaggtacaaatgtctcttagaataggtgacttctgtagatagctaatctcatccagtgtatctgtgtgtatatgtgtgtgcttaaccaatttcacagagtatctgtattcttaagttctaggaacaccttcctctgtacttgtttatgccctatgtacagattctgaagtcaaccatgatatagaaataataaattcttacaacgggctcttttgttgtttattttgttaatccaatgactttacttgcttttttaatttcaagacacatttcaaaaactctgtgctttgttggttggaactagggagagttgggcatatctcgaaagcaacagtgatgaggaagaattgaaaagctgaatttttgccatgcttctggtatgttttctattccctgtccttttagacccctttatacacacactatcctaaattatgcctttaagttaagctacaaagatgaactactattagacttgaatatgcataacgactaggtatgagaccaccaagatcctaaaattattggttcaatcaaagtatttaatggtatctactgccaataggggaaggcaagacaagacttcacagtctattccatttcttctgaataaggcagcaactaaagaccacggagttgccaactatcactatatagatactttgcagagttggcccagtattagacaaacaatctaatatggaaagcttgtactttaaattgatgaggtcactctagaaattgttaccaaattttttcaaaaacagaacatagaagagaatgaaaaaatataattgtagtgaatgaataaaagtgtggtataaaaggggaaaaaggacaaagaatgaaagtaaatcagaggcatagcaaaaaggaggagtgagtgctttgatttgcttttataacagtaggactggtttgggtggcgctatccacacactttctgctggatcccaggagataagggtatgctctttggctatgagtttttcattatgtaaaacttaacaacatcgtaaacttcattattaccagacactcccaattcttacatctgcaaaattaaaatagtgcttttaatgggtggcaagaggatgtcctccaatctcaagcagaaatggtatagtaatctcaagggcttgttatgtgtacttactgtactcttcagttcttttcaggagaagcacatctctggctgccctcagtacactaagagaatcagacctcagaggtggctgcattttattgttgggagtaagtactttttaaattttgagaaatgttagagatttcccaaaacctcactagaagtatgaagccttgattagaaagataaagggatttggttccaggtcacacagcaaattaagtggcagaattaagttatgaacctagacttactcctttcaccatattatggcatttgggggcctccttattgctagagtagtaacacattacctcatatagctttttttttttttttttccccagatggagtcttgctctgtcgcccaggctggagtgtagtggctcgatctcagctcagtagctgggattacaggcacccaccaccatgcccggctttttttttttttttttttttttttttttgagacggagtctagctctgtcgcccaggctggagtgcagtggcgccatctcgcctcactacaagctccacctcccgggttcacgccattctcctgcctcagcctcccgagtagctgggactacaggcgcccgccaccacgcccggctaatttttttttgtatttttagtagagacggggtttcaccatgttagccaggatggtcttgatctcctgacctcgtgatccgcccgcctcggcctcccaaagtgctgggattacaagcatgagccaccgcgcccgacctagtttttgtatttttagtagacagggtttcatcatgttgaccaggatagtctcaaactcctgacctcaggcaatccgcctgcctcggccttcccaattgctgggattacaggcgtgagccactgcacccggcctcatacagctctaatgccacgcatcaagttctgcatgtacaatctctcattttggcctctcagcaaccccccatgtgctagggacagtaaattctattgttctcactttgcagataagaagactgcaattcaggaagacatatagtagtctataagtgattcaggactggaactcagttatcctaattccctctcggaggctctttccaccatgccatctgctcgtctggtgctttccatccatgaactctggaaaacaagcttgagataccaaaattgaaaagacagctcatcaaaaatgaatagttataattctataagtacaaaaatgaaatactcaaatctcttgccccccctcctgctaggagcataaatgttaacctgagttctctagctctgtacaaatccacagcaattaagactgcactgtgagggaaaatacttttctaaaaaagaatcctgatcaagttgaaacaaaaattttaaaacatgaaatggaaggaacgaaactgtcgtcctcccttatttctgacccacacttgtcgattttcatgacggagtttctcaagccaggggcatatggccaaagaccatgtgaaatgccaggtgttccaaataacaaccgacggggtactggaaggaaagcactgcctccccggggaacaaatggcccaatttccagacttagttttctgcagtctcaaacccgatgttgcaccaagaaaccacctaatctttaggtggtttcgtttaccgaaaaatgaggtgactggttcagtgcgcatatgtgaatttaagggtaacactgtactcacgctttgcatatttaaattctcaaatattcacttaatatatgcatagaccattgtcacttcgtcagaagtcgcgtcctgcccagttgcgcgagactccaacgggccttcttgcgacgctcgggtctgggtccgggtccggacgtgcaacagaagccgtcagtggccccgctggctaaaaaagggcaagcatcggaggctcgagccagcggccgcggcgcttcccgacagttcctaattcggggcgctacgccggccccaccacctgttcccggcagccaatggggccgcggggggcggccggggcggagcgcggctacaaaaggcctcgggccccgcgcgcccgcccaccccgctccgggcgcgctctcgggaaggcttggaccgacgcggcccagaggccaggaacattccgcgcgtggaccagccgggccagggcgatgctgcgggtgcggtgtctgcgcggcgggagccgcggcgccgaggcggtgcactacatcggatctcgggtgcgtgcgccaccggcctcgtctggcggccgcgtgactcactcgatcctgcgggcggcgtggagcactcgctcgctccctgcccggagccgccaccttccctcgctttccctagccggaattgcacgagagtgtcccttctggtatccctgggaagctcagcttcaagagccttcgcaggctccaggagctgggcggcgtcccccagtcagggggaacttgcgttgcggctccagcccttggggtccacttgctgtctgcgcgtccgcggcctgctggcccacggcgcagggggcgccgcccccctctaccggaccttggtgcgctgcaccaagcttcccgctcggagcaaggggttgggacgacggaggctcctcttagtaaaagggtggcgttattggggttcagtagcctgagtgggcgtcgagttggggagatttctggaaaatgcgtgtggggtagatggatggggagaagaggcaagcaaagtgggaatcggggacggggagcgagcgaccagattcactccaagtataacatgggatcccacgtctggagaggagtcggggcgagtgcagcctgtaagcagagtttctgcgctccccgccctcggctgccctggcagcagaccctcccatgcttctagtactggaatcgctccgacattctggcttcctcccagcaactggttcctgaacagctgtcattctccgtctttcttctgcctccacccgagttctcctcctgcccacttcctaaggcttttaacagagcaggatagagatttggggggttgaggtttgctcaggggttgagggaccctccctgctctagattttataggccatgcatttttaaaaggcttttgaagtttttagatctccttcttatttgtttgaatttacgcctgagctaatcctgaccttggctagggtactgtggaccatctgta

SEQ ID NO: 6622 - DNA, 6000 bp, Homo sapiens
ttttgctaggggtgcatattgccattccattgtgatattataatttaggtttaaatcagaagctactacagaatttaaatattggctgggcatggtggctcacacctgtaatcccagcacttacaggaggttgaggcaggaggatcacttaagcccaggagttcaaggcctgcctgggcaacatggcaaaaaaccatctctacaaggaaaaaaatacaaaaattagccgggcatgatgacaagcacctatggtcccagctagtcaaaaggctgaggcaggaggatagattaagcccaggaggtcaaggctgcagtgagccgagatcgcaccgctgcgctccagccttggcaacagaacgagaccctgtctcaaaaaaacaaaaaacaaaaaagccacaattatttcttcttcctctttttttggttttgttttgttttgatttttaaagatggggtctccctctattacccaggctggagtacactggcacaatcatagctcactgcaaccgccaattccttggaggctttaaaaaaattttttggagagacggggtctcaatatgttgcccatgctggtcttaaacttctgacctcaagagatcctctccccttggcttcccaaagtgttgagattacaggtatgagctactgcatctggctgttttttgttttttttgtgaaacagacccaatagccaaaaggacacctctataggcacaccttgttttattgtgcttcactttctcgcacttgttagatattgccagttttgcaaattgaaggtttatggcaaccctgtgtcaagcaaatctgtcgccgtcatttttccaatagcctgggctcacttcatgtctctgtgtcaccttttggtaattctcttaatatttcaaaccttgtcattattattatatctgatatactgatctgtgatcagtgatctttgatattactattgtaattatttggggacatcacgaaccttgtccatataagatgacaaacttaactgataaatgttgtatatgttttgactgctccattgaccagccgtcccccttcactctccctctccttggccctccctattacgagacacaatattaaaattgggccagttaataaccctacaatgacctctaagtgtttaagtgaaaggaagagttgtatatctctcactttaaatcaaaagctagaaattattaaccatagtgagaaaggcatatggaaagctgagataaggatgggcatggtggctcacgcctataatcctaacactctgggaggctgaggtgggagaattgcctgagcctgagcagtagaggtttcagtgagccatgattgtgcctgtgcactccaaaaaaaggaaagaaggaaggaaggacgaaaagaaggaaggaagaaaggaaggaaggaaggagggagggaggcaggcaaggaaggaaggaaggggaaaggaggagggaaggggaaggaaggaaggggaaaggaggggggaaggggaaggaaggaaggggaaaggaggggggaaggggaaggaaggaaggggaaaggaggggggaagggaagggagggaagggaaggaaggaaagaaaaaagaaagaaagctgagataggctgaaagctatgcctcttctttttttttttttttttttgagacggagtcttgctctgtcgtctaggctggagtgtaatggtgcgaggctcactgcaacctccgcttcccagcttcaagcgattctcctgcctcagcctcccaagcagctgggagctactcggcacatgccaccacacccagctaatttttgtatttttagtagagacagggttgtctctactatggtagaggtccaccatgttgaccaggctggtgtcgaactcctgacctcaggtgatccgcctgcctcaggcttccaaagtgttgggattacaggcgtgagccaccatgccctgcactatgccttttcttacccaggttgtgaatgcaaatgaaaagttcttttttattgtttgggtttgtttgtttgtttgtattaaacttttatcacttgactctgggaaatgggaaggttcttgaaggaaattagaaatacccagaccagcctgggcaacatagtgagaccctgtctctatttaaaaataaataaattaaataatttttttaacaaaaaagaaaagtttgaagctagcagaggtcggttcatgagatttaaggaaaaaagcaatctccataacataaaagtgcaagaagcagcagcaaatgctgatggagaaactgcaacaagttgtccacaaggtgtagctaagatcattaaaggtgactacaataaacaacagattttcaatacaggggaaacagccttctattggaagattccacctagggctttcatagttagacagaagttgatgcctggcttcaaagcttcaaaggacaatcttactctcttgttagaggctaatgcagcccgtagctttaagttaaggccaatgctcatttaccattccgaaaattctagggcccgtaggaattattctaaatctactctacctgtgctctataaatggaacaaaacctgggtgactggccgggcgcggtggctcatgcctgtaatcccagcattttggaaggtcgacccaggtggatcacctgaggtcgggagttcgagactagtctggccaacatggtgaaaccccatctctactaaagatacgaaattagccaggcgtggtggcacatgcctgtaatcccagctacttgggaggctgagggaggagaatagtttgaaatcgggaggcagaggttacggtgagccgatatcgcgccattgcactccagcctgggcaacaagagtgaaacaccatctaaaaataaaaataaatgaataaaaaagaagaaatacctttcataaggctatagctgccattgattcctctgatggacctaggtaaagtaaattgaaaaacttctggagaggattcagcattccagatgccattaagaacattcgtgattcatgggaggtcaaaatatcaatattaacaggattttggaagaagtggattctaaccctaatggatgattttgagggattcaagacttcaatggaggaagtaactgtagatgtggtggaaatagcaagagaactagaagtggaacctgaagatgtgactgaattgctgcaatctcataaaatttgaacagatgaggagttgcttcttatagataagcagagagagtggtttcttgagatagaatctactccttgtgaagatgctgtgaacactgttgaaatggcaacaaaggatttgaatattccataaacttagttgataaagcagaggcagggtttgagaaaactggattgactccaattttgaaaggtccactgtgggtaaaatattatcaaccagcatcacacgccatcaagaactctttcatgaaaacaagtcaatcaatatagcaaatgtcattgttgtcttattttaaggaattgccacagccaccccaaccttcagcagccaccatccagatcagtcagcagccattaacaaggagcaaagaccctccaactagcaaagaatatgacttgctaaaggcctagatgattgatagctttttttttttttgagaccgagttttgctcttcttgcccaggctggagtgtaatggcgtgatctcggctcaccacaaccttcgccacccgggttcaagcgattctcctgcctcagcctccctagtagctgggattacaggcatgcgccaccatgcccagctaattttgtatttttagtagagacagggtttctccattttggtcaggctggtcttgaactccccatctcaggtgatccgcccgcctcggcttcccaaagggccggtattacaggcgtgagccaccacgcccagctgatagcatttttttagcagtcatgtattttatttacttgtttatttttagagacaaggtctcactctgtcgccaggcaggggtgcggaggcacaatcatagctcactgtaatctcgaacctctgggctcatgcgaccctccttcctcagagcaattaacaaatgtatatatactttttccttcctctctcccaatattttaaattaaggtatgcacattgttttagacataacgctattacacgcttaatagactacattataaacatgattgtatttgcactgggacatgaaacatttgtgagacctcactttgtcatattgcggtggtctggaaccaaattcgcagtatctccaaggtatgcctgtactagattttctatgcttgagtttagtccatatcgtaaataccttggaggcaaaaggaacacggcagagagcacaaagaggacaatacatatttgctgaaaaacagtaggacacagaactgctgacgacgacagccttgccctctccagttgactgcagcaaatgttgccaatttgccagagacaagcaattcgaggagagaaaagctgcttgccttttcagttagcaagaaaagtgctgggtttgtcttctgccgagcacccgcaacccagatcccgacccgagattcctgagacacactttcggtggagggaactcctagcagcaacgcccagcccccggcgtgaccctccgaccgcacttgcctcccagcctgggaaggtggaagaggccgcccaaagtcccctcagttggccagtgagtgacccctgggcggaggcggcgcagtggcccccaatccagcctcggggcgagaggcggggcgcgccgcgcgcccccgcccatcgcgggcgccccagccctgcgcgccaggcctgcgtgtcctcgcgccgacccctccctcgcgcgcctcgcccggcgcacgcgcgtggcctcgcgcagggcggggagaggcggtggctgtgggcgtccggccccgaacctgtcagacctggggagccggcctccagcagcgggcgcggcgggcgcgagcacgaccccactctcctgcggccgcgggtggagcagcgcgagcccgcctcgctgagccggccgggggcggggagatgagttgcggccccgcggcagcgccccaggtattaaatagatgtgccgccccctcgcggagccccggcggagcgtcggggtcggccctgcgacccgccgccagcggcttcggaacttgaggacagggttgggcgcctttaatttataacgtgtttcgttttccacaggatggggagggacgcgcggcactgccctcgagaactggcgctccggtgaagtaggcgccgccggccgtccgcctcccccaagccgttccgcaccgcggccgctcagcctctgccatggccggctctggcgcgtggaagcgcctcaaatctatgctaaggaaggatgatgcgccgctgtttttaaatgacaccagcgcctttgacttctcggatgaggcgggggacgaggggctttctcggttcaacaaacttcgagttgtggtggccgatgacggttccgaagccccggaaaggcctgttaacggggcgcacccgaccctccaggccgacgatgattccttactggaccaagacttacctttgaccaacagtcagctgagtttgaaggtggactcctgtgacaactgcagcaaacagagagagatactgaagcagagaaaggtgaaagccaggttgaccattgctgccgttctgtacttgcttttcatgattggagaacttgtaggtgagttgtgttgccaactcactttccgtttacctttcctcgagagtctttgtcaagctgtagttacacaggctttgaggtttaacccatcttttcaggaagtttgtatttatcaagacactgatctcatgtgaaaaggccacacggttccaaagtgcagctcaatctaagtacaatataaactccccgagataactttgactttctcttctagttgttcaaccactgtcatctaccgtaaagttaaggacgttatcttcattgtatgtcatgtaacttcctc

SEQ ID NO: 6623 - DNA, 6000 bp, Homo sapiens
cggcccaatacacagtggaaagtgccagataataaatgaaactacaagaggttagaaaactatactttctttttagatattaaaggctatgagggcatatgttacttcaaagacttgttggatctgtttttgaatgggaggcaaattggtttcaatcactagagagaagggggcgtggtggcccaggaacattattagtgtactgtactcctgtcacctgctgaggtaaggaggttctgaataactgctctggggtgcaggaagaaaatactaaaactttgaattatctttattgatatcatccctttaaaatgtctgtttatgctgttttatggtgtatggaaaggatatgcttggggaatactgccctagagagaggagaagacagatggttggatcaggatgaaaaaaactggagatgtggagtagctcagaattcaaaggtctcataactgcccagtgggttctcattgcctgctgcctggacagagccaatttattaagacaggggaattgcaacagagaaagagtttaatttacacagaggcagctgtatgggagacaggagttttattattactcaaatcagtctccctgaaaatttggggattggggtttttaaggataattttgtgggtagggggtcagaaagtggggaatgctgattggtcgagttgaagatgaaatcacaggaggttgaactgggttttccttgctgtcttctgttcctggttaattctgtaaaccattcaggagcaatatggggaggttcagaatcttgcagcctctggctgcatgactcctaagccataatttttaatcctgtagctaatttgttagtcctacaaaggcagactggtccctaggtaagaagggggtttgtttggggaagggctgttaccatctttgttgcaaagttaaactataaactaaatttttcccaaagttagttcagcctatgcccaggaatgacaaggacagcttggaggttagaagcaagatggagtcagttaggtcagatgtctttcactgtcataatcttctcactgttataatttttgcaaaggtggcttcagtctcctatctgttctgataaagaaaatgtagtcgcatttggattctggagagatagtaaagaagatactgacctttgttagacaatggcttatgtgacaggtgctgggttgtgtgctatttattcttattctatcactgcatatacaattttcatatgaatgcatacttttatccatttgttatttatttaatgaatatctcatttaatcttcacaaacagcttgagaagaaggttttaatcttcccaattttgcaaccaggaagttaaggcttaaggtgggtgagtaatttacacaatgttctatgatttacacttcagcaattctcattctttagtgagtaggtttgcagtgtagactccagtgtagactttaggagattcaagtgggcttctagtctgcttggagcaggtggatagttcaagaatatgcttatagaattatgaaatactttgttctgattttctttcattatttagtgcatattcccaaattgcaattttaggccagagctacttctctgctgtttaggctgacaccaaggacttggtttgacatttcaatcaactcaatcttcccttgttggccttaaaagcaagcaagcaaacaaacagacaaacacaacaaaacctaaaacttctgttatgactaaattccaggtaatcaattaaatcttaatttattttattgttattaaattgaattgacataaagtgactaaatctactatttgtcaatcccattctcaatgtcagagacttaaattgcagaatctcctcatctgcacatctgattccttccagcagctgataagcatcacaggagcaggaatcatattttgttcatcttttctatgtcccacaaagtgtctagcagagtatttgcatttgttgaatgaaaatatgttagatcaatttcttccaactgtagatttcaaactataggccaggccatcccacttgttacaggtagttaatctgtttatctaaaaccataattcattggctttcttagctatcttggcagttaggcaagagatatttacaggttctaagaaacataagatgctatttattccgttgtatattagacttatagttgtgtggtttcagattcttaagaataaaaatttccatctcttcgttttgatgaaatgtgtgtaaagttggagaacaaggtaaaagagtgagtaaattcagaattctttttttctctcaaatgctcagatacttaattaaaattcctttaatatgatcacgagatttttgtcaggacaagttgagatgatccttgagaaagcactttgaaaactctagactacagacataaaggacgtttgtcaaaagtaaggctttaaaacaaaataaggcctcttgaaaacacagacctggcgttctgacagtgcacatactgcctaatagggatgaaagtttaagctctgtttagctacctttgtataatgggaataaaaggttttttttttcttgtatcctaaatcgagaatttaaactgttttctgattagcaagggtttgcagtcacactagtaatagtcctctataagatggacatccttctctgttccccgtctttctactccttatgaagaaaaagtagaaatttttgaaaaagttgtgctaggtatacataacatgacatttatcattttaactacctttaagtgtacagttcagtggctttaagtacattcacagtgttgtataactatcaccattatccatctccaggacttttccatcatcccaatctgaaaccctgtacccattaaacaataccttcccatactctcttcctgcagcccttggtagcctctactctttctgtctctgtgaattcacctattcttcttgctgagccttgctgttatcattattcattcgacattattcattattcatgagtgcttattatggacaccaggagttcaacagtaaacaaaagtccctgctctcaaggagcttttattttagtgggagggagacaataaacagcgagcacatttaaaatattttttaaaaatgagattatcttatacacaattcttctgcaacttgatcttttcacttgacagtacatcttggacatctttttctatgtcagtctgaagaggcctatctcttatttataatagctaaatttattgagtctctactttgctccaggcactgttttagttgcaacaatcctatgaggtaagttctataatgatcatctttttacagatggcccagataagtgtaggagcttgcatagtcacctggccagtcactggtggagacagaactaaactcagatgacctgattccttactccaattctaccctcttttgaatggctacatagtactcttttgtatcaatataccttaacttatttaggcagtctcttatatgtaagccatttttaggtgtttttttgttgttgctatcatagtgctataattaacatatttagagatatgtttgcacgtgtgtgtggttttctataaggtaaattcctaagaaataaaaacacatacacatttcaatacttgataggcactactatactcagtttcctttaaaaaatattttaccaatttatattcccactaacagtataggaaaaggaaaaggccctgatttccttatatcttctttaacaaagggaattaccaaacttatatttgccccatatgataggtttaaaaatggtatagaggtgatacttaaaaatgtttttcacttaaaagtgttttttattttaaatattttaaagagatgattgcttcctgctctaagctgttcttggtcctcttttatcatgtaagaaagaaagccatctctcttatttccagaaatctgtagtttcttgttactgtggaaccttggtaggaaaaggcccttgtttctgtgaaaacctgagggcccagcgtgaggatgttccaggagagtggagttgatggtgcgcaggggattagcttgctctggttatagagacatgattaaaatctatttgatttcagtacttaactggcaaatctgatgcaacttctggaaaattcctagatggctttaggcatatttaaaagaagccatatttttccttttaaaaatagatatgcaccaaaatattttattttcatctaatcccgctttaacaaccagaatccccttaaaagcaattccaaactaaaagatgtaaatccatttcctatgtgcatttgttctttggtaccatcagggttaatgtttgcatcctctgtgctgaaattaaggatgttgggaaagaagtgtcattgctttgcctactaaatgtcacttgagtatgcttagctttcatccataagagagctgaacttcccctgtaaaaaaaaaaaaaaaaaaaaaaaaaaagtgacaaaaacccactgctgattctttcatctctgcaaaagcaggtgggaactgcaaacagatttgcttatcttcctcagtcaagggctggtaaaagtttggtaagtaggcctggtagccggtgtccccttccattgttcattttcatcctcctgaattcttgattcccacagaggaagccatcctcagaagccagcctcttgggagtttccttttgtttccccaagattaaccagttctgtcctgtcagcaggagcaggcaactaggggaggagaggctcttcagggctttcagcatttttccaaggagtgcttttctccctcaattcctcactgacagtgaagctgctttcttgtaaggtcttcctcttcttctgatgagatgctgattctgattgccatctagcagcttccggtggtggtaagtggtcaagagtgtttttccaggagttgatctcaggtttttgagaatgccccctagagacccagtttgttttctgtatcatccctcaagctttcagagtagccttgcttttctccttggcatggtcacggaatggatacctgtttgatcttcctgcactgctgagaaatcttccttttgggggagaggattaagtctgggttgaggtgagtagatgggtagcattcaatggttagtgagatgaagtggaaatttagctgtgggctggttggaacgatctgtttcttttctccagatccctattttgttttgctgttttcatcttggtgactaaggtttcacaaatattctttattattccccttttgctaaaaaataaatttgggggagttagttggaaatgggagatgtgacattttcttttttgttgtttgaaatgtctattttttactctgttagcatgcctattaaatgaccaatgatagtagcataaaggtacatttcttcttggtttgtaggtctttgtcacttcctttggtagtagttggttttatttttttcacggggtttgtatacagtgcacctattcaatatattgtttatggtcaatttatgctttagacatgaacagtttgcactgagctatccctctgaggtttgagggttatgtttttagtgctaaaatttgtctgaacagaaaaaggtatccttctagttgttttgtttataggcaagagagtgtctcaggtccctggttaacaattagctgttttgaagaaaagaaaactggtgaaaaacattaattggaagctgaagtcttgttagaaagtaaatgaggaaacacaggttttcttgtgggattaccaacacctgtgcccatgaagtatccccttttactcagctgttgctccatgctggcctttactacaaaatgtaaactcagagtgatttcagttttgatttttttaaatgtattttttattttttatgtgatatgtaataactgcacatatttatggggtacatgtgatattttggtatatgcatacgatgtgtaattagcatatatatcacctcaaacatttaccatttctttgtgttgggaa

SEQ ID NO: 6624 - DNA, 6000 bp, Homo sapiens
ttacgcatttctaacaagctttcaggtgatgctctgatgttggtccagagtacatgattatagactttattatgaatatcagtgaaactaaatagtcttctagacagtacaggggtcctcttaggagttttctcaagagattacagtcacaatgcatctgcagtctgatggcacagacatttgtgtttgggcaagcagttctcccattcctctcaagagtttattcaaaactcttcagtagatgcgtcacttggtcccactttcaccacccacctcagcctcccgaagtgctaggaatacaggcatgagccactgcactcagcgcatatgtcttatttccaattatctagggattttccagacatctttttgttattgatttccaattctcttgtggtcaaagaacatactttgtatgatttaaaacctcttaaacttggccaggcgcggtggctcacgcctgtaatcccagcactttgggaggttgaggcgggcggatcacaagttcaggagattgagaccatcttggctaacacggtgaaaccccatctctactaaaaatacaaaaaattagccgggcgtggtggcaggcgcctgtagtcccagctactcggaaggctgaggcaggagagtggtgtgaacccggaaggcgcagcttgcagtgagccaagattgtgccactgcactccagcctgggtgacagagcgagactccgtctcgaaaaaaaaaaagaaaacagaaaaaaaaacctcttaaacttatcaagatgtgttttatggccaaatagtttatttggtaaaggtcctgtgtacccttaaaattatgtagttgttgggtggagagttctataaatgccaattaggtcaagttggtcaatggtgttgatcaagtcttctgtatccctgctgattttctgcctacttgttctttcaattattaaaagattttacttgaaatctttaactgtaattatgaattcatctatttttcctttcagtttaattcgtgttggagcatgggatttatgtttcattttaatttctcagatcactctaatatgcagccagcgttgagggacattgctttaagccaatggttctcaaacttcagcatacatcagaatcacacagggaacttgttattaatagaatagattgatggacgctactcccagagtttgtggggtgaggtccaagaatttgcatttctttcttttttttttttttttttttttttagtacagacggggtttcaccatgttagccaggatggtctcgatctgctgatctcgtgatccacccgcctcggcctcccaaagtgctgggattacaggcgtgagccaccgcacccggccaagaatttgcattttttatagttcccaggtatttctgatatgctgatccaggagccacactttaagaatcacagtctaagccaacatttctcaaccttagctgcatattagaatcatctggggagctttaacaatcctgattcaccacacaacccagatccatccgcttttaaggaatagaatgtgaggcaagtttccactaagcagttctctacttgacttttccctttggcttagtgattttggggtcccaagatttattttcctttcacaagttccagcactttgggaggtaggcagatcacctgagtgcaggagttcaagaccagctggtaacacagcgagacctcatctctacaaaaaaaataccaaaattagccagtcgtggttgtgcatgcctgtagtctcagctacccaggaggctaaggtgggagaatcacctgagctgggaggtcgaggctgcagtgagccgagatcgtgccactgcacttcagagcctggggcacagagtgagaccctgtctcaaaaaataaaaacaaacaaaaactagagctcttctgatagcccaagagccagtttagagattcactaggcaaagggccacgagaggcagatgggaatatttagagatgaagtcatccagtccatacagctattctataaaaggggaacctaggctgggcacggtggctcacgcctgtaatcccagtactttgggaggctgaggcaggcagatcacctgaggtcagaagttcaagaccagtctggccaatatgatgaaaccccgtctctactaaaaatacaaaaattagctgggtgtgttggtgggcacctgtatttccagctacttgggaggctgaggtaggagaatcgcttgaacctgggaggcgggggttgcagtgagatgagatcataccattgcactccagcctgggcaacaggagtgaaactccatctcaaaacaaaaagaaaaggagggggtggggaacctggcttgctgtgggcaactagaaagtatgaaaatagtccagaattgataggcagcagatgaggcagttcttacctcactgtgcccctaagcttcagaccaacccacatagccattgacagcagatatttgcacttggatatcctaaaagcatttcaaacccacttccaaaagtattccccccgacccatttatcccatcaacccccacctacttcgcctttggcacccaactcaataaatagccgagggcaagaacccgggaatcatacctctccctttatctccatgtcttcaaagttaccaaattctgctacaagtcttttagatccatctcctcctccctatttcttctgccacagttcaagccctcagtgtccctggattttgttactacagatgtctaacaggtgtcctggcttccacttcttgacctgtttcaacacgtctgctgccctgccagccaccatagagagctttctaaaacagaaagtgtatgtcattgccctatttattattcatttgttctctacccctggcaggacaaagcccaaagtcacaaacagtcccaatgtatttatgattttgcctctggcctcttctcacatgtcatctttcaccactcataacttcagccaagcccaagttttgcagttccttcaatgccacctttggctttgacactaatggctcactcttcctggaagtgccccccttcttctaccctttgcctggctaaaattaactcacccagactcagctcaggctggtatttttcctggcaccccttttataactccttttgatacttccataacatcttgtgcaaacaagagtcactactcaccctgaactgtgtttgctcacacatctgtgtccctcgttaaactatgagctgtggggtggcaggcacactgtcctattcagcatttgatattaaatattcatccaacaaatatctgaggacctactatatgccaaatactgtagatgtaaagggtatagcagtcaacaaagcaaagacaccccttgctatgaagtgggaggtggcataaataaatgaacctatacatagaatgaaaagtgctgtgcagataattaaaataaacaataatatgaaagtgactggacaggccgggtgcggtggctcatgcctgtaatcccaacactttgggaggccaaagcgggtggatcacctgaggtcgagagtttgagaccagcctgaccaacatggtgaaaccccgtctctactaaaaatacaaaattagccgggtgtggtggcacgcgcctgtaatcccagctactggggaggctgaggcaggagaattgcttgaacctgggaggcggaggttgcagtgtgccgagattgcaccatcgcactccggcctgggcaagaaaagcgaaactccgtctcaaaaaaaaaaaaaaaaaaaaaagagaaaggaaaagaaaagaaagtgactggacaggtactttagattgggtatgtcaggaagtcccgtctggggaagcgacattgaagctgataagtgaatgtcaacaaggcaggcattctgagctttggagagaagagcactccagcagggaggactaccagagcaaagtccgggcggcccaccagagcaaaggccgggagggccaaaggtccgtgcgccttaaagtgtgggaaagtagtgaagatggggagacaggaaggcaggggccagatttacctttgcaggctagagtagagttttgatttttttttttttttttttttggagaccgagtctcgctctgtcgcccaggttggagtgcagtggcacaatctcggctcactgcaacctccgcctacccggttcaagcgattctactgcctccgcctcccgagtagctgggacgacaggtgcgtgccaccacgcccagctaattttttgtatttttagtacagacttggttccaccatgttggccaggatggtctcgatttcttgaccttgtgatccgcccacctcggccatccaaatgctggtattacaggtgtgagccatcacacccggccaagtttttattttattccaagtgtgatagagagagacatgatctgacttatatgttttgaaagatggctctgggactgttatgtggctactgggctgtccggaggggaaactgagacccgtttggaggagagggaagttggtggcctggatagagtggtggcagcagttctggagaaagtggatggatctgggttatgtggtgagtcagagtggccaggaacaaatgacaggcagatgaattagggtgacccttagatttctggctgcatgcaacactcgggtagttactggggaaccgagcagacgctcagacacttccgagccttgagaaatccgttctcccgccaggcttcggtgtgagttaaagtcgggcagccggaaagcgacaggctcagacccgcagccggtggcctcgtagcgccgggacgccgggacgcctggataccgggagagcgctgggactctccgagcccggcgcgggggtttccgcatcttacgggcggggccggaagaggaagtcgcgctgctgtggcggccgctgtagcagcggcggtccagtcgtagcccggccgcccgcgcctgtccggtccggtccggccacggaggcagcgcagcggcgggactccgagcctaccccgccgagtgagctgcgccgcaccgtgccgtcccacccggcacccaccagtccgatggggccgcagcggcggctgtcccctgccggggccgccctactctggggcttcctgctccagctggtaagggggcgggaaggcgcgcaggcctcccaggggctgggcggggccggggccaaggccggggctcccttcccctactcctcgcccggcctcccctctgcccgcacctccgcggcctgctctcgcactcctctttcctcccctcctctttccattactcatctctttccttccaccctcctcttttccaccctctttcccccaactttcccgccccccactcggttcccgcccattgaagtctggcgaaatacctaccgcaaaaagatcagaggagccccttaggttgcgttgaccttgatgcttctcgatagttgctcactgtcccagcatatttaaaattgacctctgggttttattgtctaagcctttcttaccgctttttacccttgggaagaaaaaaaaattatacaaggcgccagtatgtttagcggttcgaggactgcactttaattgcactaacacggatgtctttttaaaattcccttcccccactgtagctcctgcttcgccttagggctcatttgattctgttatgagggttttttttttttggagggggggttttaatagcagtaatttaaaataacttttaaaagaagacaccaaaatgtaatgcttttagtggttttcagttttctgcctaatttaaagggatgggtggggagcgtcggttaaatgtaagtaagaaatatgtgttcatagatttgttttcatagtcacagagaagtaatagtgttttaaaattcagcctcaagtaattcgagcttcagtgtgggagtggggtgtcaggaacccggtgtttcagtttttgtttctagtgacttttacttagggagtttcaggttggaaacttacgcatg

SEQ ID NO: 6625 - DNA, 6000 bp, Homo sapiens
tgcgaggtcacctagagttaatttgacacagagatgagtgtctccattcaatttgttagtgacggaataggttgcaattcggatacgaaagcttctaccttaaaagcaggattaaaaatgtaaaacaatgatgctcagatgtatccctttttgaggattttttaaaagccttaaaatgtagggtagagagctgaaagggcgagaatgaattcccctaaggaggtttttttcatcttatagcagtccttttttgaaacttctgcttaggtccagatttttaaatgataacatgaatttaaaaaacaaatgaagtgaggaatggaaaacttgatctctctcaaaagatgtatttgaagtatgtagtacttttacgtagttttaaaagcatttcagctcatgtaagttatttaaaagcttctgtgataacggaagtttaagtcaatttattttcaaatacctaggattctgaagtatggctcacacttgactggaggtaatagccgaaatctttctaattataaagtgaaacaagactgttgcaattgtaataaataatgaaatggaatggggaactgcaatgtgatctaatagtatttgttaaatacctattgaattaaaagcggcaaaagcaaagaaacttaacactggaaaacaaatctttgaggctttgaagactttcttcagagcagtgtttcttaaaccttttgggggaggcatgcaatgggggaccccttgaagatctagtgaaaagctgcagaccctcatccacatgggcaggagggcacaggcacacacacttggcaatttctgcagttccgtgtactccctggagcccagtggggagaccaatccgcaggtcccatgttaagaacctcagctttgacactgcattttaagaaaaaaattgcaccatattgacgtccctcatttggaattgcttgagatccaggggcaactttcccagcatctaggtcccaggtgggcagtaaaactagggctgttttcacttaaacggaaacaattaggccggccatctcgcaggaatgaggcgatgccaggtgaaaagccagaccactagttgatgccagggaaagaatccctttattgaaaaagcctacgctctttcagaaacgcgcctccatcctctcagagggccccacccacaggtcagtggcacaggcggagccccaaggctgctgcggctccattcacaccaggagacgaaaacttgtctaagctgagaaggaaaataggctcttagaaacactgccttcgcccttcgtttacatgtggactcaaagaatgtcagaggtagaagagactccctccttcaccctgtccccaacctcacagatgagaaaacagactccagtgggttgaggtgcttgccaaggtgacatccccagctactcatgcccacagccctctccgcagcacctcgcagcctggccaggggagaagagggcgtcggcgtcctcgccccacacccccagccgcccacctggccggggcgccacggggaacagagaccccgcctaccggcaccatggagtaggtcatcatcatcagcatgtcatggctctcggcgcggatatgcggcgcgggctcgccgctgtggctgcgcttgttgcgagctgagctggccgggtcttggggtggtgcggacgccccgcgcggcgcgcggctcaactcggccaggaaggagcgcagggcactgtcctcgcgctgctcccggccccgctgcgcctccaaagcccgcagcgccgagctcagcccgcgccactggcacagcgcgaacaccgtgcccgcagcgttgagcgccgagagcagcgccacggccgccagggcgccacgcaggccccaacccgcgtccccacggcctccctcagcgcctcgggccatgctctatgcgccttgggcagggcagggcttggcagcctgcggccctggcagcctttatacgcctcgggcaagccgtgggctggtggcagcgtcgtgagtcaagtcaccctttggcccagctggcggggcgggatggggacagtagtggtggcgcccgagcagcccagagggacaggcgggcagaagcaggagaggagccagtggaggcagcctgcggaggaggggctggcagggctcgtgctcccagagtcccgccagctgagcaaaccctctcctcctcttcccactgctctgcctgagggcattgccgtggcccagacaggcaaagcaagggtcagactgagggggagagcaggaattcttatggagagaagtctccggattccacccccttctacccccacactgccctcttggagaaaaagatcagcatgcccagatgctaaggcacgtgcccactgtccatgggaggtctggtcctggcccgagcaccaggctgcgcatcactccccaccatggccatgaggctccacgaggccactgaagaccccagatgatctttcccaggaaggggatggataggggcaaggagacacttggcactggaaggcaaaaaaggccacccatcagaaccagaaaagcccaggactgcctggccaacaggactcgtccttgaaaggagagttccaggatttgacaagtcaggaactctccgatgagatccatatctggaaaatggcaggatggtgaggaaaaaaaccccaggaatcaggagacctagttctaaagccactctgttgctactcagctgggaggctttgagcatgtcccaagaccatgaggaggtgctttctggcctaagggttggagagctgggccatggttgggttcttacctagccctaggaaaacatgttttcccatgcctctcatttactcctcacaacttttatgttgcccaatacctgctctgcctcgagggtcactgtcaaccaaatgcagagtcacttttgagtctcctcagagaacctcttcactcaagatctttctcagcttctcctagaatggctctgcttccctggggccccaggacctatgggaaactaacgtagacagcaatcttcaagccccatgttaagaacctcgggtttgacattgtttaagaaaaaaaaaaaatcactctgtttggatgtctcccatttgggagacccaaccagaaggcaggattgctgtttccatagcccaataactcaaggaagaggtgcctccccgccaatgagccagctggagcagttatagagaaaggacttcctctatcagagaccacactgtttcagcacctgagggagaccagtaaaatgatcagagagcaagctccttttgacttaatggtaggagctctgtaaccatctactccccaaagattcacattctgatgtggtttggatctgtgtccccacccaaatctcatgttgaattgcgattcccagtattggtggtggagcccagtgggaggtgactggatcatgggagtggtccttcatgaatggtttagcaccatcccctcagtgctgttctcatgatagtgagttatcatgagatctggttgtttaaaagtgtgtagcatctctcctggcccctcttcctcctgctcccaccatgtgagatgttcctgctcctgctttgccttcctccatgagtaaaagctccctgaggcctccccagatgcaggtgctgccatgcttcctgttcagcctgtggaaccatgagccaattaaacttcttttcttgtaagttacccagtctcgggcttttctttatagcaaggcaagaatggactaatacacataccaattcttgcaggtaggattttttggcacaggagagaaagctgagtagtatcagacttcttgccccctactctccagggtgagccagggtagagcctctgagaatgcacaaggaaactgaagtgacatctcaatcagaaattctgagtcaaagtttagattcctgagttttaataggaacattgaccaacttcagtattcttagaagagcatacaggataagaagaaattaggaaagcatgaaggtccaagtgtttcataaagtacccccactgtggggatatgatgactgggaggggatggcagtgatgtaaaaagctttgtccatttcctcccaactcaaacgttctgtgacctacttgaagaactgtcatgtatccttatctcttttcatccaggtatcaggtttagggccaatggggaggagccactgagagggagggttgacactcagcatcattcagatcttcatttaattcagtaaacacttaactgagcacttcctgtgcctggtatgataatgggcattggagatacggaagtaaaaaagacaggcagattaccctgtgagcagctggaacaccgtggagccttctgggcttctctttatcctaacattcattgcagttactgttgactgatcatctctcagcaatacccaccattaaccatggaatagaagcctcctgaggctaggggccatgtcacccccaacacatagcacagttcctgatttggaattcactattacccgttgaataaatgagtgaatgaacgaatgaataaatgaaaagctgtatagtgaaggcacttctatgtagaacaatgtggtgtgtggtggggggtgtgatcttatgattacatgtatatagatttttgtccatggttcttgtccataactcccatgacacttgctgaggtcttttgctataatgtagaggtgctttaggcctcaggaaacagaatatttctctggccttctttgccctcctttcatccacccaaggcgggactctataatctgattgtgggtcataagaccctcattccagaggaggtcatgccccataccctggaggaaggaatgctgcacaaagagaggaagaagaatctggacagacagaccttgctgagattagatcataccctttttgtccaatcacattttgttcaatcacatgcttcagtcatggacaacaaatgaaatctccataaaaggcccaaaggacagggttcagggagtttctggagggctgaacacgtggaggcaaacaggaaggtgaagaagaacttatcctatcaggacggaaggtcctgtgctcgggatcttccagacgtcgcgtatgtatctcttaatctgactgagccctcaacctgtgggatcagacactctttccaggtagatagtgttggaactgagttggaggacacccagctggtgcccgctgcttggtgtgtgggggaaaatcccctacatttggtcgcagaagtcttctgtgttgatgactgttgtcgtggtgtgagagcagagggaaaacactgcttgagtgtttttctgaaataggagggcctaagaactatactgttctatgccacagaactggccccctactttccttgaaaggctggctatccaatggtgaggagaggaagtggtagcctgaaccagcctccccatttccccacctcccaccccagttcagagcccagatccagtagacagagcagagatgaggcctgcttggagccaggcaggctctattagacaacttcaggccaagaagctgcccctcttgggatgcaggactcaaaaggcttgtagcatggccaccccgtgggctgggttggtggaaagcctgggatattgctctggggcaagaggggcagaaggaagcgcaaatgaaaagccagactcctttcctaccagactccactgtcagatccctctccaactcttcctgtgtgggatgatggcatttttcacagaagaagggggacatgttgatatggcctacaaggtagacatcttcactcatctctcaccctaaagtggctgtgcccaagcagctgccatgctctgccctctttcctcttctcctctatcttctctctccaaccctctttccaccgcagtgccacacagtgacctatctccatcactggcctatttcagtgttgcccactttaaggcctaactccgagtacccttcctcatctagccttgacttcctaggccagtcccaagcact

SEQ ID NO: 6626 - DNA, 6000 bp, Homo sapiens
aatcataaataggtacctgcaaaaatatgaaccaatattctctgtactccttctaaatggtcagtgttctgagcctagcaacaaaataatctaactagatgaaaacttattgtattcacctgcttataagatgcataaagattcacctttacaccagagaaaggtatgtaaaaactgccccatgtccaatgcacttacattagagataaaaagccaaatgcataatgaatgagaaatagctaagagtctgagttacagtcaccaaaaagacaataatttaatgctacctctagcagagaaagagagcagatacgtaagtttttgtttttcatcctataagtggcattcttacctaaagcaaaagcaaatataacaaatcagaggccacagagatggtcaaagctagagtttgaggctgtgatacagatttttttgtaaagatgccgataacttcttctatacccattttcaatgtgacttttctgttcttcccattgaaaggtggatttgttttcctagttcttgaatctgtgctggctctgtgacttgttttgaccaaggaatatgatagaagtgactctgcccttcaaggctaagcatgagactgccatgtacaaacgttggtctagtctatggagggcaagatgccacataaaggggaactgaggcaccccagacaacaactagtatcaactgctagacatgaggccatcttggaccttctaccacagttcactgcagttgtatgagtgaaaccagcagaacttcccaaccaattcacagaacatacgaaataataataattgttgttttaagccactgtgtttcagaggggtttgttaaagtgataactgatataggttcacacctatgatattttagattaaaatgcatcattgctatagtttatgactgaaaagcaatacaggtattgttacaacatcaatttcaggctttaacacaatagactgcaaaatgaactggtaacagaaagtcagggcttccattgctatactactgaagaaaccagaagcttaaagtgttagacatcctaggaaaactgtaaggtccccacaactggaagaaatatttttaaaaaataggtattagatcctcaaacaaatggaatcacttgagaatttaatatttaaattatatagatagctcaacaagaactaataacagatatatcaaagatcaacattacgatgctgtagatttatgagtagaaattccagttacctctgtaggtaagagtaataatgacacaagtcatgccccttgactctttttttttgagacagagtttcactttctgttgcccaggctggagtgcaatggtgtgatctcggctcacagcaacctccacctcccggattcaagtgattctcttgcctcagcctcctgagtagctggtattacaggcatgcaccaccacgcccggctaattttgtatgtttagtggagacggggtttctccatgttggtcaggctggtctcaaactcccgacctcaggtgatctgcctgcctcggcctcccaaagctctgggattacaggcgtgaaccactgcgcctggctgccccttgactcttgaagataaagtccttgagttccgtggtgtagtggacaacctccaaaatggctgctcacgactctcccttcctggcactcactttcttgggaaatagtctcccacactaagttatagctggcctgtgcacccaataaaatatggtggaaatgatggcgtgtgacttctaaggctagtttataaaagacattgcagtttctaccttggtctctctcttggatcacttgctgctggagcagtcagccgccgtgtcttgaggacactcacacagcactatggagaggaacacataggaactgaggcctccatctatctattaggctcaacttgctagccatgagagcctgccatcttggaagcagggcctttaacttcagtcaagacttcagatgactgtatccctggctatttcttttttagatagctttattgaaagtataatttaattaccatacaattcactaatttcaagtatacaattcaatgatttctagtaattttacagaactgcccaaccatgaccacaatctaattttagaatgtttatctcatgccaaaaagaaacctcatatccattagcagtcactctcagttccaccttcagccccaggcaaccactaacctattttctgtgactgtagatttgtcttttcagaaaatttcatacaaatgatttcatacaaacgaattatgtggtcttttgtgtccagcttcttttatttagcatgtagctgacattttgattgccatctcatgaaagactctgaaccagaactttcctgctaagctactactaaattattgattcacagaaactgtgaggtaatgaatctctactgttatttttggctgataaattttggggtaatttattgcacagtaattgataactagtacacatcggtaggtgatactgctgggaaactaagtcccacatttaatggcacacattcaatgggccattaaacccaaccccaaaggtactattaagagttgtgttgggatctcaaatcaaagcaaaaagaaaaaaaaaagagttgtggacatgataaattatatcttacaattcgattagcatattttgttaatgatacaaaactgctactttttctaatttttaaaagaaagccctttccaaaattagaagaaagaatttccaatttgtttttaggtccatgaaaaaatttgcatgaacaaggaagagatgaaattgtggacagtcaaaagtgtggtctagctgccctggtgggctaccaaggaaacttgccatattagtctggagtgagttttgactgatcagattggacaataaaaggctcagctgtaattccaggagacttaattagtcatttgcaaccttaagatacagctatcaagaagccatttaaaggattcatgagggaagagaacaggtggatacaggcttcagattttgagtttgataccgagaggaagaaagaggctcacaacttcacaactgtgtgaatgggccaaaacttcatggaatgctgtaaaacaagagccaaatgtgaaatggtttaaataatgtgaattagtaacactcttggaaacctgagtacaatttgttgtttgatgatagttttgacttggtttctaatgcagtgaaggtcaaagattaagagactcatctagaatctagtagtaacaaaaaggaacccttggatatggcgcgggggaagggaggaagggggggggagggaaggggagggaggggggagagagagaaagagagagaatgccgcaggtcattaggtattatttttcattcctcctgcaactttctactgaaaagattaccaacgactgacagatctttgcctccaatcttccccacccttccctttatgcttcaaaatgctacaaagtcatcttcccaaagcagctctgattatataaatttttgctcagaaacatctgatatacccccactgcatgcagagtgaaatctgggcttcttggagcattcaagactctccataatatgttttggtaggccaagagttagaccacttggataccttgatctcttgctaagtattatttactttccctaccctataaatcatctgcctcaaacattaatctttgtaccttcaacaccccctctattttctgtactgtatttgcagcatttcttgtctatctcagcctgtcaaaattaaactcagcgtttatgtcaggttatgtctccataatgccttatccacgcccttagtcaacattcttcttcctcttctgtggtgcataaagacttttatatctcaatcacaccacctttggcgttctgcctggttttacagatagttatgtcttggtgtcccctacttccttaccctgtgatttaagcatagtatgggttagaacatttgccatgaattggcctgtggcagggagctgatgatccttgttatcaaccattcaaagtttagcagatagtttggaaaatcaggcgattctgctaattcatgaaattactcatgaaaaaaagtcgaaaggagtcacccgtctctaaggcggctttttgctgtctagaataaccgtgacaaaaggtgggagcaaaataattagctttcaggggagtatggcttctctaaatagttgcaagatgcctacattgtttatgtaaaataaaatatcttatgtactgcactttcgaaaagactgaagatatctaagatatctccaggtggaaattcccggtgacgggtgtccttctgaggtcaacggcactgaccattgcacactgtattctggaatacgttcaacacagcaaaaccggctcgtggcgcgtccccggcgtccgactgctgcgtggccccgagcgacctgcaccccactcgcccccgcccccacctccgccccagtccgcagcggctacagcccgggaggctccaagggaactcccgcacgtctgcgcgcgcaatcacgggacggcgggtcggcgtggcgcgcgcaattgccctggaaaccacggcgcgcgcacgcgcaaacgcgggtgatggggggaagaaagactgagctgagagctttgccgcggggggagggctctacctcgctcccccgcggtgggcgcgcgcgctggcccgctcccttgctgcacgctcccggctcgcgcgttccccccggtgccctcccccgcctcacaagcacccttgccctcccgcatttgtgcgccggtgcagcaggcagtgggaacatccgggcatttccgcagctgagcggcgacccgggcggcggcggcggtcgaggagctcccatggcagggacgaggcggagggaaggcgaaaggggggcgaggagttaagccagagcctccgcggggcgggtttccgagggaggcacagagggaaacggctctcgcagcccgaggagggtcaggcgcggagcttgtcgcacctcccgcgcattctgtccagcccgggctccggagatgcatctgcatcaggtcctcaccggagctgtcaaccctggagacaactgctactccgtgggcagcgtcggggatgtccccttcacggtgagcggcggccgggagccctaggggaagataccaggggccagacgcgggggcagggacctcctgtccagggcgcacgcctcctcaggaggctgtgagatgttggtgggccccacccgtggcccctttgcagccttggggtttagttccccctgggacccgtgggaccgtgggtcctgcgtctggtgtaggaaatcacccgttaggggaaaggcttaggaatccaccgcactctccaccccaagcaaacgggcctgaggtgactggactagaaggctcctcctagggcggcccttcggtctgcggtggaggaaagtggtggtgcggctgaaaccccagagcgtccgtttcgcagctgctctcggcgtggaggcgaagagacttggtgttggtctcggagcgtggaggtgaagagacttggtgttggtctcggagcgtggaggcgatgctgcgccttggctccccctgcccgctgtgctagggcagcgaggagctgctggagtctgtggctttaagcctgactctgtatctcctgataatgcaggatcttaattccaacaaaaagatagaaaaattcatcctccgcgcccgaaagatttagaatggaaaggttagagtcacagtggcttggagagctgtctcatttatcaggaggtcgtagtttggtaatcctcctagataatattttaatctgtaaggtagccttttttttaatatagtaaggcaatgtgaaaaatttacaacagtgcttgtttgagaaaagtgtatgtatacataacgttttagaatctccttaaaagctagatgaagtagacatgtttctcaaggagattggactcatcagtcctttttgagagtggaaatgttta

SEQ ID NO: 6627 - DNA, 6000 bp, Homo sapiens; identical to SEQ ID NO: 711

SEQ ID NO: 6628 - DNA, 6000 bp, Homo sapiens
atgttccaagaaaaagtgattggaatactgttccaggaaatgtgctgacaatgtgataggcattgtcaagacagacccaggctttgttttcacggagtttatagcctaatgagttgcatacatttgggggtagtaaaatatcatgcaagtgaaaatgagaagataagaaagccaagggtaaaatcttgaagatcactaattgtgcagtaaagagaagaaaaagtcacaggaaaaagatgtagaggaaagtacaattaaagtaaagaagaaagtccagagtgagtgaaggtttggaaactgttagaagagggagttttgaggagagagtgttgtctgaaaggtccagtaagataaggagtgaagatgtctagtggaattgatcactaacacatctttgatgtctttgatggccctagcaagagtagcttcttacaaagctaggtgggaacaaattgcggtggattaacaagcagtttaaaagcaggaccaaaaggaagagagactggagtaagggatataagttaggtgttctgcagcaatctaagctagataaaatactataattaaagtaaagcagtggtccaaacttgtaacactggaatagtttcagagtgctagccaatcagagcaacagcagtgagaaggggagcattaaaggcacaaagacatttttagggaataatcaatatgacttggtgacaaaagaataatctaaaatgattcccccccttttttttttaaatagagatgggatctcactatgttgttgaggctagtctcaaattcctgggctcgagtgatcctccagccttggccttccaaattgctaggatttcaggcgtgagctgcagtgcccaggctaaaatgattccaggtttctgggatagtggtagtgccagtatcagagataagaagttaaatatattgagtttggcatgacagtgggacatccagcaggcagtttagtagaatttggaaattcacaatgtaattgttgaaatgtttaccagcattggccttcggtctgtgcaacaagcattctcctctagtattacttgtctattacactgtataatatatgagcatttgcttaaaagctgaatttcccattactaaaacttgaggataacttttattatactggtaatatcaaaactgtattgttcctgaggaaataatgctattaaaataattacggctttcaagtggatgtttgagtgttcatgcagtgaccataatagttacattttttttacttaatagttacatagcaattattatattccaggtctattaactaatattagaagataattagttaaaattattagttaaattagttaaaagtaactaataacagatattaactaatttaaatgtaatcatcaaaacaatctgctgaggcaaatattttttcattgtcattttacaaaagaaatattgaggccaggtgcagtggctcacacctgtaatcctggcactttgagggggccaaggtgggcagatcacttgagcccaggagtctgaaaccagcctgagcaacatggtgaaaccccatctctacaaaaaatacaacaaattagcccggcgtggggcccccccatctgcagtcccagctacctgggaggctgaggggaaggatcacctcagccctggaggctgaggctacagtgagctgtggttgcaccactgcaccccagcctgggtgacaaagtgagttcctgtctaaaaaaaaaaaaaagaaaagaaaagaaaagaaatattgaggttagaaggcaaaaaaacttggcaaaagtcacacggtttatagatggcagagctaggagtgaaacccaggcagtctgtgatagtgtagatgcagaccttatactttaatatttcatcagttttccatacatttgcaaaatatcaataatgaattaagttaaaatagtagcccaaacttgtaacactggaataccattcattatcatgctggtatgtaatgccattcgtgcatgctggtatgtaatgccattcgtgcttgacaaataaaaaaaatacagtttttctttttttttgagacaaggtctgtctgtgttactcaggctggagtgcagtggtgtgatcacagctcaatgcaacctcaacctccagggttcaaacagtcctcccatctcggcctcccgagtacctgggactacaagtgcataccactgcactggctatttgatttttatttttaattaattaattaattaatttttttgagacagagtcttgccctgtctcccaggctggagtgcagtggcgccatctcgactcactgcaacctccgcctcctaggttcaagtgattctcctgccttagcctcctgagtagctgggattacttgcttcagcctccagaatagctgggattacaggcacaggccaccacgcccggcttttttttttttcctagctctgtcgctcaggctggagtgcagtggcgcgacctcggctcactgcaagctctgcgtcccgggttcacgccattctcctgcctcagcctcccgagtagctgggactacaggcgcccgccatcacgcctggctaatttttgtatttttagcagagacggagtttcaccatgtcggccaggctggtctcaaactcctgacctcaagtgatctgcggaccttggcctcccaaagtgctgggattacagctgtgagccccgtggctggccaaaataaatacattttaaaaattaaaaaaaaaaatacagtctttataaatgtaattttcagtaatcatcttagtaatgcaaaatatggctttggagttttttccagttgaattttaagggaaagtgccatttgcctctaatcactggaattcattataaaaatactgtgcaacagaaaacatgctataaggtggtttaagagctggaaaataaaaatatcatttgttgacagcactaccacaagagattagtaaaaagcacaggtgatatgagatgtaatgtctgcaggtaactatttcctaagactgaatattttaatgaaggaaaaaaaaaccattcgtgagattctgccatcctttgatgattccatgtatctcattataaatggatacaattatgatggttttgaaacgtccgtttttgagcctattaatgttgcagcaaaactagaatcattcatttctcaaactgagaattaaagaagactcttatggccaggctcggtggctcccacctgtaatcccagcactttgggaggctggcgggcggatcacctgaggttgggagttcgagaccagcctaaccaacatggtgagaccccgtctctattaaaaatacaaaaaatttgctgggcgtggtggtgcatgcctgtaatctcagcaacttgggaggctgaggcaggagaatcgcttgaacctgggaggcagaggttgcggtgagtcgagatcacaccattgcaccccagcctgggcaacgagagcgaaactccgtctcaaaaaaaaaaaaattctcttcacttatgttaatggtaataaatggtataaaatatacaggtaacagtataggaattccagtttattacagtatcaataacattaaggccgagcgcagtggctcacgcctgtaatcccagcacttgtgggaggccgaggcgggaggatcgcttgagttggaggttacagtgagctatgatcacaccactgcacttcagcctggcgagacagcggataccttgtctttagaaagcaaaacaaaacaatttacacacacacacacacacacacactctccctaattcggcttgagttggaggttacagtgagctatgatcacaccactgcacttcagcctggcgagacagcggagaccttgtctttagaaagcaaaacaaaacaatttacacatacacacacacacacacgcacacacacactctccctaattcggcctactcaagcacgataccaaatagatgaagaatatctaattaaatggccataaaaagttctagttcatgacatccaagtttaaagaatcaaaatgagttacgagaaaacaaacacaagctttaagaagttggggagaagatgtgcgtggattcgcttcaaagatgtgacagagagaaaagaggacattttctggactggagattcaagacagtctggttcaggttgcatgcttttgcaaaggctaaagccttagtctgtgacataaatttgtaaagagctcggaaaattacatctcggacatggtgtctttttttcctgctgcttgaaggtctttgcatttatgttcgcatcactggggcagctgccgctataattactgcttgttgggactttttgtttacttggtagctgtggtgcaccaagagaggcagaaaaagaagaaaaaaaacctctgttacttgtgacgttaagaagtcgaaagcagccctgcttacatcttccacggaccattttagcccaagggaaggtcctcagcagctctaacacgtagcggagcactatctccgcgtaggagcgctcccgccccggggcgggaccaggacaaaccccgcctcccaagcccaatcccagctctccgccggcggacaggaagcggcggcaggcctagcagcacgggaaccgtcccccgcgcgcatgcgcgcgcccctgaagcgcctgggggacgggtaggggcgggaggtaggggcgcggctccgcgtgccagttgggtgcccgcgcgtcacgtggtgaggaaggaggcggaggtctgagtttcgaaggagggggggagagaagagggaacgagcaagggaaggaaagcggggaaaggaggaaggaaacgaacgagggggagggaggtccctgttttggaggagctaggagcgttgccggcccctgaagtggagcgagagggaggtgcttcgccgtttctcctgccaggggaggtcccggcttcccgtggaggctccggaccaagccccttcagcttctccctccggatcgatgtgctgctgttaacccgtgaggaggcggcggcggcggcagcggcagcggaagatggtgttgctgagagtgttaattctgctcctctcctgggcggcggggatgggaggtgaggcacgactgcgagcgccgggggcgccgcgaccacggcggagcggcggccgggccgagcggagcccagtcgcgcctcgcggcgtgcgcgtcagtcagcccagccggccagcggcgccactctggcgggccgcgctccccgctccctattgtcccccgcgccccgaccgctttcccttcggtggcgggccgaggaggctcccaagcctccggcgaggccttccccgccccccaccgccctggcggccccgggaggcgggggtcgcctcccagagaagcgaagtcggggcatccgcgtcgcctggtgagagcggtggaacccaggctggtggctgcatccctccagtctgctcggcgggcgccggtgcaggcagccgcagcgaggctggcggtctcgccgtcctcgttcagcgctcatcctgctcaccattcctcccccagcccctgcccggtggcggattccgaagtcctctccgccgccgagacccgccgcgcagactcgtgggaagttgtgttgtttgcagctgggctcgtgtattgttctttacccggcgcgccggtcctgaccgaccccattctgcagaggggccgcccgtggagtggcagcagtcatcacccgcttatctgagactagtggcctcggttcttcctgtgtcctgtgtttggagagagatcacaggagggtgtgttggtgttcttgaaaacattctgtcgcccaggggaaagggtttggtcgggagaagggtaaaccatttggggatgttctttgatttgtaggctggattgggtctcttagagtagaagttcggtccctgggtgacccaacttgaagagtttcgttaaactttcaggtggagtagatgtacagtgtagttagtggattgtcaaaacagtgccccctcccccctgc

SEQ ID NO: 6629 - DNA, 6000 bp, Homo sapiens
tgcagtagaaaataatatttactctgaggcttgatggatgaggcaaagttcaccactgaggaaagcaggaaagggcattccagcaggaaaacaggatggaggaaggtacaaagcatgaatgagcctggcctgtccagcagtggcacatggagcggtgaagagtgaagatgtgggggaatgaggctgcccaggtaggtcagagccctgctgggaagagtttctggagaggggtcatataatcagaattatgtctcagaaagagaattctggctgtctcagagaatgaactgaggtcaaaaatgtctgttacagctgagaaagagacattgaagtcactgcagatttttccctggaaatgcctccaaacaaaatagacattgtggtttgtccataccaagagtactctgtgtggtttgggtcatgacacgtgaattcaacaaggatttattgaggtcttactatgcgttcagcaaggccagctgctgcaaagactaaaaaagccaatgaaataactatggcttttttcatcacctacaatataccagacattctttatacattttttaatctttttttttttttttgagacggagtctcactctgttgccaggctggaatgcagtggcataatcctggctcactgcaacctccgcctcccaggttcaagcgattctcctccctcagccttctgagtagctgagattacaggcacgcgctaccaagcccagctaatttttgtatttttagtagagacagggtttcaccatgttggccaggatggtctgaatctcttgaccttgtgatccacccgccttggccttccgaagtgctgggattacaggtgtgagccaccacgcccggcaaaaacttctttttaaagactccaagaaagatttaatgtggtacttcgaagacgatctcagggcttctaagaatcttaagtgcattgtcccactgcagcctgacatgtaaagtagagagagatctatttaaaaaaaaaaaaatgaatgtgaatcttggaacatggaattaaacctcagcaagatttatataaataaagtttttgagaaaattgtatataaatcttggagcatggtgtgaaccttaataagatatggaaaatctacatggtttttaagatacttgtattaatgaaacaactgccagcttaaaccagaaaaagtgcaaaatgaaaagaagtttctagacctttcagtttctcctggcatgaatgaagcagactgagagaactgctcagctacaaatatgggccattctttttttttttttttttcttgagacggagtctcgctctgtcacccatgctggagtgcagtggtgcgatctcagctcactgcaacctccccctcctgggttcaagccattctcctgctgctcagcctcccgagtagctgggactacaggcgcccgccaccacgcccagcttaattttttgtatttttagtagaaatgaggtttcaccatgttggtcaggctggtcttgatctcctgacctcatgacctgccctcctcagcctcccaaagtgctgggattacaggcgtgagccaccatgcctggcctgggccattcttaagaaaaggaaatacatcttaaagggaggagcctagatatcagagggcaaaaccaaaaacttgagtagggcaatggattaaaacaaggatcagcaaactacagcccatagggcaaatccagcctattgcttgtttttgcacagcctgtgagccaagaggcctggcagcttcagcttttgcttctagaaggctggctgccatgactaccgtggtgtagcaaaagaggagaacctggaggatgtaagaccaaggaagagaaaggcccagcctgctctttgtcattctagcaatcccagctcaggcgccagacgaatgaagctgctttcaatcttccaaccccaactaagctacccaacccaacatgctgtggaggagcaccaagctgtccccactgggtgtcctgcttaaattgcagaattacaagcaagtaaatggttatgtttaaccactaagtttatggggataatttgttatactgcaaaggtaactgatacgagggccttgggtgcattatttaatccctggactgggcaggagattttatttggactccaatttcttcatatgtaaaaatcaagagccgggtatagtaattcacgcctgtaatcctagaactttgggaggctaaggtaggcagatcacttgagcccagaagttcgggaccagcctgagcagcatagcaagactttgtcgtctctacaaataatagaaaaattagccaggcttggtggcgtgggcctgtggtcccagctactcaagaggctgagaggagaggatttcttgagcctccgcagtcaaggctgcggtgagccctaatcatgccatgcgttccagcctgggtgacagtgtgagatctcaactaaaagatataagaataataatagtaaaaatcaaggatagggcaatttaatctctagggtccctccctgctttaacattctattattcagtgaataattgtattttatcattctatcacatttagtgagtgcctatcattgctagctaggcgctagtaggtgttgagtgcagcagatgaagtgtgaacaaaacaaagtcaagcacttagagagcaatatggacaacagcagacaatctgagggctgatgtaaacattctcctcaaccaggggggaaaatagagtcttctgactaataaaagatcttttatactggaagaactggcctcacattcctcagaaatagcaaactatgacttctaatagcttcatttttatgataacatcagtgcacatttctttagcatgatgcaaagactggtgattgtacaaatctatagaagttagaatttgtggcatgcccaagatgagcacaaaactcttttggacatttgatggcttttatatattccacatgatttgaattaaattttatcttctgtaaagggcctatcacagcacgattaggagtaagagactgtggaacctatcttgagatacacagaagggaggctgaatcgtgcccaatattactgtctgcctgtgttcccctaaccttccaaaatgttcacacaaagtaagcagataaacattgtttctgactttgaagctttcaggctaaattgaagagctataaatgtaaatcagcaattgtacccaaagtgttgcttgattttctatttggctctgtggtagggcccatcgcgtataattcctcgtgaaagcgctgggtaacagaaagctttgggcgggttaaaagacctcagctgtggccgactttgcctgtgtcactctatgcgagtgggcagagcactgaatgtctgttggccttgctatcattctctgattcccaggagtgaattgacgctcaaatggaaagtaaaaatggatgttaagataaatgggagattgaaacacagaatcatcaaaaccaggaaaaagagctgcaggaagtagtgtgcaaggaggggtttaaaaaacgcagccagagatcctcgggattctcagcgtcgctttcctgttagtttgaggttcgaatacagtatttgcgtcgtctcacatacaacaaataggtgtctgcctgcacgttgccaacgtgactcttggaagaaaagcgagaagcagcaaaaccgagcaagggagttggctaaacggctgcaagaaacacacacacacacacacacacacacacacacacggaagaaaagcgagaaacagcaaaaccgagcaagagagttggctaaacggctgcaagaaacacacacacacacacacacacacggaagaaaagtgagaaacagcaaaaccgagcaagggagttggctaactggctgcaagaaactctctatctcactctctctctctctctctgtgctgcaagaaactctctctctctctctctctctctctctctcggaagaaaagcgagtaacagcaacaccgagcaagggagttggctaaacggctgcaagaaacacacacacacacacacacacaccacacacgcacacacacaccccagcagtcatgaaagaaggagaggaaagttctttgttgaaactccgggttcgaaacacacacacacacacacacacacacacacacacacacacacacacacacacgaaactccgggttcaaagctatgggccccaccccgctcaggactgcctgctacgaggccgcgcagagatgccccaggcgcggagagaagcggagcacagccgtgctagggacaggggcgccaccctgggcgggactgaggtgggatcctggctcccggctttggcctcccagcccaggctcggggcttcctggccctcggaggccggggcgggccaggctttgcagcacagggcgaatctccctccctccccgggcgccccccgggaactggcggccagaggttaagctgacatgtttgcagacggtaatggggcgctggatgccaacagccccagctcaggggagtccagatttatgtttcttggaacaattctttcctccattgcattaacgccaaaaaaaaaaaaaaaaaaaaaaaaacacttaatcaagcccagagtctactactaaagtcttgttaatttattaacccaagccgaggctgagagctcgacgtggcacttaagaagtaaaatgaggaaaggaggaagaaacggggtccctgtgggcctcggggcagcctcggccgggctttctcggagggcagggccaggggcgctggggccgctcccgcgtggcgcggctcgggagcgttccagggcgcggtccctgcgggccggcgggccggggtgagtcacccctgacttggggtgggagcgggccgtgtaagggggaggcggggcggggcggggcgggcctcgcctcgcctagggaggatgtggcgggtataaaagccccacccaggccagccggctctgctcagcatttggggacgctctcagctctcggcgcacggcccaggtaagcggggcgcgccctgcccgcccgcgatgggccgccagctagcggggtgtggagacgctgggaagaagggtacggcctggcagggaggccccggcaactggccccggaggccgtcgggggcagggggctgaagggacggccggcactggagagtctttggggagggggctcagggacaaggtgtttggggcaggggtgaggggccaccggccctcgggccgggagggtgcagggcagaggtggtggggggtcgggcttctctaagaagccctagcgggagcggggcgaggcggcgtggggagaggggcggagggaggccccgcattccagacgcgccaggcgccgccgaggcagggcgtggccgcccagggagccgcaggtccccggcgcagcagtagcaagtgggctttccactgccctctagaaagtgccccccatctgctctaagttactgtactcgaaacaaacgcgcgcttgtggagttgaaccgaccagcaggagggaagtagcgggggaagacgagaggggggagtgtgagtaggcacccctcagccccccataaaagaagacattaaaacgtcagttattccccttgctctaggttatcttgtagcatagcaacttcggatttcactctacccggagagtttcccgcttggttgaacacattggcctcaggaaggtagtgtcccccatgattctgtggggagggttgtcctgttactcgccatgatgtgacaatgagtcaggaactgagagtagagagaagggcgtggccccggggcctctcccttctggccgctctgtgcagctggccccactgctggtgtggagggcttgggttccatcagccggctgttgagaagaaggaggggaacacagataagtttcctcatctgggaaggtggcttaaggatgcctattcttaccaccacccagagttattggagatttcaaaaaacacagtcattaggtaataa

SEQ ID NO: 6630 - DNA, 6000 bp, Homo sapiens
ggtgcattcccaattgagtgacaccatttgaagagttcattcttatcttaagaaataaaattatcaccttaagaaacaaaattctctatactctaacctttatgcctgaaaggctaacaactagctatgtcagggcaaatgccaccaaatggcactaggtttgggaaagaagagcctggtatgtgctgtgcatttcaaaggttttatgaagtcacaaaacataatccttatactgatgatgtcttcctcaccaccccaggacagagtgggcccctctcagtcatatctcaaccttctattgcactcattagagttgtaattatatagttattcatgagattatttgttttatgtttgtgcactctccaagagcctagcatagtgcctggcacatagaagatgaatgaatgaatgaatgaagaaaatgtccactggccttatcaccttccagccatatatcaattctatgatgactcaggggtatggattacaccttcattttacagaggatgaaagcttgcatcacggtcaaggtcagccattgaggaagtggtggggcaggcacttcagccaacccagacttcctaacaccaaatccttgttcattcctgcttctctgccccttgactcaccagcctcacccttgtgtctattcagatggtaacatcctagggggtaccattccctgtctaggcatgtcatttggtggccaattgccacattttgagtgcagaaggtctactttctaccctaactcattgagcaatgggttatttattggctgacaacagccccagctgatgatggcacagcaagcccttgcatgttcatctgcacaagcctgaggaagcagacaaaggattcccagagttgggaacttaagctggttgggtctgtgctgtttgtcagggggggatccttgacattcaacttgaatacctgtggtcattccattcataataataataataattctgggtctcagtttacatgctcaattcccttttaattgctatccattatttactaattaaccaagtttctgacacagccatgcagtaaacatctcagccctgttcattctgtctatgaaacccagttcacaatctagccttactggtctatgaagtccacctgtttctgccattttaacctctccatctctggggatctctggagaatacttagaggtgcatgttccaggagacaatgaacttaatgtttagacagacatgatgggtgaacacctggagtgggaataccaaaatatgtgtgcatggcccagtttacctttaactggttgtgacatgcgcaacaagtgatttcacctccacagattcggtctctgcgtctttgagcctgcagtggtttctccccaagctctgtgttcctctagtccatttaatcttctaaacagacagactgcccttgatgacaaatctgaacaagagaaacactcctgcaccactccagagctcactcgaggccctctatcaggcagaaaagatgatccctaagcctactgtggtctggaagtgcttgtaacaagattgtctttgtaacaacttccttaaggagacttcaaagccctttattaacccacacagtagctgagctggtagggacagagcagtaacaccccttgaaatgtgggtggcatctgctttttggtggctcttggaggagaagttactccatcccttcaaacccaccacggacaagtggcttcattggtcactaaggctggcctgagagtgtgcacaggctgagggtcagcacagatgtgagatcagagagggcttgtctggctgctgtggccaagagaagagggcatgacaggccaggtcacaaacccaggggtcctgtaccagaactggggtggacacccttccgcagcccatgtgacctgagcagtgtgcataggcagcagtgagtaggatcatagagcggggaggaaaccgagcctggcccctgcagcggtgcagagacacacggagggcccagggaagccagaagcacaaatgactacagtggtggcaacagcagtgggaagatttagggggtattggggcagcaggttaacaagactagagaaacactcctgtttctctagcacagcctgtaggtctagcacagcctgtagggacagaaaggtgtgatccctttcctcccccatcataaaggtcacagttgacactcaaataacaaaagacaggccaacaagtgacacaagagacttcagaaatgaagacccaaagactcagggagaacggtgtttctgcttaggtttgatgaagaacatggatggccgtatagaaatgtgattggagagaagggtgtgatctcatagtgatagactgaggggaacccagcaaggcctgtccgttccaattcttcttgacctctctgtgtagcattgctttctcctgggtatggggcaggacccctctcgaatgagggtctttaaaggagaagggagaggggagagagtgatgtttctagattttatggcttgctgtggaggagaggggctctactttctatgacctgcctggggaagagggattctggtttctatgattcacttagcgggagaagaaggggcaggagacaggaggatgggagaaggtcagagagaccttgtttctgaggccttttcagtttccttcagttcaaagtactcagcatgccaaggtgccatactttggggtatcatgttctaagccccccaaaaaagtgcctgacacacaacgggtgctcagtaaataatgtaagtccctttcttctgctgccaccccaaaagagggaccctctctcccagcttcctagtgaggatggaatgatgtattgaaccagcatgagtcccatctacttacccgttactaaggggaattgtgataagctcttcatgtgtaccccactgtgctgttctcctattctcagttcatctctttgcatctcaacttggaaggtaagaacttaatcaggatgcactgaacaattggcagaaactcatgtgaatgtaactatcttgtccagttccttaacctgtgctaagtccaggcaggcacctgaagaaaaaaaaaaaaaagcatgaaggaggcttttgcccaaatggcactatacttgggggattctgagtagggctgaaacagcctttgcaaaaattataactgaggaaattatggcagtgacaaagatcagacctaaatgactcagtctttcttctaactttcatgctgtccttattcattcctgggcataggccaaactaaccttagaaaggaattcagtttatggtttgactcagaaacaaaatcaataatagccctttcccgaaaagacccccttcttgcctgggtgccagtctgcctttgtacgattaatctattagttacaacattagaaattatggtttaggggtcctgcggcgtcaggctgcaagagtctgaaccttcccaagttgctgctggggataacatcgctattgtaaaatctaacatcctattttgcagaccctgcactggatggatcagctgacaccactcagaccgtgtgtgatctggctcaaccagttctgcgatcccacccaggaacagaagactgcaagaaaacgttacttcaacccccctgtgatcccatctgcaacctgaccaatcagcactccccaagtcccaagcccctatctgccaaattatctttaaaaactcccagaggcagggtgcagtggttcaacgcctgtaatcccagcactttaggtggatcacgagatcaagagatcaagaccagcctggccaacatggtgaaaccccgtctctactaaaaatacaaaaattagctgggtgtggcggcgcgtgcctgtaatcccagctacccaggaggctgaggcaggagaatcgcttgaacccgtgaggcagaggttgcagtgagccaagaccatgccactgcatttcagcctgggcgacagagggagactccgtctgaacaaacaaacaaacaaacaactcccggaatgcttggggagactgatttgagtactggaatcccagtactttaggaggccaaggtaggtggatcatttgaggtcaggagttccagaccagcctggccaacatggtgaaaccccgtctctactaaaattagaaaaattagccgggtgtggtggtgggcgcctgtaatcccagcactttgggaagccaaggcaggtgaattatctgaggtcgggagtttaaggccagccttaaactggcgaaaccccgcctctactaaaaatacaaaaattatctgggcatggtggcatgtgcctgtaatcccagctactcgggaggctgaggcaggagaatcgcttgaacccgggaggcggaggttgcagtgagccgagatcacgctattgcactccggcctgggcaacagagcgagactccgtctcaaacaaacaaacaaaggaacgaaaacctccggtctccggcacggcaagctctgcgtgaattactttctccattgcaactcccctgtcttgataaatgggctctgtctaagcagcgggcaaggtgaactcgttgggctgttacaggaccagtgacagaccaagggcatgccactgaaggaatccctagacgcacccttctggatgtgagacaggcggatctcacccacgcctgccagcagctcctcggagaactgtgttcctgggtcagccctggcccagaggagcgccggggacccgcagagtgctgctgaagtcaaggctacaactcacctaggatctggggcgccagccctccggtgggcagggcgttctcctcccccaccccctccccgcacgatgacatcaagtgtttggcgttgagttgctccataaaagctgcccggggaagccaggagagcgaagggcggacgtactcgccacggcacccaggctgcgcgcacgcggtcccggtgtgcagctggagagcgagcggccaccgggagcccccggcacagcccgcgcccgccccgcaggagcccgcgaagatgccccggcgcagcctgcacgcggcggccgtgctcctgctggtgatcttaaaggaacagccttccagcccggccccagtgaacggtaaagtttccgcctgcttctttcctaacactcctgagcgctcagccgcccctgggctgaaggctcttcaatgataaagtaaaatcattgctgcggggagcagggaaggtgtagtaccaaatagtagattctcaagaaaggatgctccgttttcctttgctgaggttgggtcgggaagcacgttgctttctagtggcgcttggcgcagatttggtgttaaaatgtttgcgtgtactcccgggcaccgccagctctgaagatgtggcttgggaacttgctaaccagggaggagatgcaaagccaagatttaaaacagcgttcccctgatccacgtttagaaagtagagacatgactgtggcattctgattggggtaagcacagagaaaggtttgctgtgcccctgtgcagaacccgcagacagtggtaggcgcttttctttggaggagaggatctttaccattaagtcttacctacaagtcaaagggatgatgcatcccattcttaatcattgtttttctccaggagggctctactatgctgaatgtacgtgtgtgtgcacgtacacacacacacgcacgcgcgcacgcacacaaaccacacacacacacacacacacacacacagcatatttctgattgtaattagaacactaaatcccaaaaggctggaggctgagggactgaatggaggctccgtggagtgacaggaggaggtggcagaggggacctgaactgtgggctcacgccgggccagtgagctaacacgtgtacagccaaggctggttcattaatcttttggaataagaaagtgattttggaccgaaagtgattttactggctgaaactagattcttcctggcgaggcagtggtggtgggaaatgtgtcctgctcagcagcataa

SEQ ID NO: 6631 - DNA, 6000 bp, Homo sapiens
tcagaataaaaagatgccctcccttctatgcaggggggcaagtttactggatggagatgatttgggcctctcttccagaagaagctaaaggaagagaaggggagtgagagttcagggaggcccttcccaccctgtgaggcttgacttgatctggattggggatgacaggaatctcaccctctggggtgctggcaaggaggtctttgcacaggaaaaggggtagctcatttcagtttgttttttctttaaattgaatcctcaagtcattttctgttcacctgccgcacagggacaagcttgacttctattttctgtgtagtgaaaacaatgtcatttatttggtttttcacctcagccctctcataggagcatagaatgttagggtctttactccctaatgatgtctgattggcacatcaagagttaactctgccttctgggccaaattcgaaataaccagtccatttttccttttttttttttttttttttaaatggtggaatgtctctcagcacagttgcggcttcctcaaaccctgaaagcatctgtgtttattatactcgggtgtcactcactgttgatgtctgcacctacgtttccacctcctccccctccttcagccagcctatgataacactaaagattattaatgttggttttgtatctcgttaaagacagaattgtcacttgtagtatttctgtagcattcagcgctgctgtggctaacaccactgtgtatgtttcatcattgctctgaaggtcaaaagcctcattttattttgctggtttgattttttttttttaaagaagaaaaaaaaactgccctgaattaaatggctgttttaacagtaggctcttagcattataccacatagtcatttttcatgttcttgtttaacaggcactgaggttctggtttaaattaaatagctgcaaatgagacaatttataacccattaggttgggtggaaaattgtttctcaaaagcaaataagtaataaatctggtatctgcctataactcacagttgataagaaagtggccatttctcactagcactatatatgatttgggctctgggtaatttggaagtgttaggtttgtgtctttgtagcagtatttttattagaaaagaatctattggccttttacagggtattaatccctttgtcacctaccattgatgccttaagttttctgagtctcaattaaaaatcttccttttcttgatgcatgacaagtgtaatcagtacttgctcatttatttgtctgtatttagtttatgctgtactatttaattatccttccagcgttttttttttctccttacaaatatgatactctttagtgttaagctaaggcattgattcatgtatctgtccttataatgaattaataaactattttccagaaatgtggaattctcttttggaaccattgaccatgactagaatttcctcagcctttgtgccctagggattttatttcttactgtgatgggaaatgatgttgttgttgtttttgagatgggatctctctgtcgcccaggctggagtgcagtggcacaatcacagctcactgcagactcaacttcctgggttcaagcagtcttgtcactgtagcctccctagtagctgggactacaggcacatgccaccatgcctggctaatattaaaaaaaatttttgttatagagatgtggtctcgttatcttacccagactggtctcgaactcctgggctaaaaccatcctcctgccccagcttcgaaaagtgctcgattacaagcatgagccactgcctcttggcccaaaatagtgttttgtttgtttgtttgtttgtttgtttgttttttcagactaatctcactttgtcgcctaggctggagtgcagtggcatgatctcggctcactgcaacctctgcctcccgggttcaagtgattctcctgcctcagccccccgaatagctgggattacaggcatgcaccaccacacccggctaatttttgtatttttagtagagacggggtttcaccatgttagccaggctggtctcaaactcctgacctcaggtaatctgcccgccttggcctcccaaagtgctggaattacaggcataagcccctgcgcccggctcaaaatggtggtttttgagggtaaaaagcaggtggtcatgggaaagaactaaaccatcttcctccctcaacaggcacttaggaaaaagacgtaaacttaggaaagatgtgtcctttgatggcacttccttagactctctggggatctctttccatctgggcacacatttctctgaacttttttgggtgcaggaaagagggaacaactccagagatttgggctccacaactattctcctgtataactctggtcaccaaaattactcatggccacacaatcacacacacgtgcactgtgtgtacaagctcagagacccgcacatgcatactttgccttcacaaacacccttgtgtctgtccgttaatgcaaatgtgcacacagtctcacacacaaaactccacactcacaccccacacacatcttggcatcacagttggcagctgctgtctgctaagatctttacagagcccggaacatgctttctattggagggaatcaagagctagaggctgctttgctcaggaccacccccaaagtggtgggccagacccagagttaattgacagatcagacagagagatactgcacattttgcactcggcagaatagccattatttgcatatcactctcagaccaagggttgtgataaagaagaattaaacacttgtcaaaatgaatttaaaatgacagcaattcaagagaccaatttgacctcttcagagtccaggacaagccaagaaggggttgttgagaattcaagccctgcaggagggagttccaggattttaggcccagggagggcccttcccctccctttcctaaggccagtagaccaccactcccaccctttctcacaatgaaatccaatagggctttggcacattggagtcctccacctagaatttttccattgcttcccgctgttcacatgcctcatgtcctgcttctcaggctcatcttccagtagctgccctagagtgaacagtcctgagctatgccaacctcatcattagtaaacctgtccatctacaggcactctgatttctggaggcctgtacttccttacttatccgtatcaaagttagttttttgtttgtttgtttgtttcgagacggagtcttgctctgtcgcccaggctggagtgcaatggtgcaatctcagctcactgcaacgtttgcctcccgggttcaagctattttcctgcctcagcctcccgagtagctgggattacaggcgcctgccaccacgcccggctaatttttttgtatttttagtagagatggtgtttcatcacattggtcaggctggtctcgaactcctgacatcaggtaatccacccgcctcagcttcccaaagtgctgggattacaggcgtgagccaccgttagtttcgtacatggtcccaaagttccagagttggtatcaaaagaaagacttagtttttcctctgccatcccagtccagtgccaaaggagcaaatagctacattaggccaacttttattatttatttatttattgagacagggtctgtgttgcccaggctggaatacagtgggactccaggcatgcaccgccatgcttggctaatgtttgtattttttgtagagacaggttttcaccatgttgcccaggctggttttgaactcctgggttcaagtgatctgcccacctcggcctcccaaagtgctgggattacaggtgtgagccactaagcctagcctgccagctttaattctctagctcctagaacttagtagctgctcaataattttgatggactagtccatcatgctggactcaacagaagaccatttaatagagagtggctgagattcaagatctctgagggctagtatgggtatgtctctgctaaaagacatgcttatcttctgtaacattctcacgtgggacctctgttgtctccttatatgttctctgacatgaacgattgagggccttctttgtggcacagaaacgttactgggaattttaactttctatgtgcttttccagttaccaggtcatttgtcaggacctctgcggtttaaaggtctctagggatgaacaggagagataagattattttcatctttcagatgagctcagtgagagtgactgggctaggcagcaggcagaacccaggtcggaagccaggcccctttagagctctcattgtcctgctgctgggtctgctctctccaggcaatcctccccagcggagcgccaggactcctcggtccagagaagccaagcttgcagctacaggatctatcctttgagtggaaggaccagaaatccatggaaaactgaatctttgacaactttacgcagctttttagagaattatctctaaaatatggacttggaggagggcgcagcagaaagagtgggtcagagcaaatcccgcagctgtgtgtctttccgcagcccggacccactccccagtccgctggtgtccacttcctcagccccccaggtccccggctggcccgcggggaggggatacccggctgcagcccgggacggcgccggccgctccagccacagttcaaagcgcagggggcgcgtccgccgcgcagccgggaatgtccggccgcttaaagcgctcgccggctcttttgttccccagaccgggcctccggggagagggggctgggggaggggaccgggagcagagaggaggggggcggcgggctggggaggagggcggggcggccgcgagcggtgcgagtgtggagcgcgcaccccgggcgaggctgacagatcgcccgggtgggtgcaagatggcgcaagcggcgctccccctgcgccccccgcgctgctgagcaggcatgcggccccagtcccccaccgcctgggctcggccccggccggagccccagccccggccccggcgccggccccgcgggacgctgtgagccgcgagaggcccgggagccgcgcgtcgccgagccgagctgaccgagagccccatggctgtgcagcgcgccgcgtctccgcgccgcccgcccgccccgctctggccccggctcctgctgccgctgctgttgctgctgctgcccgcgccgagcgagggtgagtgaaagcgccccggaccgggcggttgcggacggagccaggggaagggcgagcagggagggagcgggcgcgaggggcggacccggggagagcggcgcggacctgagggcggaccccgcgcgggggggaccctgcggatccggacggggagagggtaccaaggccggactgctgggggccctaggggcgtgttgaggacggaaccccccggaggaagactggggcaggacccggagcccagactgaggagcaaggagtgcagcgaagcgggagcaagcggggcgggctggcgtggagaccgagggaaacgagccaggggagaccgcaaggctaagcgctgaccgaggcggacgagctggggtgctgggtgcccggccgtggacatagcccgaggcagccaagacaggggacagcagcctggggagcggagaccgggactctgacggctgcactgggcggagatggcacgacctgcatttggagctggtactgggctgaggagtgcgcgggagagacaggagaagacgagggagattcctggagggcggcgcgtggctagggagcgacccgggacagagcccgtgagccaagaaggagaggagaagccaccgaaagcgagagcgagcgagccgcggggatgctcacgtgcccctgcccttccccgaagtgtgcacacgcggagaccttgccctggctctcgcggtccgccggttctgctgcctggagctcggctctgctgcctggagctcggtcaccaccactctgttccctttagtggctgcaat

SEQ ID NO: 6632 - DNA, 6000 bp, Homo sapiens
attgctgaagctgggcccaacagtgtctactgggatgatcccgaaagacaggctctcactttatcgatgggagcctcaggcccatagagaggaagtgcctggcactgatcccacagccagttcctggcaagatggaggtgggactcagtttttctgactctccagtgtcctctcactaccacccctcaatttgctcctaatgatcctgaggcacagagcaggctgggaccttctgcagcattcaccctctctgtgctcccagaactgaggaccagaccctttgcctttacaaagcctgtctctaaaagtcacagggctctggctatggcctgggcccccacctctgcagccccttgcagggagggaagaaaaggaagttacagaggcccaagagccacttaaggcctggcctcagggacttcagccccactgctgagggaaaggtctcaccctggccaagcactgggagcccaggcctcagacagggcctaggcagcttctgcagagcatgtatggaggaggggaaggcggggatggcttagtctacttgtgctgctataacaaaatatctcagactgggtcatttacaaaccaacagaaacgtaattctcacagttccagagtctggaagtccaagatgaggacaccagcaggtttgcgtctggtagggtctgctctctgcttccaaggtggtgccctgtggctgagccctccgagtggacgaacactgtgtcctcacatgggggaagggacagaaggatgaaaggggcccggcaggttccctccagcccttttatgaggtcactaatcctgtccatgaaggccccaactcttaatactatcacatcggtgattaagtttcaacatatgaaattcggggacacattcagagcagcgcaggggcttatccatcctcattccagccagagccaggcttggagtccatgggaggaaaacagggcctcaatgatggaggctgtgtctgcagccagaccccaggccagttgagcagcccctccaacacaaacactggccctggctccaccggaaggggcatttttcagagatgacatcagctttgctcttcttttcctttcttttattttccttttctttctttctttttttttttttttagacggagtctcgctctgtcacccaggctggagtgcagtggcacgatctcagctcactgcaagctccacctcccgggttcaggccattctcctccctcagcctcccaagtagctggaactacaggtgcccgccaccacatccagctaatttttttgtatttttttagtagagacggggtttcaccttgttagccaggatggtctcgatctcctgaccttgtgatccacccaactcggcctcccaaagtgctgggattacaggcatgagccaccgcacctggctcttttcttttctttgagatggagtctcactctttcacccaggctggagtgcattggcacgatcttggctcactgcaacctctgcctcccgggttctagcctcccaagtagctgggattacaggcatgcgccaccatgcctggctaatttttatatatatatatatatatatatatatatatatatatatatatatatatatatgtgtgtgtgtgtgtgtgtgtgtgtgtgtgtgtgtgtgtgtgtgtgtgtgtgtgcgtgtatatatatatatatttttttgagacggagtttcgctctttttgcccaggctggaatgcactagcgtgatctcggctcaccacaacctccacttcccggtttcaagtgattctcctgcctcagcctcccgagtagctgggattacaagcatgcaccaccacacccggctaattttgtatttttagtagagatggggtttctccatgttgatcgggctggtctcgaactcccgacttcaagtgatctgcccaccttggcctccaaaagtgctgggattacaggtgtcagccaccgcgcctggccattaatttttatatttttagtagagatgggatttcaccatgttggccaggctggtctcaaactcctgacagtgatctgctcaccttggcctcccaaagtgctgggattacagacatgagccactgcgccaggcggacatcagctcttaaagtcgtatgtttcctgcctacctcagcccagggaacagagtccccagagcccactcgcctgttcagcggcctgcttacccctgaggacacagccttgcctgggcactgcagggcaggtgcaagcagagagaagataccaacctcccaggtccagaaatacatctcagggcctttactcatgctatccttccacctgttccaatgccttccccactctgtgcctccacgaacgcctggcaaatgtctctgcatccttcgtgtcccttcgaagacagccccacacccctagtctctcagcgttccatccctccatccattacagcccggccactctgcaccacatccagaacctccccccttcccctccctgctcgcctcctgtcctcatgagacccccagttccagaggcccacaggccaagtcctattttactctggccagggcctcttggggactcaggaaatgtttcttgaggaaaggctagagggcagacaggtaggaaatctggtgggggaaatatccttattgacacacccccatccaatcactacatttttgtaagggacccagccctggcttctactttgagaatcactcctgtccccatgaatgcacctggggaacgtcagaatttgggaataaagatcttagtgccttcaccacaggcatcaccagggaaaccccaagggacctggccccgttcaccagctgggccccccagtaaagcagcctccccccagcctaccccccaggtgggtgggtctagacccccaccccacccaccccctggcctccctcagcaaacctccgcacaattgctaggtagcgaggcctgaaggagctctctagtttcctcaacctctaacggttccagtaatagcaccaccctcagagcagggccaccacgaggccagggtcagtccagacggggccggcttttgtccacacagccgtacaagcctgcccttgctggagcctggaacctcccgccccactgcagccgaagctgcatctattgccttgtctcaggggttgatgaatgaatacatgaaagcccctggaccttaggaagcacccagtcaacgttagccacggttaggttcattattgtactatttcgattttactcacattattaagcgtccactaggtggcagcactagaggactggatgctgatgaaccaggctggccgcctcccgcctcccaggaacctacaaaggggcaggggacagatacataaacagctgatgtggaagtgcagggtgggaggggtaaacgcaggctgtaggaaaacccaggaacagcctagacaacatagcaagaccccatctctacaaaaaattaggcatgcgtggtggtgggtgcctatagccccagctacttggggtgctgaggtggatcacttgagcccaggaggtccaggctgcagtgagccgtgaccatgtcactgtttaaaagaaaaagaaagaaggaaggaaggaaggaaggagaaagagagagagagagaaagaaaaagaaagaaaagaaagaagaagaaagaaagaaaagaaagaagaagaaagaaagaaagaaagaaagaaagaaagaaagaaagaaagaaagaaagaaagaaagaaagaaagaaaacaaaaaaagaaagaaaagaaaacaaaatccagagaacctagtctggcctgagggtgcatgaatccagaaaggcttcctggaggaggtgctacccattgaagacccaaaggaagagtacaaagaaattaaccaacaacaaagccataaggcccagttgagagagctgtggtgagggctcagctgaaggcagggaggctggaaattgagctatgtgaaggaggcctttctgatggggagggcactgcagggaagggagccacagcagatgagggcaagaggtgctgagactacagggtgggctgttctagcaggtggtgctggttgaatgaatgagtgaggaaagaaatgaatgagggatacaaagagagaaggccaaggtggaaaaaccaactctatcttttatggtgggttttttggttgttttttttttggcagctgggacaagtagacagagacacatggcaacatacactggtcctgcgccacccccagcttgggactcgaaggactggggtgtgctgaaggtggcatgtcaagcccagaagggtccaggaggaccaggtctcccccctccttggctgcccttctgtcccaggatggggagttgattgatagctcccctgcccccccgccccccacccagcgccaagctcccccagctgctgactcaggccctgccggccagctcagcattcctgcccggcccccactgaatggagctattgaaagtttctgtagccacagaccacacccccaaccagagccttcggctgtgctgtggctcctctctcaggggacagcgtaggccctgggggtcagttggagagggctctgactaccagcgactgctctgggggtgtctgcgatcaaggacgatcctgggtaagctggctgggctggcaccaaagaggggattccagagcgaggggtctccctcgtgtgcaggacagaggcactgggatgggcaaccccggcttgggggaggggtctgcgtgtcgttgggagagccaaagggccctgtgggttttcccacctgccccctcagactggagcttccctgaggtagacgtggtttcccccttagatagaggccactcaggggtatgggctgggtctcccccatcagacaggagccaaggtagggagaagggatagtttggagtcttgcccatcagtctcagagctccccaggcacggaaacagcatcagacatccagcctcagcctctgctgctgggtgcagatcaagcgccttcctttcccttcctctccccacttggcctttgccctaagccaagacctggccatcagcctggctgcaggggcctgcagagccagctgcactttttcaggtatgggggagggccaggcaccatgaagccagtgtgggtcgccacccttctgtggatgctactgctggtgcccaggctgggggccgcccggaaggggtccccagaagaggcctccttctactatggaaccttccctcttggtacggccacgcctctgttcgtctgtctgcctgtctgtcgtccacctgcccactttggctgacttgacaaggagtttggtgttcttgcttcctgattggcaggatgagaaacctacctttgtgtggttgttctaaaagctcctaacagatattttttttttgaagttactaaaaattacacagataatgtatgctaatcagagctaaaattgtgcaaaaaatgtttttaatatatcttcccctaccgtgcctcatgtgctcacactcctaggaagacaagtccccagtgggacaggggcagcgtggtagggaggggcagtccctgaggcctgggaggcacagcccagagtcctggctctgggtgacacatgggagcacctgggacccagcacgggtctccccctgcaggcttctcctggggcgtgggcagttctgcctaccagacggagggcgcctgggaccaggacgggaaagggcctagcatctgggacgtcttcacacacagtgggaaggggaaagtgcttgggaatgagacggcagatgtagcctgtgacggctactacaaggtccaggtgagtgcggggtgtgagtgtgtgtgtgtgcgcgcgcgtgcacacacatgtgagtacatgcctagctgggaggcagggagtgacgtttgggggagctctgatgacaatgtcatccccatgctctgccaaacaccctctaccccagtgcagccagagggggcagggccagtgggggtga

SEQ ID NO: 6633 - DNA, 6000 bp, Homo sapiens
gctctgggctgtcatggggacagcaggcttctaggcagggtctgaatttatagccacatgtaaaaggcagtgatctcttccattaatgggtggaaatagagccctatattagggcttttgttcaagttgcaaactcagggccgtgaactatacacttctccttcccttggctgtctggttagagaaggagcagccatatcggtacactgcctggctcagggtgggcactggctcaagccatccaatcagaatccctccgcgggaattttgaattgggcccagaagaggccacccacattctgcttatctcttggatggaagaaagataaacttgggagctgctgactgaggccgtcggctgctgtatttcctggaaagccaggaaagccagtctgcagggagaaagagagaaggatgacatggaaacagtgttgtgggtggtgccttcctgggctcccaaagtcccagcaccattctcagttcctgaggcccaactgcatccttatgcttaggttccctaagacacccctaaatccttgtaatagaaatccccttttgtcatcaacctgtcccccgttgcttctagtaatcacaaccacaagaatctgaattaaacacaacctggggaccttctctctccccacagtgtgacttctggtcaccctcccagcttcttcagccagatggggagtgtcctgcaggcaataccagttgacacagaaagacagtctccatcttcccccagtgccccagtcccttgctgtctgtccttgtgcagccttctcactgtgcacagtcttgttgcccacacttagagatcccctagtcaggcccctcctggctgcctctctccaaagtaactgagttttcctggtcccacttcgtctgtctgccttctggagtcccagcctctggatccaggattctgtgtgtcatgtctctcagatggtagctgcagtctagcaggggccttcaaagccttctggtggcagggcagtgtgggaagatgttttgaagaaagagaaattttcaaaagctcttaagagactggatagaaagggtactggattaggagtggagactggattctggcctggcttggcttctaactcgctgtgtggctttaggcttcattttccgcagctgcagaatgatgaaattaggcaagatcaaaggctttccagggagccctttggaggtgacttggccacggccttgtaaccataaggggagaagagatggcacctgggaccctgcttctcttcactcagggcaccaccccccccacccccccgtaggtgtttcatacattgagcatgctggaaagatctttgtcttagcccaggtttccaaagaagcagagcagggcagcatgtatgctaacactgtattggggagtgtggtggctgggaaggggaagtgaggacaagggggagtgagacagaggagaagggagggcacacaagagagtgcactgcggagctggccaccactccgtctggaaggatgctagaccttacaggaccttctttattatttatttatttattttgagactgagccttgctctgtcgcccagactagagtgcagtggcgtgatctcggctcactgcaacctctgcctcctgggttcatgcaatttctcctgcctcagcctcccaagtagctgggattacaggcacatgccacgacacccagttcgtttttgtatttttagtagagacagggtttcaccatgttggtcaggctggtcttgaactcctgacctcacgtggtccacccaccttggcctcccaacgtgctgggattacaggtgtgagccactgcgcatggcccaggaccttctttaaagtggctgtgtgaactcggaactcaggccagtctgtccagaaagaggaagagagaaaaatttatttgctaatccctgtctcttgctggtcaaagttcactccatggagtgtccaacactcctgcacttctgaggccaagggtgtggggccaaggggagaggaggtgcagttgacttctgcctgggtgaagtcagttgtcacagcagctggacaaaacaagtggcaaggagctggaagactggtgtgtctaacggatcttaggcgatacatttaaaagtatctgatacaggcctggtgcagtggctcacgcctgcaatcccagcactttgagagactaaggcgggcagatcacaaggtcagtagatcaagaccagcctggctaacatggtgaaaccccgtctctactaaaaatataaaaaattagccaggcgtggtggtgcatgcctgtagtcccagctacttgggagggtgaggcaggagaatcacttgaaccagggaggcagaggttgcagcaagccgagatcgtgccattgcactccagcctgggcgacagagcaagactccgtctcaaaaaaaaaaaaaaatatcggatacagctataattgaaaagtagtgggaacctctactaaaagaaaagtcaaaaccaccaagatgcataataccaaaggaccttctcagctgaaagatttcttgatgctggccactgaaattgcagctcagagagctgagactagactcccttctgatgtgcagggcccatgttctcagataatcacaaacaagatcctgcaaatgtgtacccctcagctttactctatcctcctcccccaaatttccatgcaatttaaagagctaatgaagatggtgtttttaaagtgtcctggtgggatgggaaagagagggggctgataatcccaccggacagggagaattctcatcttgttcattcagaaaggcccagccccctgccaggttggactcccctcccctcaaggggtagcagcggactccagaaaaaaggcagatgtgtttgtatttaagagattggaggattaaatgagctagagaggctccctccacacggcctcatcctctgatggctggaagcccacctctgagtgttattaaatcgatgatgacatcatgggcactgcatgcccctccctctggagcccagcaggcttgcaaagcctgcagaggataagaaattggggtcagagcgggaagcctcaatccttcttctctggtgtataccgagatcgatgtgtagatcagattcaccagaattaaatctggggccccgtctgagtgctgtccttggctgacccttgggcacagtacttcagctcagggcctaggtttttctctgctacaaaacagagacaatcacctgttctccttacgacctggtgtgtgtggatcaaatgaaacaaggaaagctttaaagcaaatgtgttcttcaggggaccaggggcggaggggggggattgaggtgtggcctgtgggctgctagagcccaggatggggctgatggaaaatgactcccaggcaggcagtcctagcctcccacagccaagaaaggacatgcaggttctgaccaaaggggaaagaaataaatccaataaacatctcccaagaagaaagacaggaaagaaaatagaatggaaataggcatagctcagacccctcatggtctgggaagcagaccaaggatactgggcaggggaatggcacattgcatttgcatctgaggcacatcccttccaagaggcacatcccttctgcagcggcttgagggctgggtgagaggagacaggactggagacctgcacatgtcgtgtgcgcctggtgtagcacgggggtggtggggagaatgggagttggttgcagttgttctagttagcggcctgggctgctgacagtgaccgtggggaggagagagtttgtgacattgacagtggtgtggaaggtaacctttctgtggagggaaacctcaggtctcgagacgggctattgtaaataacttagtccaccagtgctgggctctctgctaagagtttcatatagtcatcacaactccaatgtagtagatgcaataggcatcttcttgttacagatgagtaaactgaagctgtgaggggttgagccatttgcccgcatcacagctagttcaaagtggtaccactaatgaagtcctggcaatctgccctgcaggctgttctcaggtttgacctttggttctgtttttcacttgaggatgctgtccccttaggttctgtctgtcttgtatgctccggtgactcacgagcctgtccactgggttcccaggtctcgcctcagcttcagaccaccggtccaacagccttcctgacccacctcaagcttaatgcgttcaaagatgaatctttatttacacgaaatctgctctagcccacttcccggggggtgcctccactatccacccaggggcagaatccggccactgcctgaactcttctcccctcaccccccacatccagagtcccagtcaccatacctctcacacgactctagatgtcaccaactcgctccttcccactgtcaccgccagcccctcactagaacatctgcaacccacgtgctgcaccacgcgggtgctacacgtgcaggtctccagtcctgcctcctctcctccacccgtaagaacaagggaaatcccacagaaccctctgccccggggagcatttaaatcagcttagtctatctccaggtcgctaccccgccccagcccaacacccaggcctcagtcaccctagacagagattcccgtacccaggcaggcaagggaccctaacacatcccagcccgctggtggtcacgcgcgcagcccggacaggccagcagcccccgccccgcgaggacgccacactcgcagcgcccggccctcccctagcggagcccgccccgtctccctccgccccgcctccctccgctccgctccgctccgctccgccccgccccgggtccgcagccccgcctgttcctcccgagggccgcgcgctctcgccggcccgccccgaaccgccccgcgctgggaatttgcggcggcctccgccggggcagccgagctgaaccggtctcttcctcggaaaggcagggccgaggggcctgcggggcagccatggaggcgacgcggaggcggcagcacctgggagcgacgggcggcccaggcgcgcagctgggcgcctccttcctgcaggccaggtgggcgcgcgccggggtgagagggcgggctaggcgcctgtgcgctggggcctcgggacccgccacgtgacgctcctagggctgccgggcgggaacctcgtgtgcggcgctggccggggcggagcggagcgcggggggcttggaggcgcgctaccgtggcggcggtgcccccgcgtttccttctctgtctggggagcctggggcccagcggggctcggcctccccgcttcgccgttgctcgggtgggaggagcgcccgcccgaagtttggggttttcctcccttcccgcgttccagcgacccgggctggcgccgggacagccgctgcgctgggagagctccccagggcggtgggtacacacacctcgtcactcggacccccaacttatccgcaagttccgggcgccacctccgcgttctcggggtccctccagccctgagtaggacttgattctgtcatttatcaggaggctgtctgcttgacctggggcacccaagaatgtgcgaatgtaatggaagagacagcggggaagggcggaagctgccgtccagagaatgaatgaggagcccttctcagtttttggtttatctcgttgggcgagcagagctccattctaccttcgtcccgttttactgaccagaaacattcactgcattcagcaggcattctttaagcgcctgtggtatgcccagcgctgtgccaggcagtaagggggtaggcagggtgaaggtgggagaggcttacggtcctgtagggatcaggagagacagagcccaagtgggagtgagcggtcatcttggagggcttcatggaggaagtggcacttgagctgagtctcagaggacttggtaggggacccagggaagacaggctgttccatccagggaaacagtggggaagggcaagg

SEQ ID NO: 6634 - DNA, 6000 bp, Homo sapiens
ttgcttacgcttatctttgaaaaaaagtttgcatttcctaagcacaaaccaactgatagtacagagaggaggtgggatccatgagggggaccgcaagggcagaaaggagcctagaagccagggagtgcctcaaggtggagcccccaggctgattatggagactggctgcattggaggtacctgggagcaggacagagaagggtggagagaaataaccagagagtgggagagagtggggagtattggaaaagaaagttggagaaagtgagacagaaggcccaagatagacacagggagaccagttcatcccagtttgtcagagattgtcccccagtgttgacactgaagtcctatattctagaaaacctcttagtcccaggcaaaccaggacaattgatcacccaaggtcaaagtggtgaaaaactcagagaaagagtagaaagagagaggcacctctctgaaatgagtgcagatcagggcaccccaataacttttctggaagaagagtgcattgtggccaggcatggtggctcctgcctataatcccagcattttgggaggccaaggcaggtggatcacttgaggtcagaagttggagaccagcctggccaacatggtgaaaccctatctctacttaaaaaaaaaaaaaagatacagacacacacacacacacacacacaaatcagccaggcatggtggcgggcgcctgtaatcccagctacttggggagctgaggcaggagaatcacttgaacccaggaggaagaggttgcagtgagctgagattgcaccactgcactccagcctgggtgacagagcaagactccatctcaaaaaaaaaaaaaaaaaaaaagcattggtcctaactgagccaaggcctctgtcatcagtactccagaccactgctcgttctccctccatagagaagccaaggtcctcccagaggagcatgctcagactgaaatcttgggagccacagaagttgccaataggacctgtctctgagctgaccatgctcatgcagtcttggcctgaaatacccgctccctccacccagttgggatgttgggattaatactcaatctgctttcagaatgctgggttccaatctcagttctgcctcatagatgatgtggaatcttgcgtgaatctattgctactttgagcttagattttttagtaaccatggatttgtctgtccagtatactttgccatcccactttttctggttcctttaggaaagtcctctcctgtaatatgtggttttgatggggctgtcagtcatggcgcctttctcttcccaagtcatggggctgggtgtgtgtcccaaactgagctaattatagcaccatatcctccagacactaggactggttcaggggtgggcatgaaccaaagccctagacttttctgctggatctactaaaggaaggctgtctctctcccttcagaatctatgaagtataagcttgggactgctagacagtcagagaaactcttctgctgcaggaaaggaaaatggagtgaagcaaaactaagagaagacagagagagagcagtaacattgatttgagacccttgatccagccacacctgcagacagaacacctttgcacttcctagttacatgaccttttacattctattttctgcttcagtttgattgtgttgaatttctgtcacttgcaagtgaaagaatcttcaactatacaatctctttactataaaaaataaatacaattttgtacaagatgagtattaaattagatcatggatatgaaagggatttcaaaaatagtaaaacactatacatagcacttgtacattgttggtaggaatctaaaatgatgtagcaactgtggaaaatagtttggcagttcctcaaatgattaaacataaaattactatatgatcagcaattccactcctaggtgtatacccaagagaactgaaaacatacattcatacaaaaacttgtatgaacattatgctaacattatgctatgttaatggatggtagaactgctaccagcaagaccggcagcacaagtgttcatagccacattattcacaataacctaaagtggaaacacctaaataagcctcacctgatgaatggataaacaaaagggggtagatccatacaatggaatgttacttggcaataaaaaggaatgaaatactgatacatgttgcaacatggatgaaccttggaaacatcatgctaagggaaagaagccagactcaaaaggtcacgtattatatgatttcatttatatgcaacgtccagaataggcaaatccatagaaatagatttgtggttgccagggactggtgggaaggaatggggagtgactgctcatggttacagggcttctttttggggtgataaaaatattgtgaaattagtgaggatgattttacaatcttgtgaatatactaacaactactggattctatggcacagtttatggcatgtgaataaataaatcagttaaaacactgtgtacatgtaaagagttattattattattcaacagaaatcacagctttcataaagcccttcaccaaattctctgcagttctccagccttagagtctggattgtgcacttgtcactcatatgctgctgccttgggtgtgatttaaataatgtttaatagtgatgaaataataaatggttttaaatagattaataaataacagattatgattaaataaatacatggttatgtcttgtctcctcagctccatcaccagctgccctagtgtggggttctccttccgtgtgtcctacagagcacaggggcacagtaggcactctgtaggatctgttgaaagaacaaatgagggcacacctctcccctcaccctcccacattacacaaaagcacacagagtgatcctcaggacccccattccccaggcacctgtgaggacggtgaaggtgaatgaatggtagaattgttaccagcgagaccagcagcagcgcagctaggacagccactacagtgcgccccttcagcaagcagcatgcagactctgagcacaagctgcagaccacccacacgtcagaggtgcctggggcacccaccagcatgccctgatccttggggaatttgcattctttgcacgtgctccaggtcgttctgatgcacctggagatttgtgcaaggcaggaatgtgggctgcagcccattccctagctgtaggggtgttctacattcaactcagctggcttaaactcaactcagtgaagaggactcactgtcgtataactgataagtcccaaggggagtggggttaaggggtggcttcattcaggagttcaacaagatcctccattctgtcatccagtgtccacctcatctcaaggccagatcctccttccctaccctgaccctgtcaacttctgagcctacaaagttccttgtcccaggctgggagaggaggcaggagtgggagaggtgaggagagagagttagttcatttgtttgtttgttctaggggctcttttagaaaggcaagaaagcttgcttcccaaaaaaactttttcttttgtcatattgccctttctgaaacgatgggctgggaagggcaacatactgattcatttcagcctgaaccgcatgcctccttacacacacacacacacacacacacacaccagggacggaatcaccttccccgagtctgtggctgaatgggtgaggtgaagatgaagtaaaacccagatagccaaccgaaagatagtgaggttgggagacgagcacaagcccacttcacttatgtgaacctgggtcttctcaaactccagctcatcttcaggggccctgactgaacatcacctcctctgggaagcccttccaatacctcccagatagaaaactctatcctttgtgcacccacacaccacctgtactcacccatccatccacccgcccacctactttgttcctgggtgttaggggctgagtactccattgtgaaccagagatttctaccctgatggtgttttcagtctgcacaggagagaaaagttaaatgatcacaccaattgatgccttgcttctctactaagcacaatgaagagaaatgagggagagcgggctggggaatatcagcatgtgtctgggactcaacctggtggggacgggaagagggggtgaaggaagcctttcctgagaaagtgggggaagggcgctctgctgtggctttccctgcatcttggccttcctaccctctgcctcggcttcctccattgctggaaaagcctccacaagcgcggtggaggtccggggcctggatttaaagctcttgagataaatgtgcattgaatttaactaccagtgattagaagagggaaagaaggtggcagggttacaaagaagagcttcacgttaggttaagagggggtgcacggtgtccctgggtgctttggaatgcctcaggtgtggaggctcagggagtggcagtggaggcgaatctgcatgtattccagggtcagaagaaacactagcctctacaattcaagccgcagggtgcagggagacacggggatgtcttagaatggacctttgagggacatccactcacttggccaagggagacctgcgttccagcaggtgttcctgagccagcttgggtaccctctgagttttgtgaatctcttttcactgggaaatgggaataaaaaccacttttcctgaacagaatctgactgaggcggtgcggtgctacactggtgagggggttcccaggagcggttctctggagttttctccagaggctgacgtggggttggcggagaaggagcgctgcacaggcgcgtcgaggcagcgcgccgcctgcccaggtggcagagcggccgagactggcccagagcccgagccggagtggtgtccggcgcccctcccctccgctcgagccctcccacttcctctgaatgagccgcagctgtcagggagcccggcgccccgcgcagtgcaggctgcaggcgccgcgccgaggaggctgccgctctggcttgccgccccccgccgccgctgcacaccggacccagccgccgtgccgcgggccatggacctgcccaggggcctggtggtggcctgggcgctcagcctgtggccaggtaggtgcccaccctctgcctccccttgcctctcggagtccctccctgggccctcggggcttggatccagcggccaggatcgggacgcgaccctcctcccagggtcagacctcagctgctcttggggacgtgggtcccccagggactggccccagtctagcggttcagtcaagtttcgctaaagagggaggtgcgaaggctattgaaagccgggactctttggtgtgtttgggaagagttgaagaggcttgagttgaaaagctcccagatctggtggccctcctgggcgccttaggtgcctccaaggcccatgccggggttcccgcacggctgccaggggcactcgggtgtcccgggagcgccgagggcgcacggccccggctggggaagggaatcagcgccaagagagtgtgccctggctgccctcctgcctggctccggggaagcatctcaaagtttggagagccgggcgcggcggccccggagggctgaagggtgggggtgagggctgcgcagagtgcctccggccaaagacagagcaaagccccggggcgatggccggtaggcgggggctagctctcgtctgcccggccagcagcggcgggacacagtcgcgcagcgcaggacccccgaaacgttacctgacacccggggtagggacccggcattgcctcccaacccgcgctcggaattatgcaattattcaataatctggggaaagccgccgtcgcctagacgcgcgccgccgcctaatgcactccaggtgtcggggcgcggcaggaacctccggcccgaggggcgcgcggctgggagcgggaagccagccctgagctctccgccctagggtaccctggccccggccgtcccaca

SEQ ID NO: 6635 - DNA, 6000 bp, Homo sapiens
agtagagacggggtttcgccatgttggccaggctggtcttgaactcctgacctcaattgatccacccaccttggtctcccaaagtgccgagattacagccatgagccactgtgcccagcatttaaaaattattgaattaaatatgtgcatgtgaaatggcacttcactgtggtttaaaatttcatattaggagagatgagttgaagctgagatctaaaggatgagaagtagaccaggtaaaaaagatgggttgttcagtatttggggcaaagagaacaaaatatgcaaaggcccccaaggtgagatgaagcagaaccatcacaaagaactgaaagggaatgtggtgtggggtgaggctgctgggggaagtggtgggaagcactgagccattcaccttcaaggaatcacgtggatctgctcaatgttcctaccagcagtcaccatggtgaactaaaaagcaaataaaaaggaatgtcctaggctgtgtaaaacaccaggaatttcatattatcctgggaagtagtcacggaggctcataaaagccaacattgaatttcttgtcatctcagcagaaaggtactcagactagattaaatctgatttatagaaagaaaaaaatgaggcatttctggcaagtgaccattgtagttgcaaattcatgcttatcgcatatgaaagagtaggattgctgagtagtgttgaatatccttttgaagtttgagatcatgaatttaaaatgaagtcatttagaaggtttgtatgatttttctctggcaacactcagctgctcaggtacaggcatggtaccttacttcagactatagtgctcagtcaggtcgtggtttttccaggaaagtatgttgaaagttgaggtgggcaagggaatgattataatgatgaatcatgggctctaaattggaccaagaaagaaatgaagaatggataaagacaaattggtggtattagcagattagtggtctcagtgaggttgaagaattacagcaaatagggtattagcacaaggaactgaaaggctaggtgttggtgaatggacagtggggtattacattttcatatttcaaagatgaagtactttttgggtgattaaagtgttgacagtgtgagctcagaagtgttggtttaattgaggagaaagttgttggacgtgagaaggtaaaaggattaagagatcaggatactgaataggtcacgaacatggatgttgaactcacccaaggatgaagttcaaggatggtgccagcaggcatcggaaggggcagggaaaagattacattgactgggaggtcggaggatgacaacaatcaagatgagtggggtggtcatctgaatagcaagagctttaaaggggcagagatatttacaagagggaggaaaccattaggaagttcaaggtcaactctaggaacagtacaagccttttgactaacatccttgagtgaatcacgttcaaaccaaaccacgcgaagcctttcagttgggaatgctgtattccagacctttccaccagggggcgcgatcagcaacggagagcctaactacaagcagtccctcgaggccaggtaagtgtgtctcagcttgagctctgaggacccctagggctcttctaaggtattgcaaagagctcagccatcctctggcacagccacacacacttgcagagattttttttttttacagtgtatgtaaatcttgaacaacaaaaaaatacaaattcctaaattcttttaaagaagttactgacttaggccgggcgcggtggctcacgcctgtaatcccagcactttgggaggccgaggcaggtggatcacaaggtcaggaaatcgagaccatcctggctaacacagtgaaaccccgtctttactaaaaacataaaaaattagccgggcgtggtggcaagagcccgtagtctcagctactcgggagggtgaagtaggagaatggcatgaacccgagaggcagagcttgcagtgagccgagatcgcgccactgcactccagcctgggagacagagcgagactccgtctcaaaaaaaaaaaaaaaaaaaaaaaaaaaggaagttactgacttagaccaggcatggtggctcactcacgcctgtaatcccagcactttgggaggctgaggcaggcagatcacctgaggtcaggagtttgagaccagcctggccaacatggcaaaactcttgtctctactaaaaatacaaaaattagctgggcatgctggcggatgcctgtaatcccagctactttggaggccgaggcacaagaatctcttgaccccgggagacggaggttgcagtaagccgagatcccgccacttcactccagcctgggcaacagagcaagactccatctcaaaaaaaaaattacagaattattaaaaggtcttagttattatgtattttctcgatgaaaagtgacaaagtacagctactatcatgtggaatttggtgacatttctccctgggtaaaagggttttttcataactgcaggttttgagagttgactggtaacacccatacttaaaaatgttcttcccagatcactttttgcaagcatgagataagaagaagaatacaaagctggagtcagaattgtagtagcagcatcaacatcaacatgagtgtttactatgcaccagaaactgttctaaacattgcacataaatttactcatttattccttctataatcttggaaggtaggtgctatcattagcaccatttgacagaaaataaggtccagagagattaggtcatttgcctaagatgacagagctcctggatggtaatgttggtgttgtggacttgaatttcatctttccattagccggaacagtctatgttatgtcacaggaacaaataccccttgaatctcacagtttaattcaacagagggtacctgttctgtatgggttagcaggggggttaagcttattatgctaactcagggactaatgctgacacaaggttcgttttgatatatgctttcatcgtcatgatcagtaatcactaccaagacgaaagagtatgggaaagagtctaaactggaaatgaaatgcttctgcttgaagcaatgcatgttactttacacatttcactgacccaagcacatccaatgccactcccgacttcaaggggacaagaaaatgcacttctaccatgagtctattaacaagcaaaccagattgttggcattaatgattaatacaaacattctgagagctggagccgttcgtgtcctcctttggcttcagcttccctatccacaaaaagaccatgatcattttgtaagaatctcttgttgtaaggatcaaagagccacatttgttacagctataatgaggcagaatggttgcatccaaccaaagcttccatcagctgaaaatcttgatcccaccacaggcagccctgtagccctccttactgggctgtctgcagaatggcctttgtccagatgaaggtacatgccaatctttttgtcactcacacacctgaggttttgaaggacatagttttcacttcaatcaacaacatgccatagtggtcctggcctttgctagaaattttggtctggaaccaccagctgttcagttcctgttgaaagttccagaccactttagcttgatagagattgcgagggtctccttcttccaggtcctccaaaccctctctttaaatcaagtcaggccaccaggactgtttacttggcccctcagagtttccacagacactcccaggacgtctgctgtgagtcagggatgagctaagccatagaaattcctttgccaaccacaagccctgagggtagtacaaaaaatacccctaaaaagagcatttcccaaacttctatgcaaacagtagtaaccacactgccaatcaccctccagagtgctttgctagatcctttcctatggggccatttgacccttcctcactcctctgctagcctaggcagtgcactccatgaggacggggactaccttttcatgtgggtttcactatgtgcctggcacacagcacgttctcaataaatgttttccgcattaagacgcttcttaggagtcttcatgtaagttcatacacgacttccttgtagaattgtgtcaatgaacatgcaattaggctagctgaacttcaggccctgagagtctatgaagctaaaataaggcccagatgtggggtgggagggggagtaggcagaggcggcaaaggaggacatttcaggcaaagggagcagatgtccaggcaggaaagcacaaggtaacgggggcacagggggcgcaccacttttcctggaaggaaaaaacagcagatgagagaaggaggttggagccagttaccagtagaggtctatgttcaaagtccagaaggaagaaacagcaggacggggacaaagagaggaaggaggaaaggaggcacggtgtatgaaactctgtagccaagagcgctaacaaatgaaaggcaggatgggtggaggaaatgtactgtgttccaaagcttcctcttatttatgggtgctcccgggccacagaggagtaaactgaaggacttcccagctccccactgcccagagagctagcggagtcccgcctcgccccgtcacatggccagaggcgccctcggcacgtgacctacctcgcgctaggccaatcagcctctgcaggggcggggccaccgagtccgcggggcgggagtctccgtcggagccgcctcttctcgcgatccttgcggcggtcgctcctcagccgcccacgacccggagcgaaggtctcgcgaggcctgggcgctgcggcggcaggaggaggacggggaaggacggagccgagccgcggctgcctccctcgctcactccctcgcgcactcgcccgccccctccctccctcccctcccttccccggccccggctctggccccggcccattcgctgttgggtcttctgctagggaggatgtcgggttcgtcgctgcccagcgccctggccctctcgctgttgctggtctctggctccctcctcccagggccaggcgccgctcagaacggtaagcggggcgccgggggcgggccgggcgggggttgaggggcgccggggccggagggggcccggctctggcctgaggagacgctggagctcggggaagggggccgagtgggcgtctgaggggctgcgggtccgagaggaggtaccggctgcgggtttgaggaggcgcgggtgtgaggaccggaggctcctatccgagcggcgggggcgtccggggtgagcccgaggtgttgcccactcggaggctccacgtcgtggggctcgtcgtgccgggtcggcgaggggacacggaggaagccgacgtggggagctggagtagcgggggcggatgaggagggggcgcagctcttagggagggtggcacaagaccggcgtttgtgttccgggcgacggggatggtggtgtccgtcaggccccccgggagctggggtcgtccaggattctactgaggccccgtaggactggtgacatccttaaaaataagggggaaattggggggaagagagtcctgaggaacactaatggtgagctgagtactagagaccaaaggagggggtaaagaatcagggaaccttggatctagggatagagggaaggtgggtgggaagatgagggagtgggttgactgcagtaggggacctggagagagaagcagcagtgtctccaaatgagctgggggaagagggctgggtttgctaaagagggtggagtgctgggcattctagggtagtggttgggagagcaaaaaggagtttctaaataaggagaggaaaatgagcagaggatggagggaaagggttggaactgaggtgggggaatatttattagagaagtaaggaggcctgggtatagagatgggggtgggggaagacgaaaaataagggaagggagtaaaatgcaggaagtcgggggtgtaatgttggtttgcagtgtggaggat

SEQ ID NO: 6636 - DNA, 6000 bp, Homo sapiens
atcaccccatttcctgcagggcagatggaaaattgaaagtacgtctggttggttgctttctgcaaccaatggggtgaacaccaagtggccaatgggaaacctctagggggtatttggaacccagaagattctgtaactggggtccttgagccctgctctagccgctcccaccctgtggggtgtactttcattttcaataaatctctgctttcattgcttcactctttccttgctttgctgtacattttgtccaattctttgttcaaaatgccaagaacctgaacaatttgcagtcaagatcctctactggtaacaattccacttacatgaaatatctagaataagtaagttcatagggacagaaggtagattagaagttaccaagggctaggggaaggagaaaatgaggagctattgcattactggggctcaggacacaccacttcaaagtatgactgcaggaggctcttgaaatatacttctttggcatattttaagctggttattctgagaaactgctgatacaggaatagctctgaaaagctctccttttgtaaaaaagaaaggcatttatatcttaaaagaaaatctacattagtaaaatgatctatattaaaagagggctgctccagacaacttttattatctaagaacttttaatctacatagcaagacaacctctattcaccaaacagctcctctcctcaccctcccataacttgtgttatcaccatcacccagaagctccaagctcttttccgtagctcaggatgttatacaggcttcaatcatctgacctttctttgagtctcatatattgtgggactcctgagtatacatatgtaattaaatatgggttttccgctggtaatctattttatgactatttaattcataggctatttaattcatagcccagccaaggaaactagaagggtggaggcaagccatctttccctcccctatggtttaaagagtacagagtttctggagtaatgaaaaagttctggaaatagatggtggtgatggttacacaatattgtgaatctacttaatgccactgaatggtacacttataaatggttaacataggaacttatccattaggtatattttaccacattttgtaaaatacaaaaacaggccgggcatggtggctcatgcctgtaatcccagcactttgggaggccgaggtgggtggatcacgaggtcaggagttagagaccaatctggccaacatagtgaaaccccatctctactaaaaatataaaaaatagccaggtatggtggcgtggcctgtaatcccagctactcgggaggctgaggcaggagaatggcgtgaacccggaaggaggaggttgcagtgagccgagatcgcaccattgcactccagcctgggcgacagtgtgagactccgtctcaaaaacaaacagataaacaaacaaacaaaaaacaaagcaaaacaaacaaacaacaacaaaaaaaaaccaaagtgcttaatacagtacctggcacatttgaagtgctcataaatgttacctagtattgttaagtaatgttattcttagttgtaataatgtttataaaagttactgtaatacggtgtcctctgtactttcatgaaggggagtaaaagggcctgaaaggcagcagagcaagaaacccaagtagttcctttgtcgggggaggtgggaggtgggcaggaaaggtgtggcaagagaagggttcgttggggaggcttccttaagcagaaaccacatgagctgggaggccttggcaaagatacctcttcagtctgagccagtttctcacctcggatctgggaagttggttttagttttgccgtgcctgggacatgcccctggctccaggccagcgcaacaggggtactacctccatcctccctaatctgaagtcctgcatctgaggcaaagttgaggcagggctcgagggtgggcggaagggcccaggcccggaggccactgacccttctcaccttgcccaactgctcagtggagaaaccgcagcccagcgaggccgccccaactcctccgtgtcctcttttctactctatcctaccctcccttccctgccccacccgagacggtcaggaccctggtgtctggacttcccgctttgtgtcactctctagggtacttgaccaaatcctccgttagaccctctcttcccgcctctccccaccacagcaaaccaacaaagcttaaccccatcatcccctaacccaatagtacctctgtagggctggggctggggctgggctggcggccttcagagggggtctcggggggaggcatggtgggctcctggggccgggcggggtcctgctggggcctcggagatcgggcgggtgcaggctccatggaccccagcttagtttcgattctcggtttagatcttggagtgcgtgaagagaagctgaaggggaggcgtgagccagttggctgagtcccttgagctgtccgaaaggggaggtgccggctcagggcccgcctctggagaggaagtgagacagaagctgggggcggttctagggggcagagaggccgactgtgggttttaaagacacgcccagagcggggaggaggtagaggcggagagctgcagacctaccgctgacttacggtaaagcgggagaggtagggcagagctgcaggggggcagccctgctcccggctttgatccattcatccgttcacactggcactgcttcgtgccacgtcctgccgggagctgggcgtacaaagatgagccacacgcagcccctgctttctaagagccgtagatgtaatggaagagcaagcctgcaaacggagacattctggaaaggagagcccacagctgggacctgcaaaagcagtggaaattcaccagggatttagggttgtaggtggtggggtacgggggacacttgaaacagaaaagatagctcttgcaaaagcctgtttgggaactaattttggccattttcagatttaagagggaattcatgagaaatgatacccaaggagtgtgctaggacaagatcctagctgaggagattgaaccagttctgtgagtgatgggaagttgctgaaggatttggaaccagggaacaacacgatcagctgtgcatgatgggacagtcactctgacaacctaggagcaggtgccctggtctaggacagtggctgtgggatgcagaggagggacttgattcagagatcctgggaagccagtgactggaggtgagggagcaggatgatgccttgagtgacagctggaaaggctggtggatctgaggtggtgggggcaggagggagggggagagctggagagcgggtatgaagagggtgaggggagagccagctaggtcttcgccaatggaaaagcatgtcagactcccagctggtaaggggaaaggggcacagttccaggtgacctcactgggtcagcgccccggcttcaaacttaaaccatcgcaaccactgtgctggctcctgtgtacccattccgtactctgttccaacttagaaacagactagaaaggatgatgatagggcctggctcttgtaaaccttacagtctgcagggtggagagcaggggttgggcagatacgcaacttcctagggactgtaaggcctcaggagcctgcccttccctccagcctggtcagtactcccaggcctttagagaatcagtccatgaaagccaaatatggtgggcagccatctgcacaagggacctggaagtgggctatggcaggatggggcttcggaggccagaggcgattggctgaggaggcagagctggggaagctttattcatttctttgcttgctttggaagatagcctgctcccagactaccccaaagtcctgttggaagttaacacttctcaaaggaaattcacgagttgcattcaggttttctcaagccctggagaggcaagttaattccaggtacctggatcaaggggcatgctctttctggacctgcaggactgagggcctcacctctgtggtgctctggggcccctgccctcatgtagctctgtgctatccccttcttccttacactcccatgctccccgaagtctgcatgtgaaacttctttctttttgtgccaaagttcaggccttcctactccaccttgatcacggtgacctggccaggccattacttaacaaataagtattgagacctgccctatgccagtccctgcttgctgggctgtgggttcacaaagaggaataatttgcagactatgtcccagagaaacccaaagtccagatatggcatgtcctgcctccagtgtgagagaaggagtgctgagaaggctgatatagcatgtccttgatcctggagaagattggcttcctgtaaaccctgatgagatcttgctctctcgctccgactgcagtgcagtggcacgatcatagctcactgcagcctcaaactcctggactcaagagatcctcccgcctcagcctcccaagtggctgggaccacaggcaggcatcccacgccaggctaatttttaaaaattttttgtagagatgggctctcactatgttgctcaggatggtcctgaattcctggcctcaagcgatcctcctgcctgagtctcccaaattgatggattataggagtgagccaccgtgcccagcttcccctccagcttttctagggctgagtaggagaagaggggaggaggcgatgaccccagcggggtccgaggaacgccgatcacacccagtagccctgggctgcagttcggtcctcccagcgcagggggagccatgcgacggcggaagcgggccccggccggcctcctcttcctgcgcccgcgccgccgcgggtggccgcgcgggtgaagccggaagcagcagccaggagggcggggccgcgtagggcccactggccagggagggcgccgcgcggaggcgcggggcgtgtctcctgtcaaaagccatgctcggcaggtctgggtaccgggcgctgcccctgggtgattttgaccgcttccagcagtcgagcttcggctttctgggctcgcagaagggctgcttgtccccggagcggggcggcgtggggacaggggccggtgagtggccgcctggcacggcggagccgggggggaccggccggcaacccccaggcccgaatctctgcctccgaggagtcggccggcccggtgccgtcgcaccctacgaggggggactgagaaagggatacgatgtggagagggggctggacccggcgcctggtgctagcgccgatccgccctccctagggtcatggggctttggccccagagccagccagcgttgctcctatcttccaaaacctcacctcaccacatttgtcctcggctcttatcagccctttaggcctgggaagacgtttcaggtttctatttcgcatagaagaaaccgaggtctaggcagaggaggccaccagcaccctaaaggcacctgctgcagggaaatggaagaattttcgccctagggggcacctctagaagcccgggaactaggcatctcctggatgtgcaggccaaaatgacaggtcctcagctgcctgttggatctgccctgcttctgtcttgccctcaaagtcttctgtggctcctttggcctacaggccagatcccacgctgttcagcctaaccgcctaaccttggatttgatccctccctggccttcctgtcctgaaagctctccctatccagaagtctcttgagaggcctggtggatcagagccaggcacaaagtggagcctcagtgctctggggcttagcccagagggcagggcttcctggaagaatggagcagggctcccgactgcttcctgtccagggttgggaggaaagcggcaaataacctcatcccagattctggagctgtctcggctttgctcccaacttgggctcctgaatctccaggggccaggacatttggcttggataagcctcatctttctagccctgcccctgaccccg

SEQ ID NO: 6637 - DNA, 6000 bp, Homo sapiens
aggagccacagtgtgcacccaggcagggagtgcctgggtactcattcacccttcaagttggggtgtgggggttcctctggacttacaggagtgatgaggatttagaggagcagggagaggctgccctgggtagctaagattagggctcaggttccagttcaccatgtggagttaagttctcataggagggctgcaatgggtgggcccctaggaacagccctcagagatgccctttgcagaggctcccaacctggcaacactcctttgccgggggctctgggcctttgacttctgggtccagtcttctcccctcctttaccccaattactcctgcccctaaagctatgtcaactctgtcccgtatttcccttcatttcactcttgttggacagaaggaatagcccaggatccataaaaagaaacagtccccaaagcagggacccctttcctccaggacacagaacattcagtcttcataatccctgactacataagccctggcccgggcaggaacaatgtgtttcattccttccttgggaatgtctctttaccatatggccacatgacccctcccaaggccaaacaaacaaacaaacaggaaaaaccccaaacagcaaaaggaatctatttaataatagttttaacagccacatctgatacttaagctgagaaatgccataaccttgagtcccatctctagggctgatttctctccaaacatcttaggtccttgcctctccctcctccctttaaactgttagagtggggtgacaccgaaacagatgaaatgccctcagagaaagaaatagggtggagtcggggggaccatctgacttagtgaaataccctgagctgtgcatgtgaaaacaaacagggaaagaatcacctaattttcatgtatggtgtccataccctaagctgagcaagagggtgatgtttaaggcaatgatattaggtgggctactttgagaacctctgaatcttttaagtgcttttttttatcttgcaacagctctgagaggcaggtctgattatctccattttaaatatgaaaaaattaagtctcaagtagctcaagtgtcttgccctatgccacgcgaccactcagtggttgaactaggatttgaacctgagtccatgtggctccaaaaccgttgcttgtttcatgatacaaaactgtattattatgtctatggtctggccagcacctctgctagcggatgtattgccatccagagcaaaacgacattgtccagcctccctgtacctacctccctgtacctaggtacagtcatgtggttactgaatggaaggtcttgactgagttgtccaggttcttggcatgttaaagaattgaacaaaacgcacaaagcaacaaaagacaaagcaacgaaagaatggagtaatgaaggcacagatttattgaagatgtgcaagtacaattcacagagcaagagtgggcttgagcaagtggctcaggagccccttcaattagagattttattaagctaaagaacatgaacacccccggtgccctccagaggcctccaatcagttacatccaatgaaggattgatccgtgaccaattagaggcttaagtggcgacttggcctgtggttatcacagaagtgaagatgtggcctgtatgttgcctaatcctgcctagaattggctgtacctgctgtgccttttgcttatgtgaactggctgcacctgctcttcttttgttcctaccttaatccttggttgccctaattccctattctcctgcctcaatgtggttaagttcccaccaatcagatatggttggactcgtgtgggactttgaggaaggggcttaaatgaagctggctcttcagggagggccccttttggtcttcttgagttcttccgccttctggccagcaacacggttaatgctccagcagcagcttggaccatcgggtggccttagaaatgccaaccaaatgtcttcgtggtgaagcaggaagatggagcctggcattttgctgggactgacacactcaccctggactgcccagccttggacatcctttatgggagagagaatacacttctatcttctttaagtctgtgatttggattttctgtttatccatccaagctgcctgcaatgaataaaatcatgttccccgtcctaggcaacgtttagatgggtctaaatgtgtacaccctctactctgagaatgataggatagttacagaatgtgggaggcaggagtgggaggagaaagcactataagtatgggcctgtcttgagagagccaagaaggactttggcatagccgagcactaggctaacctcacctagcagaggattcacttgcccatcgtaaggggcttggtgagggttggaccctaacttcccatcacttttgagagggtgaaaatttcagtttgggcactggcaagaacagagagagggagggaaaaattatgtaatatacacatgtatatgtgtaatatatatattttgaaatgtatgtatcattcattaatcttctcaatagtcctgaaacagccactgaaaagttttgaagcagggccagtttaatccactgagcttggaagctgatcctacaccctggtcaagcttcagggatggcagccgcttgtgagaaaccctgagcatgagccactcagccacccagccacccagtcacccagccacccagccacccagtcacccagaaaagctgctcctgggtgctgcaccctcggaagctgtgagataataaacatttattgttttaagccactaaattttgggataatttgttaagcagcagtaaacagctaatacattcagccttgtttggagtgagtgatgtgtttctggaagctctttcagagaagtgagggagctattctcccagaagccacagcaaacctttccctgtgtttcattggcccaaactgaatcgctggcctatgctgtgatgtgaccatggccattggagaggatgaggcaataacctccagcccgggccacttctggggaggcggtcagtgccccacaacactgggggaggtgcggaggcctgaacggaagttggggtggctgccaagaggaccacaagttcttccatgccacatcgattagggctccttctgagggaggaatgtggggctgcgtagaacaatgggattgactttaagtcagaaagttataaatgtcacctcagtgctgagacccttggaggaaaaactagtccttggaagactgcttttctttgtggaagctcatcaccctgccgctgctcgtgagacactgccttccttggctgatgtcattccaggctcaaggtcatcagtgaggcaaaacaggctttctccatactctctttatcagaaggttcatgactgatgaggtagtggtcactccagcgggaagagcaacaaccactcttgataagtactttttttttttcttctaaaaactgttgctctaaatttgttgaaagtggttcaacagtattggagtctggggtcaagtggctgtgtaaggacaacttttgccattgtgggtgatctatgggctgacacatacaacagaagaggccaggaggatgtcactcgtgtgtgtgtgtgtgtgtgtgtgtttggtaacagctctattgagatataattcacacaccatacaattcacccatttaaagtatgcaattcaatggcttttagtgtatcagagagttgttcaataattaccacaatatactttagaatattttcattttcatcatcctaagaatccctacacactttatgtcccatcctctaattcctctatccccctagctctaagcaaccaccagtctattttctgtctcttagatgtgtgttttaaatgccttatttgccagaaaataagattttggggaaaaaaagcaagaagttgtaccttccaatgataagtataaggtatagtgtagattgctgtcatgaaatgctctacatggcacatgtatgttttctgacctacacatttttaccaagtgggctgtaattttgttgaaatgacttgaaaactctacaggtgactgacccttgttgtttgggaaagtggtaggtgcagggtgatggggggtgggtgtgggggctgacctgggctggaaggatgggtctggggatatgatatgatgggagggggtatggaagcagctctgaggggaaagcagcacagatcaagtgtgtggacagggaagagctgacatcctgagttccatggcaaccagatttgccaaggtcttagagtgtgtccagagtggagcctgaccacagacctcagctcaagggacccagagcccctctgagtcagctgtactgaattacagccccaaatctgggtcaactggggagagacgacgaggattagggttccaaggtgaaactgtgccattgcgctccagcctgggcaacaagaatgaaactctcttaaaataaaataaaataaaataaaataaaataaaataaaatagcctaaggatgcatttctcagaacttatccctgttgttcaatgatgtgtgtctatacagtggggccataactaagacgtatgttgcccaagctggcaagatagctctgaccttctcttgggcccctcatttcccccaaacacaggttgtctgcagtcttgaccaatggctgccagggcatggactccgctgcaggggccagtgggaggccccagctcaggcaaaagcacaggcagatatttcaggagtctgctagggctggcactgagggcagagacagaggggtctccctgtcctttggagaacctcacgctgcagaaattccagactgaaccttcataccgagtaggggaggagctgtctgcgggtttgagcctgcagcaggaggaaggacgtgaacattttatcagcttctggtatggccttgagctggtagttataatcttggccctggtggcccagggctacagtcatcctagcagtccccgctgaagtggagcaggtacagtcacagctgtggggacagcatgctggccaagggtcttcccccacgctcagtcctggtcaaaggctgccagacctttctgagtgcccccagggaggggctggggcgtctcagggtgcccactggcgagggagctggcatctccacccgcagtcctcgccccttcaatgagatcccctctcctggtgacaatggctggctaaacctgtaccatttctggagggagacgggcacacacaaagtccaccttcaccatgtccagaatttccagaagtatggcccgatttacaggtaagcctggcagagggtgggagccgaagggacagggaggaggaggggcctgggtagccctgctgtagtccccactcccccaacaggctgttctctggttccaaactcctgtctaacttcttttttttttttttttttggtaatacaatacagaaatatatcagggatatttcaaaattcaacatttgaatctgtgaatgtcttaagtactctaaaccagacatctacttttgaaacaattggtggcaagaccgccagccatctgtaaggaagctctttaatgggtccaaaccccaggtctggccaggcatggtggctcacacccataatcccagcactttgggaggccgaggtgggcggatcacttgagatcaagagttcgagaccatcctggccaacatgatgaaaccccgtctctactaaaaatacaaaaattagctgggtgtggtggcaggcgcctgtaatcccagctactcgggaggctgaagcaggagaatggcttgaaccggagaggcagaggttgcagtgagccgagatcgcaccattgcaatccagcctgggcgacagagtgagattctgtctcaaacaaaacaaaacaacctcctcggtctgaggaggggagactggtgaggctaagttttgaattcctggccctgtagctgtcagcccagccagcgagttttaaaaattgggagaaggccgggtg

SEQ ID NO: 6638 - DNA, 6000 bp, Homo sapiens
agaagaagcaaaagtccaggtgtggcttctccagagggacagcgaaggatttcaaggtaggaaatggcaggaagagataaaagaccctgaagaccttgagtaagaaccaggatgtctgctctgagcccatcagggaaggggtaccctccagaagcaatgggatgggcttcaacctgtggacacatctgggggccaactaggaaacaagcaagggcccccgtgccttagtgatatggtaggctgaattcaaagatagccccaggattcatgccccctgtttacatgcccttgtacaatctcctcctcttgagtagggggcagaatctgtgaatttctttagatatcattcccaagactagtttactagtcagtctactttgagtgaatcaaaaagttaccctggtgggcttgacctaatcaggtgaggtctttttttttcttttgactgagtcttctgtacccctggctggagtgcaatggtgagatcttggctcactgcaacctctgcctcccgggttcaagcgattctcctgcctcagcctcccaagtagctgagattacaggtgcccaccaccacgccctgctaatttttgtatttttagtagagatggggtttcaccatgttggccaggttggtctcgaactcctgacctcaagtgatccgcccaccttgagatgaagtctttaaaagcaggtaaagtgtcagagagacactttcctgctgcttggaataaataagctccaggattgtaagaagggcctatggagagagccaagtggagaggacatcagggcactctctaggagttgagagtgtccttggctgacagctaccgagaagaaatgaggaccttgtcccaccactgcaatgaaatcaattctgccaacaacctgaatgaccttagaagaggcctctgagctccagatgagatgtctaacctagccgtgatcttgatttcagtcttgtgataaccagtagagaattcagttatgctatacctgataaattgttaggcagcaacaaaaaatgaatgcaggcaattagggctgtggactgctctcaaggtagcagagaattcagaactgactgaaagacaagcaaaacctaccttcagcagtggtagggaaagaacaatttctggagtcagacaagtggggactaaaacctaactaccactatttgttagctgtatgatttttggcaagtatcctttaagtctattcctttatcaataaatcagggctaggccgggcatagtggttcatgcctgtaatcccaacattttgggaggccaaggtgagaggatcacctgaggtcaggagttcaagaccagcctggccaacatggtgaaacagcgtctctaccaaaaatacaaaaattagacgggcatggtggcgagcacctgtagtcccagctactcgggaggctgacgcaggagaatcacttgaacctggcaggcggaggttgcagtaagccaggatcacaccactgcactccagcctgagcgacggagcgagactccacctcaaaaaagaataataataaaataaaataaattttgaaaatagggataaaaacttatctcacaaggttgttatgaggcataaatgggataatagtttgtggcatgtagtggcacattgtaaattatagtcataattgtattttaaaaagaaaaaaaaacacttcagcagccaatctaagtgactgtaggcaaagtggagggattctgacagcagggagaccagctgggattcaagcaatatagcccagtgctttcttacttgcttttcttacttttcttactttcttaccctgacctcatcttaagcttccagccttggagatttgatgaacactaattgaactgcagagaggtcaaaggtttccccgttgccctttggccagtgtaggggcagaaaggggtgatccttttcctcaccatcataagggtcatggctgacactcccataacaaaagacaggttaaaaagaaaaaaccataacaagtttacttgatcatagttttatgtgacatgggaggcttcagactgaagacccatagatacaaggaaaatcgtcctttatgcttaggttcaataaagcatatgtagaattgtgattggacaaaaagggtccaagctaacggaaatggattgagtgggaaaacccagcaaagcctgtctgttcaaatccttctggcctctcttttgtagcatttcttcctccctgtcctccctactactggaacgagtgtcttttctttcttttttttggagatagagtttcactcttgttgcccaagttggagtgcagtggcaagatctcggtccactgcaacctccacctcccaggttcaagcaattctactgtttcagcttcctgagtagctgggattgcaggcatgcaccaccatgcccggctaattttgtattttcagtagagacggggtttcttcacgttggtcaagctggtctcaaactccagacctcaggtgatccccccacctcagcctcccaaattgctgggattataggcatgagccatcgcgcccagccttaacttctttttttctttttttgagacggagtcgcactctgtcacccaggctggagtacagttgtgcgatctcggctcactgcaacctccacctcgcgggcccaagtgattctcctgcctcaggctccagagtagcgtgcgccaccacacccagctaatttttgtatttttcgtagagacggggtttcaccatgttggccaggatggtctcgaactcccgacctcaggtgatcttcccacctcagcctcccaaagtgctgggattacaggcatgagccaccatacctggccatgtttccttttctccttttttttaaaaaattttatttttgagacggagtctagctctgtcacccaggctggagtgcagtggtgtgatctcgcctcaccgcaacctccacctcctgggttcaagtgatttctggctaatgttagtaattttaatagagatggggtttcaccatgttggccaggctggtctcaaactcctgacctcaagtgatctcctggccttggcggctcaaagtgctaggattacaggcgtgaaccaccgtgctcggccttaatttctttatggccagctgttacatagaaaggcaaagagaaaggttagagcaatatttttaggctttatggctggctttgggacaaaggggttctactttctagaccccctcttggggaggagggattctagtttctgtggcatgcctggagggagagtaaggggcaagagacaagagggcagaaggtcagagagaaactgcttcataggccttcactttgtggtattgttttctaagccccagcactaggttggtgggaaacggtgagggcaggtgctttgaaaacattttaaaaatccttttccccgccaggttcctacccactgaagccacactgctagggaggaaaaagagaagggcagatgctgaggccctggagagtcggcctgaagtgaggaagtggcacatgaatggccaccttttctttcctcagtgtgcccagggatagagaatgggagacagcaagacagaatacaatgtctcattaactctgggcagcatccagatacttcaggcctgggagaggtgtccttgactgcccaggggctcaaagttaggatgtagctagtgagataagatgcaacaactgtggaacttgatcaaccctatttcagagccatcgtggattcaggagccctcctgtaggagatgggaaacattcaggtgagagtcctcagaactggggatgtggcgaaaagatccttgactgccagcagcaacctaatttctgagcctctttcctaatctgtgaaatgaagtagtttaactcattttttatgcaagctggtttgtgatataagaatatgtactaataaaatcccttacgcataggccttttttttttttgagatggagttttgatcttgttgcccaggctggagtgcaatggtgcgatctcaactcactgcaacctctgcctcctgggttccagcaattctcctgcctcagcctcccaaatagctgggattacaggcatgcgccaccacacctggctaattttgcatttttagtagagacaggggtttctccatgttggtcaggctggtctcgaactcccgacctcaggtgatccgcccgccttgggctcccaaagtgctaggattacaggcgtgagcaaccgcgtccagcggcattctttcccccattcgctgttttattttatgccacaatgagaaggcggggctaagcaaagtaggtttttgttttgtttggtttttttgagacggagtttcgctcttgttgcccaggctggagtgcaatggcaccatctcggctcaccgcaacctcctcctcctgggttcaagcgattctcctgcctcagcctcccgagtagctgggattgcgggcatgcgttgcgccaccacgcctggctaattttgtatttttagtagagacgggggttcctccatgttgcccaggctggtcttgaactcccgaccgcaggtgatccgcccgcctcggcctcccaaaagtgctgggattacaggcatgagccacagcgcccgggcgcaaagtacgtattttttattatagtttgttgttattgctgtcattcctattttgaggtgattaagtgccctcctgggcctgactcgaacaagatcacggtcggttgctcctccctcgcctccattcctacttacaggatggcagctgcacgtcacctgaccagagacaaggcgggacgcgaggctaacagtttgtcctcagcgcgccgccgtagcccccgccgccgccggccgcgcggtggctcctcccgcccacgcgccagagtcgcagtgggcgggcctacgtgctccgcccgctgtgagcctgtccggcccccgcccgctccggagcaacccgcgagcttacaccggcttctctctgtcctcagcccgcgcgccgccatcgccgtcatgctgggcgccgctctccgccgctgcgctgtggccgcaaccacccgggccgaccctcgaggcctcctgcactccgcccggacccccggccccgccgtgggtaaggcccctgcttgccactgcccgcgccctcgtgtccttgcggtgacctgggtccccgctgccactccggggcgggctctccccggcctagcccttgccctaccctggttactgaacccggtgaccgcgggccgccctgcccgccgcctcgagtagtggaggacctgaaagcgcgcccccggggcctccccccgcgcaacttcctggctgtgccaccgcggacaggtcagatgtggacctgctgtgggcgccgaggaggggacgcagcgctccccttcggttcccgggccatgaccctgccccagcgccgaccctgcggccacctgaccgagagtggccgccgccggcctgcagcgcctcggcgaaggtgacattgagcctccgggcacgccgcttggggtccgaggacacaatatacttccgtatgggacacacgattatacttttcaatcaggcatttctcggttagcgattagtgtgtcaccttcacagccttttccatcatttttagggtctgctgtgccacgttctaattcttccacgtttaaaatagatggaagtgtgtggttgtttcctgatctccggaagatagccagagttttgatagggcttatgataaaaatatcactcttttgaaaactgaatgtcacagacacaggaatactgggttttacaagcataggaacgcttcgtgttttttcccctttgtaatagaagcctgattgctggagtatgagacgtgcttctgatttttgtctattttccttccctttatatgtgtgctgggaggttttgagtccaccaccatagaataattacagtaattgcacttcgatcttggtccgtgaaatttagcttctatgcatgcatattat

SEQ ID NO: 6639 - DNA, 6000 bp, Homo sapiens
ggagtgccttgctttccacttccttgccatggcttccacacaggctcgttctctgtggctctagctccaactaggattgaaggacagacctctcttgggtaccatgaagctcctcagactgaatcaaagatgcagagagtagaataattggaagggtgctgagaaagcccagcaatacctcccttgtctcctgcctgttctgttgcctaaattccaccattatagcatgagcactttggattcaacatctctcttgccatttggcctgtgtatagtatagctgtgtctaattcctttaccagttattaatatcttgcctggacttggcttatcagatcaatttcctgcaggttggttttccttgttagagcatacggaaagaagtggcaggttgggtcggggctatagcaagtatccagtgtcctaagaattaccgtggagaagtgctggaaacagcgaccaggagaaacataattttctggggggagaatccaggaaggcatcccagaggaagtgatgttttatctgagactcaaggtaggggacactagaactagaggcaggcaggcctggtaggttctgctaaagatactttttttttttttttcaagagtgcaggatggatttattgctcgtggtttgaggaggcttcaagcatgtccttatttttttttttttttttattgatcattcttgggtgtttctcgcagaggggtatttggcagggtcataggacaatagtggagggaaggtcagcagataaacaagtgaaaaaaggtctctggttttcctaggcagaggaccctgcggccttccgcagtgtttgtgtccctgggtacttgagattagggagtggtgatgactcttaacgagcatgctgccttcaagcatctgtttaacaaagcacaacttgcactgcccttaatccctttaaccctgagtggacacagcacatgtttcagagggcacagggttgggggtaaggtcacagatcaacaggatcacaaggcagaagaatttttcttagtacagaacaaaatgaagagtctcccatgtctacctctttctacacagacacggcaaccatccgatttctcaatcttttccccgcttttcccctctttctattccacaaaaccgccattgtcatcatggcccgttctcaatgagctgttgggtacacctcccagatggggtggtggccgggcagaggggctcctcacttcccagtaggggcggccgggcagaggcgcccctcacctcccggacgaggcggctggccgggcggggggctgacccccccacctccctcccggacagggcggctggccgggcggggggctgacccccccacctccctcccggacggggcggctggcctggcgggggctgacccccacctccctcccggacggggtggctgccgggcggagacgctcctcacttcccagacggggtggctgccgggcggaggggctcctcacttctcagacggggcggttgccaggcggagggtctccttgattctcagacggggcggccgggcagagacgctcctcacctcccagacggggtcgcggctgggtagaggcgctcctcacatcccagacggggcagcagggcaaaggcgctccccacatctcagacgatgggctgccgggcagagacgctcctcacttcctagatgggatggcggtggggcagagacgctcctcactttccagactgggcagccaggcagaggggctcctcacgtcccagacgatgggcggccaggcagagacgctcctcacttcccagacggggtggcggccgggcagaggctgcaatctcggcactttgggaggccaaggcaggcgggtgggaggtggaggttgtagcgagccgagatcacgccactgcgctccagcctgggcaccattgagcactgagtgaaccagaatccgtctgcaatcccggcacctcgggaggccgaggctggcggatcactccctgttaggagctggagaccagcccggccaacacagcgaaaccccgtctccaccaaaaaaatacgaaaaccagtcaggcgtggcggcgcgcgcctgcaatcgcaggcactcggcaggctgaggcaggagaatcaggcagggaggttgcagtgagccgagatggcagcagtacagtccagctttggctcggcatcagagggagaccgtggaaagaggggacagggagagggagggagagggagagggagagggagagggagagctgctaaagattcttattcctgccttcagagtggtgggagctaccaaagaaatttaagcaaggtggtgatggaatgagattttgcatttttgacaggaccactctgggtgccacaggatggagaagtaattggacggagcaaaaggcaaatgggaacctaggtggaggctaagtgctccagggagcaatgatgggccctggatgagttgtggcagtggagctggacagatgccaaagcagatgccaagcagagaaatgtgcctcctattcttagcacagtagcccgagtgaccttgcttctcttacaccccagccatgtctctatctcgcacagaggaagtctcatgtctctcaatggggtgctccctgcacatgcggcagggcgctgtgcctcatgggcatcccatccccctggactacatgccaggagaactccccagtcacatgacctctgcacatccctggtactgctcggtccttcaagaaccactgtggtggggggtggcgggaggctttgattttgcttattccctctgccagttgcagtcttttatttgagatggagtctcgctctgtcacccaggctggagtgcagtggcgtgatctcagctcactgcaacatctgcctcccaggttcaagcaattctcctgcctgactccactccccccaaacccccctcaccgccccagtatctgggattacaggtgagcaacaccatgcccggctaatttttgtatttttgatagagatggggttttgccatattggccaggctggtcttgaactcctgacctcaggcgatcctcccgactcggccttccaaagtcctgggattacaggcgtgagccaccgcacctgcccaggtacactttttatccagatatctatgcacattgattcttgactccacactcctgcctctctccgcaaggccttccctgacccccttgttttgaattgcaatctgccctcacataatccgtacgccttttctgtttaatttttttcaaccgcactttttaccctctcacattctctagatttggggcatattacttgtctccttccatcagaatgtaaactccacgagattaggagtgctgtcagctgtgttcccttctctgtcaatcgccagcgcctccgaacagctcctggcacatagtagttgcttggtaaatatttgtgcaatgcacgaggccgcatatgaccggaatgggaggtgaggggattattttctggcctggaccagcgacggatggtggtgccaccgggttggggagcacgtcggggatggcgcgtaacgatgttagctggggccaggttgagctaggcacgcaaatacaactttttttttcctggaaaccctgtaacaggaaggttccggagggcgggacagcgtcggaggcaggcagctaggccatgccaaatggcactggggcttcgtgtcgtgccacaggcgtggaccgaaaatgcggacacatgcaggctgcctctcctcgcaggcagaagccacacgcagacctagaccctttgcaccgcatccccttattcaatcgcgcacccgccacccttcgacagttcctctccctccaccccaaccccacgccgcgcgcgaggctggccctttaagagccccgccccgactccctcccccctcgcgtgactgcgagcccccgcgccgggccggggaatgggtcggctgggtggctgcgcgggcctccggtccttctcacgcaacgcctgggcaccgcgcctccgggccaggtggggcggggacgggccgcctgacctctgccccctagagggatgtcgccggcgcacgcaagctagccgggggtagggtgggggctccgcgccaggtgccccctccgtggtccctgggcccgagtctttccgtggccccccgccgccggatttctgtgctctgccaatcaaagcactagccaccccgggagccaagagggaccctcaagggccggtgggtcctggctggagggaccgcgcgttgcaatcagcactaaggcgatcctagaggctgcgaggagccgctagtgagcgctcagcgagcctgccccttcgccatccattccgatccttcaatcaagaggcgcgaacctcagctagtcgcccgggctctgggggacaggtccagccccgcggcgcctctggccttccggcccccgtgacctcagggctggggtcgcagcgcttctcacgcgagccgggactcagtaaccccgggaaggaggtcaccacggggcagccccgcccccgcctgccgagtcctggtaggctgtagcgctggggaggcatctgcacgcccagcgttccagtgggtgcaaaaatgacgaagaggagtccccgcgccccaggatggagcttcccgtaccctctcttcgggctgtcctgggacttctccctcaagccccctcctcggctgggttctgcactgcccttgggacgccttggaattgggacttccaggtgttcccagccctcacccctctatgtacaggcaccgagatgtgtcccatagtgggttcttgcccacccgaccccccacccccgccgccctccgccacctttctctccaatcccagagagaccagcccggttcaggctgcttctccctccatctcagctcgctccagggaaggaggcgtggccacacgtacaagcccgcctataaaggtggcagtgccttcaccctcaccctgaaggtgacagttccttggaaccttccctgatccttgtgatcccaggctccaagagtccacccttcccagctcagctcagtacctcaggtgagttgctgggggacttctggcttgccctttctctcccaataaaaggaacattttggtgcctccaggacttcttaggtagctacctgtctagcacctccaaaaagggaggctcagagtgtttttagtgaccaggcagtctagccccctagtggggaaactgaggccaggggaagaggaggacttgcccatggtcccacagctggtaccagacctctagatacagatggcatctcattcaggacttcaggacccaggctccagctccatcccctagtgagtgtctccctgcctaccctggggcttccccatcaaggccacctggcaggctggaatatgtgcagcccctccctcaggctttctgatgacaggggcttctccttgggtggacagggtggatggagggggtgggctgggttcttaccagctgtaccctgccctagcctaagaagctacccctggcagattttaccctcctaagggtggcttgtcagtgctgagatgtcctagacagctgggacaatagaggcagatctgtgcaggagtcccaggcctttcctatctcattgaccatcttctttgtcctttgctgggagacaatcagggtgacagattgccaactgcagggagctggaaataccagtccctaaaaactcaccagtcacatctcccttggcctcctaccatcttacaaaggctgcaggtccttgggatacccactgtgcagaaggggacaccatagcacaccaaagcctggcactgtcccctgttgactcagggatctagtgtgctttgatatttagcccctccaggaagcctccctccactataatacttgtggtaggaaccatccatctccctgtcttgtgaggttctcctgtggggagcctaactggtaagactgtcaggttccccacagcagatctgggttttctcttccct

SEQ ID NO: 6640 - DNA, 6000 bp, Homo sapiens
ggggaattgcaatggagaaagagtaaattcatgcagcgccagctgtgcagaaaaccggagttttattattacccaaatcagtcgtcctgagcattcagggatcagagtttttattttaatttatttgtttgtttatttttgagacagagtcttacactgttgcctgggctagagtgcaatggtgtgatctcggcttactgcaacctctgcctcccgggttcaatcgattctcctgcctcagcctccggagtaggtgggattacaggcgccccgccaccatgcccagcttattttttgtatttttagtatatagacagggtttcactatgttagccaggctggtcttgaattcctgacctcataatctgcccgcctaggcctctcaaagtgctgggattacaggcgtgagccaccgcgcccggcctatttatttatttattttagatggagtcttgctctgtctcctgtgctggagtgcaatggcacgatctcagctcactgcaacctccacctcccgggttcaagcaattatctgcctcagcctcccgagtagctgggattacaggcgactgccaccatgctcagcaattttttttgtattttttagtagagatgaggcttcaccatcttggccgggctggtcttgaactcctgaccttatgatccacctgccttggcctccgaaagtgctgggattacaggtgtgagccactgcgcccagcctctgggatcagagtttttaaagataatttggccgggtgtggtggctcatgcctgtaatcccagcactttgggaggccgaggcgggcagatcacgaggtcaggagatcgagaccatcctggccaacatagtgaaaccccatctctactaaaaatacaaaaattagccgggcatggtgtcgcatgcctgtaatcccagctacttgggaggcagaggcaggagaatcccttgaaccggggagttggaggttgcagtgacccgagattgtgccacagcactctagcctggtgacagagcaagactccgtctcaaaaagaaaaaaagagagaaaaaaaaagataatttggctggtaggggctaggcaagtagggagtgctgattggtcgggttggagatggaatcatagggggtcgaagtgagtttttcttgctgtcttctgttcctgagtgggatggcagaactgtctgagctacattactgttggaggtggtgtcagcagatccatcaagtgcaaggtctgcaaaatatctcaagcactgatcttaggttttacaatagtgatgttattctcaggagcaatctggggaggttcagactcacagctgaaggctgcatggtccctaaaccatagtttctaatcttgtagctaatttattagtccagaaaggcagactggtccccaggcaagaagggatttttttttttttttttttttggaaaagggctataatcaattttgtttcagagttaaactataaattccttcccaaggttagttcagcctacacccaggaatgaacaaggaccacttaaaggtcagaagcaagatggagtaggttaggtctaatctctcccactgtcataatttcctcagttataatttttgcaaaggtggtttcaagatcaagatgagaaaaatgggtcttggagaggtgaaataactggtttaaaagcaaagagctgcattctctatacctcctctcttgtagaataaatgaatgatgtctctcttgtagggaattagacagatagatgggcagccaccacattggttgtaattaagtttcattctttcttcaccagcccagcattgtacttggctgcagcagacccagagcaggcaggactgccttgtggggtgtggactgttctcctctgaggctgcagagagcagacagcaaagatctgtctgctgcccttgaggggtggccatagaggcttggggacaggcaatttctaaggggatacaaaatggatccttccccatcctcccacttgtgtgcagatatttcccgaagtaaagctgagctaaaccctaaaggatagtcaggatttagatgggagaggaaggtgaaagaaacagatgaccaggcgcagtggtgtgtacctgtaggcccagtactttgggaggcggaagtggcaggatcaattgaagccaggagttcaacaccagcttgggcaacaaagtaacaccctgtttctaaataaacaaacaaaataaatggatgcagggaaacagtaaaatagttactaaatgtgtatgatgcatgtgggctgggcacagtggctcacgcctgtaatcccagcactttgggaggccgaggcgagcagatcatttgaaatcaggagttcaagaccagcctggccaagatggtgaaacccagtctctattaaaattacaaaaaaaaaaaaaaaaaaattaactgggtgtggtggtgagtgcctgtaatcccagctacttgggaggctaaagcagcagaatctcttggacctggaaggcggagattgcactgagctgagatcatgccactgtactccaccctgggtgacagagtgagactttgtctggaaaaaaaaaaaaccccaaacccacaaaaaataaattaataaatgtgtatcatgtgctttatactatgttagtgacagaaacacaacagtgagcaaaacagacctcagccctaccctcatggagctttcagtctagcggaggatacaggcataaagaaccacctatactagtattaattacaatctgcaatgggtattgtgaaggaaaagtacagggcaataggagagcttatgttgggtatgaggtgatgatgtaaccaagagagtgaagggaagctactcctgaagaaaggcatctgaacttgcatttaaagggtaaggagaggttaaccagaggatgatagtggggcatgggttaagtgcataccaggtagaaggaacacatgtgtaaaggccctgagacaggagggcacaaggaaggtttgagcaactgaaaagaacttgcatggctggaacagtgggtgggggttgggggctagaaggggtcagaaggggagaaacgtaggggcagatcctttaggaccttgaagacaaactaagaatttgggcctttatgattttttttttttttttttgagacagagtttcactctttttgcccaggctggagtgcaatgttgcaatcttagctcactgcaacctccgcctcccaggttcaaacgattctcctgcctcagcctcccaagtagctgggattacaggtgtgcaccaccacacccagctaattttgtatttttagtagagatgaggtttcaccatattggccaggctggtctcgaactcttgacctcaggtgatctgcctgccttggcttcccaaagtgctgcgactacaggcatgagccaccttgcctggcctgatttttttttttttttttttaactgagacagggtctcactctgtcactcagctggagtgtagtggtgcaaagatggctcactgcagctttgacctcctgagctcaaacagtcctcctgcctcagcctcccaagtagctgggagtacaggcacaggccaccatgcctagctaattacgtgtgtgtgtgagatatgtatatgtatatatatatatatatatatatatatatatatttttttttttttttttttttttttgtagagccagggtcctggtatgttgcctaggctggtctcgaactcctggcttcaagtgatcctcctacctctgcctcccaaagtactgggattacaggcataagccacgcacccagccctttatggaaattaattgaaaaattttaacaaagttctgtgataattttgccccctttaaacatatctttgattacaacatgaagaacaatagaccaattaacagcactgtattagttcagggtaaaaatgacagtggctgggattcggtgacagcagagatgaataataccagacagatccaaataaataaggtggatttggccagacagtggttcatgagtataatcctagcattttaggaagccaaggcgggaggatcacttcagcccaggtgtttgagacgagcctgggcaatatagtgagatccccatctctacaaaaaatccataaattagctgggtatggtggtgaccagctgtagtcccagctactcaggaggctgaggtgggaggattgcttgagcccaggagctcgaggctgcagtgagccatgattgcaccactgcactccagcctgggcgacagtgagaccctgtggggggcgggggcgggggaaagcggagctgtggagagtgaagcagccacctcccccatgattgaggctgtgttgctgaattccgtgagtcacttcataaatgtttgatgtccaggttcaagtcccaactcaggtcccaaagctgatgggcccaggaaccctcgtccctaaaacgatgaaacgacatcagagggcgagcagccctagaagaagcaggctcagctcgggtggaggactgctggatggtcctggcacttctctttccccgagcacgttctgcagaagaagcgctttcctagttctcccaaggcctctggcctcacctgtcacccctgtcctttgcccagggatcagtttggacttcttcccaaacttggtctacagagaagtgaaggggctgtttcctgtcccacttttgagagtttgctttagaaacataaaattggaaggtgtcagattgataggcagttgggaaggactccggccacgcctctggctccgtagacgctccgcgcagccaagacccctgaatccccagcagagcgaagatgtggacggaagccgaatgcccacccaccgcactattgtgggctgggcggggggggggggggggggggcggagcgaccccggtgccgtcatagggccacgccctcgggggagggcatcgcgcctgcgccagaaccgctgcctcgctcccggaagtggagggtctacacgaagcgccgctgggtctgggtgcccggaggcagcagcgttcgcggagttcgcccgctggcccccgatcaccatgtcggctttcgacaccaaccccttcgcggacccagtggatgtaaaccccttccaggtagagcccctctcccgccatccagctctcagatttccctagggcccacggccgccgcccgggcctctcgctagagccgggagacgtggcgtaggagggacgggtcatctgcccaatgggagagcgggctttgaggtctggcctatcgtaacgcgtgaggggcgcgactagcagcaggtggaactgcagaggaggcggggcgctgaagtgttggagacagtggggtcttctagcacccggaggctgggctgtgctagggaaggggactggagcaggtacggtcggacccttccggaagtctcctagcgtcagggagaagcgaaatgtggctatcgcattccctcattcttggatagacacctgtcttgagtcactttagaagagggggtgacagcaacatatgaggaggtggtgaagcctctggtggaggggaaaaatgtgggaaaagcccaggacacctgccaccgctccaccaccagccaaactagtgtataaagtacaggagagcccctgagatttgtcagggaaagaaagatgggagagggcgggaaggtagcccaagttgaaaaatggccttgataagaattccacattttggccatgggtctagtttggagtgggttttgaccagataggagagcccgggttagggagagaggagaggtgcgggggactgtgaaaaattctggacccacagggaacgtttgtctgatggaactgtgtgtggtggcaacatagttgagatgcactgacgtgtgagctggcctgacttttttttttttttttgagacggagtctcgctttgtcgcccaggctggagtgcattggcacgatttccgctcactgcaacctctgcctcccgagttcaagcaattc

SEQ ID NO: 6641 - DNA, 6000 bp, Homo sapiens
taaggggcaaaacaactagctagcatcataatgataggatcaaattcacacataacaatattaatcttcaatgtaaacaggctaaatgccccaattaaaagacacagactggcaaactggataaagattcaagacccattggcgtgctgtgtttaggagacccatcttatatgcaaagaaacacacgctcaaaataaagggctggaggaatatttaccaagcaaatggaaagcaaaaaaaaaaaaaaaaaaaaaaggcaggggttgcaatcctagtctctgataaaaacagactttaaaccaacaaagatcaaaagaaacaaagaagggcattacataatggtaaagggatcaatgcagaaagaagagataactatcctaaatatatatgcacccaatacaggagcacccagatccataaagcaagttcttagagacctacaaagagacatagactcccacacaataatagtgggaaactttaacaccccactgttcatattagatcaacaagaaagaaaattaaggatattcaggacttgaactcagctctggaccaagtggacctaatagacatctgcagaactctccacccaaatcaacagaatatatattcttctcggcaccacattgcaattatcctaaaattgaccacataattggaagtaaaatactcctcagcaaatgcaaaataatggaaatcataacagtctctccaaccacagtgcaatcaaattagaactcaggattaagaaactcactcaaaactgcacaagtacatggaaactgaacaacctgctcttgagtgactgatgggtaaataacgaaattaaggcagaaataaagaagttctttgaaaccaataagaacaaagaaacaatgtaccagaatctctgggacacagctaaagcagtgtttagagggaaatttatagcactaaatgccctcaagagaaagcaggaaagatctaaaattgacaccctaacatcacaattaaaagaactagaggagcaagagcaaacaaattcaaaatctagcagaagacaagaaataactaagatcagagcagtctgaaggagatagagacacgaaaaacacttcaaaaaatcaatggtatccaggagttggtttttttgaaaagatcaataaaatagactgctagactaataaagaagaaaagaaagaatcaaatagacacaataaaaaatgataaaggggatattaccactgatcccacagaaatataaactaccatcagagaataccataaacacctctatgcaaataaactagaaaatctagaagaaatggataaattcctggacacataccccctcccaacactaaaccaggaagaagtcgaatccctgaatagaccaataacaagttctgaaattgaggcagtaattaatagcctaccaaccaaaaaaagtccaggacaagacagattcacagccaaattccaccagaggtaccaagaggacctggtaccattccttttgaaactattccaaacaatagaaaaagagggactcctccctaactcattttatgaggccagcatcatcctgataccaaagcctggcagagatacaacaagaaaacaaaacttcaggccaacatccctgatgaatatcgatgtgaaaatattcaataaaatattggcaaactgaatccaacagcatgtcaaaaagcttatccaccacgatcaagtcagcttcatccctggaatgcaaggatgattcaacatacagaaatcaatacccgtaatccatcacataaacagaaccaatgacaaaaaccacgtgagtatctcaatagatgcagaaaaggcctttgataaaagtcaatacccctttatgctaaaaactaaaaacaataaactaggtatcgatggaatgcatgtcaaaaatcataagagctatttatgacaaacccacagccaatatcatactgaatgggcaaaagctggaagcattccctttgaaaaccagcacaacacaaggatgccctctctcaccattcctattcaacatagtattggaggttctggccaggccaatcaggcaagagaaagaaataaaggttattcaaataggaagagaggaagtcaaattgtctctgtttgcagatgacatgattgtatatttagaaaaccccatcatctcagccccaaaactccttaagctgatagcaacttcagcaaagtctcaggatacaaaatcagtatgcaaaaatcacaagcattcctatacaccaataacagacaaagagagccaaatcatgagtgaactcccattcacaactgctactaagagaataaaatacctaggaatacaactcacaagggatgtgaaggacctcttcaaggagaactacaaaccactgctcagggaaataagagaggacacaaacaaatggaagaacattccatgctcatggataggaagaatcaatatcttgaaaatggctatactgcccaaagtaatttagagattcaatgccatccccatcaggctaccattgactttcttcacagaattagaaaaatctactttaaactttatgtggaaccaaaaaagagcctgtgtagccaagacaatcctaaccaaaaggaacaaagctggaggcatcacgctacctgacttcaaactatactacaagactacagtaaccaaaacagcatggtactggtatcaaaacagacatatagaccaatggaacagaacagaggcctcagaaataactccacccatctacaaccatctgatctttgacaaacctgacaaaaacaagcaatggggaaaggatttcctatttaataaatggtgttgggaaaattggatagccatatgcagaaaactgaaactggaccccttccttacacctcatataaaaattaattcaagatggattaaagacatacacctaaaacgtaaagccataaaaaccctagaaagaaacctaggcaataccattcaggacacagatatgggcaaagacttcgtgactaaaacaccaaaagcaatggcaacaaaagccaaaactgacaaatgggatctaattaaaccaaagagcttctgcacagcaaaagaaactctcgtcagagtaaacaggcaacctacagaatgggagaaaatttttgcaatctattcatctgagaaagggctaatatccagaatctacaaggaacttaaacaaatttacaagaaaaaaaccaacaaccccatcaaaaagtgagtgaaggatatgaacagacagtcttcaaaataagacatttatgtggccaacaaacgtatgaaaaaaagctcatcatcactggtcattagagaaatgcaaatcaaaaagcacaatgagataccatctcatgccagttagaatggcgatcattaaaaagtcaggaaacaacagtgctggagaggatgtgaagaaataagaatgcttttacactattggtgggagtgtaaattagttcaaccattgtggaagacagtgtggtgattccccaaggatctagaactagaaataccatttgacccagcaatccaattactgggtatatacccaaaggattataaatcatgctactataaagacacatgcacacatatgtttattgcggcactgttcacaatagcaaagacttggaaccaacccaaattcccctcaatgatagactggataaagaaaatgtggcacatatataccgtggaatactatgcagccataagaaaggatgagctcatgtcctttgcagggccatggatgaagctggaaaccatcattctcagcaaactaacacaagaacagaaaaccaaacaccgcatgttctcataggtggaaattgaacaatgagaatacatggacacagggaggagaacatcacacactagggcctgtcggggtggggggctaagggagggataacattaggagaaatacctaatgtaaatgacaggttggtgggtgcaggaaaccagcatggcacttgtatacctatgtaacaaacctgcatattctgcacatgtatcccagaacttaaagtataattttaaaaatgtaataatgaacatttttttttttttgagacggagtctcactctgttgcccaggctggagtgcagtggtgcaatctcagctcactgcaagctccgcctcccgggttcacaccattctcctaatgaacagattgtttttagagtatttgattttgagtttattttaatattttcttaaaacaacaaaacaaacttattagtttgggctttacatcagtcaagtaataatgtctgaattgtcgttttagaaaagataaccatctaaatgtttggcatattttagataattatatgatgaagaactctatattcatttaaacaaaattacagttttagtcaatattttaaaattgtttatgatttttaaaacttaactttcctcactgtatatttaacaactttgccatagcattcaggcattacactgtcattggtattagtcaagttcagtgattttattcatttcaaattgaacttggtgttacaagttttattatagctattaccttcttttagctttataagttcttcaggtcattatttatataaattttatctggcttgtaaggtaacacaaacctcataaaacataaatttaaaaaaatgtttttttaatttgtgaaacacttatctattagctccacattaaaatttcttttctcccaaacttacactacgtcttgaattattcagacaagcaaagataagtaaggagtctaaggaatgtggtttggtttttacctttaaaacgtggacagtaatttggaagtgcagcttagttcaactccttttctaaataaaattctgctccatttgcaactctgaacacgtaaattgaaggggtggctcccgtggccagtgcctgacctctgtgcacaccttggtctggcgtgacctcgcccacactgcacactgcagccatataaatcagatttttgacatgttataaaatgcaagtcacagctgctgttgtctgcggtattcaaaaacttttgaaacactgcatgtccaacaaaatttattttttgtgtgaatgtaagtttttattgagggtaagtcctgtttgtttggaaaaaagaaacagtatgagtcagtgctttttaaaaatcaaatagatttaatgttctccttcctgcctgttctcgctcgtgtgtgtttctctcgattgcttgctcgctttctctgcctctctgcttgtctaagaaagagctgttggctttgagagaagaccttggtattacaactgtgttagtagattgagatttctgttagagtctttctgtttaggtcagaagtgttctttatagaacagaactgggagcttgtaatcataatgtaagtataaatgcttcacctcttcaaatatatgtttgaattcttttgtttctgttatagcaggaaacttcatatgtaagaatgtcttattagctacattgctttgccagatgccagacatttttgtgtgtgtgtggggttaacattttttttcttttttaaatttaattttaagttccgggatagatgtgcaggacgtgcaggtttgttacatagtgtgtttataacatgtgtgccatggtggtttgccgcacctatcagccctggacattttttagaagaaaggtttgcataggttggtaaatgtaatgtgcaatctatggtaaacttaaaagtgcttttataaaagttttaaaggttcagttcattcagttttacttactgtctcatcgttcatgtaaaattccatgtagtactctactatgttaacaatgtttacgaaaaaaagccttattagacttttctgcagagagatatttaagattaaattacattatttaggcaatgatttatattaagtacgttattgatcttttagttttgttcatattttttactgaaatgcaataggtatctaaaaatgctgtaactaaaatttgtccctagta

SEQ ID NO: 6642 - DNA, 6000 bp, Homo sapiens
gaaactgttcatagttttttgttttttgttttttgttttcctggatgtagagaaatgaatatttttctttcttctactttttggaattttccgatttttctataacaatcattgtattcgtcaggattcttgatgagaaattacagaaatagactccagctaccttgagcaggaaaggatttattgtaagaacattaggtagttccagcatccttcggaatgctggaagctgtggaaggtttagtaggagggatctcagccaaggtcaaaccacagggatggtgtggttaggcggctgctgccggcactgccaccccggcacacacagtcggcgctgctgccagactcaatgcctgcactgccaccgtaaatactctcttttactgtccctgtgtctttgcgtcactccctgaaggtccagatttctgggcaggatcatctgacttgccagtatctatcacatggccatgttctagctgcctgagtgcagggagaaagactgtcaggctccagtctgggtgcccccaaaattcatacaatggggatcttcccaaacaggcagggcgatccaatgcaggatagcgcaaaaaaagacaaatggccacaagcaggtattgttattattattattatttgcaatggcccaaatcatactacagagcagatttaagaaaggcacaaaccaggctgggcacggtggctcacgcctgtaatcctagcactttgggaggctgaggcgggcggatcacgaggtcaggagatcaagaccatcttggctaacacggtgaaaccccgtgtctactaaaaatacaaaaaattagccgggcatggtggcaggtgcctgtagtcccagctaatcgggaggctgaggcaggagaatggcgtgaacctgggaagcggagcttgcagtgagccaagatcgtgccactgcactccagcctgggcgagagagtgagactccgtctcaaaaaaaaaaaaaaaaaaaaaatggaaggcacaaaccaccacaagcaggcattgctttacaatggaaagaaaatgaataaaccttttcttttttggtaaaagatagactctttgtgtcatacaacatggatcagagtgaattttacttcacacagtacgggttgaagaacagagtttattagggcaagttacaggccaggggtcagtaagcgaagtcacaattgctccatcctcccatcatccccagacaggtgtgccactgtcagatgcagcaagacagagtgggtctgtgcttccttgggagggacttcatgccctcagttgctctcttagcaactttgtcagtggaggtaaaatcagacttcctgagcactgggcagtaggaatttggagttccaagagttacccaggaaggctaattttccagtaagaaggatcctctcggtgggtagaaggggtcagtgagggagactgtgggtcataatatccaagtcttggcccagggaaaaggatgggtggactattcatgaagctaaggaacacaggtagaggagaggcaggttgaggggaaattatgagttcagtttgggacctgccgggtctggcacacatataagttaaccccatacaaggttatggtatggtccctgttataaactctcacagcagcctgagggtctcctttgtattgcttatcccagttgcaattagataaataatttcataattagcgttgaatctccgctctggattgcaagctccctggggccatcacacacccaggtctaaccactatgttgctagaaccaccccccaccacgtggcatagggtcaggcacagagtaggtaaccaataaatgtgttgaatcaataaatgaatccacctggagcaacacagcaggcagtcggattcatggaaaggaaattgagagaaagacctgggctgaagctgtaggttcaggaaagtcctgcacgtggatagcaacggaatccagtgctctgggtgagctggcccaggttggttgagaaaatcaaaagacctaagccagaactctgggagacaccaacatccaatgggtgcaaggaacaggtgctgctgcaaaggcagacagtgaactaagagatgatggtgttatggaagctaaggaaaggcagagttctgagtacgaagaagtcaacggagccaaatatggttaggtctcggaaacagtaaactccggtgattacaaagcacctgtgtgccaggtacttttctgacagctatatgtatatgaatgcacttaattctcacagcaatcacatgataattagggaagtaatgtcatcatcattttctccctatgatggggatactgaggcacagagagaggacccagctaggctacctggtccccgagcctgtgctcttaaccatgatatatgccacctcagagaaggggtagcagataagtcactggtaacattgacaagagcgatatcggtggcactgtgggggtgatgccacatggcagtgagtcaaaaagtgaggccaggcacgatggctcacgcctgtaatcccaacactttgagaggccaaggcaggtggatcatgaggtcaggagttcaagaccagcctgaccaacatggtgaaaccccgtctctactaaaaatacaaaaattagccaggtgtggtggtggacacctgtaattccagctactcaggaggctgaagcaggagaatcgcttgaacctgggaggcggaggttgcagtgagcggagattgcaccactgcactccagcctgggcgacagagcgagactacatctcaacaacaaaaaaaagtgagtgggaagcaaaagagtcaagggcagaagtccagccccttgctacaaagaggggcccagctgcacccccaccacctggagtctgcatcctcaggtgatctgtgcgcaaggcaaagtctgagaagcactggatgagatgactcttttaggaactttggctaagagaagaaagaaaaagtaaaacatggtgtttaagtgagaggcttttctttttaggataggagaggcatgaccatgcttgtaaactcagaactgtggtttgcagccccaacagcatattcgaatcacctggtgtgtttttgaaaaacacctgattccctgaggctcgcccccagagaatctgatggagtttgtctgtgtggcccagatgattgtaatgtggggggggggggggtctgagacccactcaaggagaaggcacaagaaggacttgatgagaccttcacagggaaatgagaagggacacgatgaggatgaagaaatgcaaaggggatgttttggaaaaggaggaaaagcactcagagcaaagcagacagagaaatttacagagggcagaggcgtcaagaagatagatgttcaaagggaatcatgtttgagagcccatcatttttctttctttaactaggacctccatggtatggcaagaatggcacttgaaacacttagatggtgttactggtctgctcaaaggcttctgcctggcgtagtaggctgttggtgatccggcctcgctcacctccagcacactaggctctctgtgttccccttcctacagcacagtgatcatgttccggtctctgggcctttgtccttgctgctctcatctttgggctgttcccctcacctcccttgggtcccctccaatgttctctcctcagagaggactcctctcatcactctattcctttcctctgaattgtttcctaacactacctcatgtcatatacccacttgcccgtttgtttatggtctgcctcctctgcccgaacgaatgtaagccatggaaggaaggatacgtcttgctcacagtggaatatccaccaccgacaacagtgaggcccagaggggacacgcggcaagtttgatgagtgaataaatggctgttgctgctgcttggtgtaaatgcacaggatgctgagattaacaggtacttctgagagtgcctgggaaaggtgatgagtgggggagattgcatgagagcgagctgataaagaccagtaaatggaaatccttacgggcgcggtcaaggagggagtgcaggattataatggcaggaaagacagcaaacagaggcagtttattgtgtgactgatgatgtgttttttgcactagaccacttactatgtgtggctctgggcgaacttcttaacctttctaagcctcaattacccgatcagtaaaatgaggctgataaccatagtgccttccatccagggttgtggtgggggttaaatgaactaatggagcctggcaccgggtgagcacccaataattaattgctatgacggattcaagattgggggaagaatgtgaaatgttgcaatgcaaagagatgtttctgtaatcgttgcgaatcttggtccaaaacttactaccctggaatagaacttgttcccaaccactcacccacacaaacatgtctctgccttgctaacgccatcaccagccttttctcctctctgactcttctgaggtctagcccagcgcctggtacaataagtttctccataagtatttgttgtttttctttgcacttctcaccaacagtgctgccaagattttaacctggtcaggagaatctggtcaggcagagattagtgtctccaaccttcctaggggagaatgggctaggtagaaagatagcactcagagggctctgaatcatctataagggtggcatagtcataggaggagagtgggtttggtccaccagaacctccctagggagccatctgcgtccaagggcggccagaggccaagaaaaggcgctgaggccttggctcctttaagaggcgtggcctcactgcagcctccgcagaggcgattggctgaagctaccggccgcgtggggcgggactcggttgccagggagcggcgcgggagccctgaggggactgcggcggctgcgcggaggagcgaggcacttgctggggtcggggctgcgcgacggcgcaggggctgcggggagcgccgcgcaggccgtgcagttcctagcgaggaggcgccgccgccattgccgctctctcggtgagcgcagccccgctctccgggccgggccttcgcgggccaccggcgccatgggccagtgcggcatcacctcctccaagaccgtgctggtctttctcaacctcatcttctgggtgagcggggccgggcagagcgaggggccggcggcggggccgggcgaggccgcggcggaggcgcccgtgggggccgggcttgggcctgggcgggcgcgcgggggccgcgcgcgggccctcaggcggctgaggcgaggggagggccgggtgtgaggccgcttcgcgaggtccctgccggaccaagccgggagcctgggcgcggaggacagcgaggggaggccttcagggactccacggcctccagccggcgcctccgcgctcggcccacgcgggctggctccgtgccaggcgccccagtctcccccccccggagtcgccggctggacggagagcgcttattgcagactgtagcaggacgtcgggctcgaaataggatcttcgccagaggctcaggttccgcgctctttgtcggggcctcgcagacgagtggccgtcccgaggcgggcagatccgcggggacgctgcggagccggggcgggggttccacttaacgccctttgtgtgtggagaaccggctgactgtcaccagcccagaaaatgaagggtttcaactcgaggagccaaataatccattgaccaagaacatcggtctatttgttttggtcatgggggtgaccaaactgtgagattataactcttggttaaatatatgatggagatgtcacaagattttgaaagtgatgagttcactttcaataaaaggtggcttatgaatttttaaggggtacaccctctttgaaaggaatgtttatgtcatcttagtttgggtccttatctcatcagggacttttatagtaacctaagttgttcctatccgtctctccaccctccagcccatctggactttgcac

SEQ ID NO: 6643 - DNA, 6000 bp, Homo sapiens
agttttaaaaacatgaagtcaggccgggtgcggtggctcatgcttgtaattccagcactttgggaggccgaggggggcagatcacctgatgttgggagttcgagaccagcctgactaacatgccgaaaccctgtctctactaaaaataaaaaataaataaataaataaataaatagccaggcgtggttgcgcatgcctgtaattccagctacttgggaggctgaggcaggagaatcacttgagcccaggaggcagaagttgcggtgagccgagattacaccattgcactccactccagcctgggcaacaataacaacaacaaaaaaacccacatgacgtctactttgcttctgctggtagagacccttgatttgtacagaagtggttaaccagggctcaaccataatgacagaccttcctagcctagaatttgtgtatcagtttgaacccacttcttgttttgaataattattaaattctttgtccacttaccatttgtcatccattgtgacaacagctttatttatttatttatttattttatttattttttgagatagagtctctctttgtcgccaagactggagtgcagtagcacaattatggctcactaagggatcaactttcaggactcaatcgatcctcctgactcagcctcccgagtagctggaactacaggcatgtgtccccacacctggctaatttttaaaattttctgtagagatgaggcttccactatgttgcccaggttggtctcgaactcctgggctcgagtaatctgcccaccttggcctctcaaagtattgggattacaggcgtcagccaccatgcccagcccccaacagccttatttacatgtactattttgttaaatcctcaaatgacataaattcttttctattcctactttacacaccagaaaactagggattaaaaaattgctaactgagttgggcatggtggcatgcgcctgcagtcccagctacttgggaggctgagtgggaggattgcttgagcaatctaggcttcagtggtctaggcttcagtgaagggtgatcacatcactgcactccagcctgggtgacagagtgagactctgtctgtagaaacattaaattaaataaatttttttggaaaaagagttaactaattggtccaagatcaaacagctggcaattgatctgtgattcaaagccaagtgggtctaacttaacttctatactaagatgcttccttcaggggggccagcaggctctctgtaaaggaaaatgccagacataacactgtgattgacagggcccaaaagacttatgtgtcagaaagattgccatcccagtcggcagagaaaatagcatgtcagagtcccacatttggaaaattgaattccttaggctttatatcaagtctgggatcacctgtcctaaatatctgaattattttcataagagacaccgagcagtataagaaacctcattaagcctttgcagatcctcctagtttatatcactctcccctggtcccgttcctttctcatgcattctttttttttttaagacagagtctcactccattgctcaggctggaatgcaatggtgtgatcttggctcactgcaacctctgccccccgggatcaagcgattttcctgcctcagcctccgagtagctgggactacaggcacctgccaccatgcctggctaagttttgtatttttagtagagacggggtttcaccatgttggccaggctggtctcaaactcgacctcaggtgatccatctgcctcggcctcccaaagtgctgggattacagacatgagccaccgtgcctggcctaatttttagttttagtagagcagaggtctcactttgttgtccaggctggtcttgaactcctgggccaaagggatctttcccccttggcttctcaaagtgctgggattacaggcgtgagccaccgtgcctggcctgacaccctttttaagctccccacaagcctccccaactgaactgacttttgccacatctgaaactccacaggactttacgcctctcttagggctcttttctacacattacaagattgatactcatttaaatagttgctggcgctcacttttagatttgaattcaacattaataggcataggccaagggttctactagcgagaatttagactagaacccatatttaacatttattaacaaatacttattgagtgtctgctacatgtctggtactcttatggaagctggagataaaggggtggacaagacaatgtccctgtcctcatggagttcacatgtattttcttccacaagtcttcctaaattggataaattaggaattttttttcaactcaataagtgtggggtgcctagaggcagcagtttttggaggtgacaaaaatacacacacacacacacacacacttttaaattcaacaagtatttattgggtataacatgtgctaggctatgtgttcaccactaggaatttaacagtgagccagacaccagtggtttctttttctttctcataatagctttattgtgatataatacacataccatacaattcaccagtgtaaagtgtacaatttaatggttttgagtatattcacatagttgtagaactagcatcccctaaaagaaactccatacccattagcagccactccccattttccccaactctcccagccctaggcaaccactgatttccatctctgtggatttgtctattctagatatttcacctaaatggaatcatgcaatgctttgtcttttgtgactggatcctttcactaaatctgtttcaagggtcattcatgttgtagtatttccttttgttgccagattaatattccattgtaccagcggaattattagtacattattccaatataccacatttatttatcccttcattagttgataaacatttcagttatttccactttttagctattatgaataatgctgctgtgaacattcatgtacaagtttttgtgtggacaaacgttttcaattttcttgggtatatacctagcagtggaattgctggttaatatggtgattccatctttaacctttttttgtttgtgtgttttgagatagggtctcactttgtcgcccaggttggagtgcagtggcacgatctcggctcaccgcaaactctgcctcctgggttcaagcgattctcctgcctcagcctccccagtagctgagattacaggtgcccaccaccacacccgcctaatttttgtatctttagtaaagacgggttttcaccatgttggccaggctagtctggaactcctgacctcaggtgatctgcctgcctcagcctcccaaagtgctgggattacaggcatgagccactgcagacggcacatctttaaccttttgagcaactgcagctatttcccaaagtggctgcaccattttacattcccaccagcagtatatgagggttccaatttcttcacatcttcccctaaacttattattatttgtcttttttattacagccatcctccaataaattcaagtttttattttggaatgactttccatttaaagaatttcgaggatactacaaagagttccagtatatccttcattcatctttccctaatgggagagaaggattattttgaaaaaaaaaaaaaaaaaaaaaaaagagagagaaatgataccaagtaatccagctttagtctttgttgactgaagtgcgtattaggagctttggccagtcaaagcaaaaggtagcgaaaagatagtcacttcaaggtgtccaagttaagaaaaccaggaggtagaattcaaggagaccatgtcaaatcctgtcagcaaagtcaaggtcagaaaggaagccacttcctaacgacccacaccactggtggtctcatcacgctgttgcaccatttggatgttttctaattctcccgggctgttttctctccaattggactgtaaactcctggcaggctcaggcagtgctcggaaggtctctcacacggtccaaccttacgcgaaaagcacttattgaaagcacctcgatggccgggcgcggtggctcacgactgtaatcccagcactttgggacgccaaggcgggcggatcacctgagctcaagagttcgagaccagcctggccaacatagtgaaaccctgtctctactaaaaatacaaaaattagccaggtttggtggcgcgcgcctgtagtcccagctacttgggagcctgaggcaggagaatcgcctgaacccgcgaggcggaggttgcagtgagctgagattgcgccactgcactccagcctgggcgacacagtgagaaagaaaggaaagagagaaagagaaagaaaaagagaaagagacagacagacagaaagtaagcaagcaagcaagcaagcacctcaacagagacagagacgtaaagaaagagagacagagacagaaagaaagaaagcacctcctcagcttcccatagcgcaggagacttgctcgaccagagaacctacggtcagacgacacatccactgccacacccatacccaagccgggacgcggaaccgcttctacccgcccacaccggagaggttgctcgcgattggccgggcgggcacagaggcccgccttccgaaggtggcagagcagcctccccaactaagcctgggtcgccgcctcggtgaagggccgcggggccgagcgcgggaagtggcgtccagtcggtttttggcaggcgagagccagagcgtgagaaccctcccacggcgaggccaagccctgagactggactagcaaggtcgtgagtctctctgtcagctctccgcagcgaaggggcgcggggggcggggaccgtgcccgaccgtgccagctcccgccccggaagcggaagtgcaagcactgcggggtcctgtccagtgtgagcccgacccgagctccagtagttccgcccgctggtcatcgcgccctttcccctgccggtgtcctgctcgccgtccccgccatgctgtctctagactttttggacgatgtgcggcggatgaacaagcggcaggtgagcttgtccgtcctctttttctcctggctcttcttgtcccttcgaggctgctgctgcggggcccggcggaccccagggttctggtgtgagggtctgagctggtctgatacccgggtcattcgctttctttggagactgtggccagaggccgccttgtccgcctcattatttttaaccccgaactgattcagggcctaccgggggcggggcgggaagcggtgtcttcacgttccattcctcccactgaggcaggggagcaaatggaaaccgtacgcgcttgaagtgggagttggggttgcttattgttttagtcattttaaggcggcggactcttgatttctccagtcggagcgactccaggtggtttcgggagagacgaggtttagccggtttctggggcgctcaggaaggcgattggaggccccacaaaaaccgttttgctgctttcagctccttgcaaccctttagtagagctgaaccgtagcgggctgcaccgactttgacttggaccactctgggctccgagttggaacagttacactacttgcccttgcgtccgcttagcactaaggcggcagccctcggaatctatggttttacagtccaatatcagtgccacggggatctggaaatgtaggtctcctgattttgtccttacactttactttgatcttctagatcgtatgccaaatagtactgagaatattgttgtaattatttagtccttagaaaaggttgttctgttttatcttttgcgcctagtgtgtctgtagagcctagttttgctgcatcggactttttttttgttttaaacagtattttactgttatgattatcctgatgtcaccattaaggattttttttccttggacttgcattttttgtacttataactgccacttagggaagtagatacacaacctttccttactccccttc

SEQ ID NO: 6644 - DNA, 6000 bp, Homo sapiens
aagagaggggcagtgagtagcctcctgggtggcttgcagaaaagaggtgagacttttccctgagggtctaggtggcagcactagcacgagggtggcagctttagggtgctggcttcgctatgtcaaagtcaaggatacccaaggaatggagctgtctgagaacagagtcgaaggctctggagtggctggtaatgagcttcctgccactgaaggtgttcaagcaggacaccaccagcaggtagtcccaacctcctggcaggtgtttgtccaagatattgggacttgagtgggagccctgagctggctcttccatggttgaattcttctgctttcctggaccactttggtgcttgactgtccccttttgtgggtgggctttcatcttccatgtatggtcaaaattctttccttggacccagagcttctggatagcattatacatccccagcctccaaccaggcccagacctgtctctttcccttgtaacttatgcttgggccacccaagaaacagaactcctcctctagcccaagcccagatctgccagctccagatagctcttttagaacagcaagtccttcaggacctagtattccctttgtagcccgctgtgctccccagtcacctcccagtatcacagtttcttgaccagctgagacttgcagaagtagatcctatttctgctcaaacttgaaagttgtgaagcacagctcttggattcagaatgacaccataggagcagggcatggtgggtgaatccatggacctgcctggtgtgtggcctacatcccggtaatgtggccactgactcaggagtatgggtcctttggaaaaagggatgtggctgggttagaaaggcagacaggtgaccaatagactggcagggctctgctctgagtttccactccctttctcccttgctaggtggaggggaatgtgggctgctggaaatctcccataaacagttgatattaatctcaggtgcttgcacgcctggaacatgccttttaagaaagacacgtgttcaatttctctaggtgtcaggggagttgggccactgtgctccagcaagtggtccccactctgacctgtctggtgaaagattgcattcgaatcttgggaacatttctgtcttctccaaacccttggtactggaaggtgtctgctcgcctgtaaagggtttctaaagctttactttctgttcaaaaaacaaaacaaaacaaaaaactttgcctattcctgcctcttattgatcagcaaggggcacacgggtgagtttcctcctttctaagactccagctggtagcaaaggagatgaggaggttggggggtgacccctggttggctggatgctgagcttggtcatgatatctccaggactccatgaagcgacaggcatttttccttttcaaccaggacattcttatcaagaggtgagacactgtaaatgctctggactcttactgaggggagggtgtctacgctggagactttcttctgctcccacatttaaatttggcctactgcagaggttaagaactagcaaactctgagtgtgcactattattgaccctgcactatgatttctgtgagcagtgcatgagcaggtcattctcatcttcttaagcttagaatgaaacttcaaatgtctttttctgacaaggcccctgcctctgagatacccagtttatttcaccctaacttcactgtaactgaataacattatgaggacccatccccatcattccccaccttttttttttttttctccctcaacagtccctttggcccagatccatgtagaatcagagaatcttcaagctgggagggatgactatggggctgcgatgtgcttatgaatcacctgggagcttgttctgatggacattctggtttgggaggtctgtgatggggcctcagatgctgcacttcttgcaagcttccaggtgatatggatgctactggacagagggccacactttgggttttgaggatctggtcttaacgtggtcattttacagatgggaaagcggagtcccagaaagcttgtcatttccctgtggttagaaatgaaattctgctcttccccactctagtctatcacctgctttttttttttaaacctttaagttcaggggtacgtgtgtaggatgtgcagctttgttatacaggtagacatgtgtcatggggtttgtcgtacagattatttcatcacccaggtattaagcctggtatccatgagttatttttcctgatcctctccctcctcccaccttctaccctctggtagaccctcatgtgcattgtcccctctatgtgtccatgcgtcacctgcttttgaaagggcttccctctttttcagctgtcgcttcctgctcaggcccagagtgtgagcataaacgtagcaccccatcttaatcccattttactgtcaggatgaaagacttcttgcccatcagggccccttgctccacaatctgcatttttaccaaatccagaggggtttttaaaggttttttgttgttgttgtttttgttgttctaacttatggatgtctcttcttctctgcttgacatgttaaaaatcctctctctctctctttctttctctctctctctctctctcaaaaaagtgggctgggcatcttttggacacaaccatttcagttccaggctggagcactgatgctgggctgaatccacttggcgttccctgcccaggagtggtctgagagaggctgtgtttctctgctgccacctgccacctcccaagagaggccaagtgttaggatctgactacacctcagtttcctgactctcagatattctaaagccaatcccagaatggcacttgaagtgacagggaaattcccagtggcctaaggacagccaggattggcctagggccagtagcaagtggtttgagagtccaaggaggtcttcacactctgtccccgcctgctggtgggagggcaaaatgccagtctggagacaaggccataatggcgacgggggtaaaaatctccctggggccaagggaaggtggaacgtgacgggaagtcgggaaaactgccttgtataggcatgttcttttcttccatttttttcgtccaagtttttactccaagcgacagtgccacccgaaggcgaccggcctgtttgtggttgcgcctggggcaggcggtgacaccggcataccccttcccccatcttgcctgcaagttgcatgacctgcatcggaatccacaggggggcgggggagactcctttcagatactggatgcagttgaattgaattcaatgtattttgcttcctcgcctgccctcctccaagctcgggaaggagaaccctgctttcttctgcgtgtgaatgctgtagtgtgtctgcctgctcggactcccctaaccctttcttctcctttcccacagcgaatgctcgtttttttttttttcagcaaacagctcacacttggcatctttatgttttattaagaaaaaaatccctaccagcgcaaaagcggggccccccccacacacacttctttcccggatgagatctgagctctcgtcgaaagctgcacctgctttgcgtccctaccaggaaggggtgcttgtgtgggagggaaggaggaggttctgcgcccccgaatccggagaaagcagcccgcccgccccctcacccggcagccagctcagctcacccgagagctgagcccgagaagccggcctctgacggtgctggcgtggcgcttgccaaaatatgccccttgcatctcaatttcccccggccatttctcttgcacgcacagctcgcccggggccacctcggctctccagcgcagccctttcgacccctgtttcttccttccccgatccatgcctgctcaaggccgaatgcaaaacccacctccaagaaagcgcagcgggcacggggggcacctagcgtgccatgtcccgcagtcccctcccagccaagaccagagccccagactctagattacggaaatgagtgtcattcagaccaaggactgcgcgtctgcggtcccggtccccggctctgggtgcttctctggggtgtctgtgcgctccggcaccccccgtcgccgtccgtgagcctgcgccccccacccacccaggcttgggagcgccccccacccaaggcttgggagcactccccaatcacctccgccacgttcatttcacttcctaccgcggtccggattgcagcaaaaccgggtagcgcgagggccaaaaagtggaaaggagagcgcctttccgtgtcgtgcagccagctcgccaactctccctccccagccccgaccctcgcaatctcaaatgcaactttttcccttcggtctcggtttcccccgggctgcggctagcgggcgccgcgctgcgaggcgtggagcgggcgggctgccgcgaggctgcgggtggcggtgccggctacagccgcgagccggcgagtgggtgggtgggtgggtggggaggagggagaggacaggcggggagagagacgggtgtggggaggggagggagggggagattccgctctcctgccgctcccagcccgggcggggggcggggggaggaggccgcgacgagggaggggaggagggagggaggaagggagggagggagccgaggaagacgctccgataacccgtgcgtttcgtaaggctcggagcacttgtacatttctgcagccgcgcggcgagccattcgcggcggctgctgcagctcctactgcatcttccttctcttcctttcctcgggctccgggtgtgtgtatgtgtgagagtgagtgtgtgtgttttgcaggtgcgtggtgtgtccgttttaattctgcccagtaggtgggacttggtgactttagcaccattttttccttttccttttttttttttgcctccccaccgtctgttgcaaccctgcaaagtctcggagtcggagagcgcgcctcgcttccagagcccccggacccggcgagtcagcgatcgccgagccggccaccatgcccggcagaccgcgccactaggcgctcctcgcggctcccacccggcggcggcggcggcggcggcggcgtccgcgatggtttcagacgctgaaggattttgcatctgatcgctcggcgtttcaaaggcagaggccccccctcccccttcccccctccctcgccgtctttgtttccttccccccctgctctccccactccccccaccccacccccctctcctctcctcctcctcttttttagaagcagcgatcggagatggatgtctctctttgcccagccaagtgtagtttctggcggattttcttgctgggaagcgtctggctggactatgtgggctccgtgctggcttgccctgcaaattgtgtctgcagcaagactgagatcaattgccggcggccggacgatgggaacctcttccccctcctggaagggcaggattcagggaacagcaatgggaacgccagtatcaacatcacggacatctcaaggaatatcacttccatgtaagtcaggcggccgctccccagcctgcctcccccgcgctctgcgtctccctcctgcccacccgcggccgggagccggccctccgcccgccccagctcgccgctgcccgccgcccgctgggcgcgcgtcaggctcgctctggctcgggagatgctctccggctgcgcattccaggtgactccggccctggcgaggcgcgatccggctatgcgtgtgtgtgcctctccccggagaggaccccggccgccgagggcacgcggggcccagctaccgcccgcctcccaaccagttgctggctcgtttcgatggtgcaaattgtttttttttgctccccactaaatagcaacagtttggccacgctcaagtggaataaagtagacgaggttcgattctttggcagaggcggcagcggcggtggcagcggcggcagcgcttagccggcagggaaggtgacagatagggactgctcgcgatccagcc

SEQ ID NO: 6645 - DNA, 6000 bp, Homo sapiens
gttcaatatacaaaaactgattgtatttctatgtactggcaataacaaaccaaacattgaaataaaaataccatttacaacagtatcaaaaacatgaactacttagggataaatctgacaaaagatatataaaacctgtatcctgggctaggcaaggtggcttgcacctgtaattctagcagctcagcaggctgaggtgagaggattgctttgagtccaggagttcaaggttgcagtgagctatgatcatgttgctgcactccagtttgggcaatacagcgaaactccctctctaaaaaacacccacccacatactgaaaactataaaatattgctgacagaaattaaagaagacctaaataaatggagagtgtgataccttatttatgagttggaagactcaattttgttaaaatgtcaattcttttcaaattcatgtacaaattcaacacaatccctatgataatcccaggtggcttttttttttccagaaattaagaagctaactttacaactcataattggaggactaacactacttaatttcaagacttatcacaaagttacaatattcaagacagtgtggtattggtatcaaaataaacaaacagatcaatgaaatcaaatagggagtcctaaattagatgcaaacatatatggagaacttatttttgacacaagcacaaagacaattcggtggaaaaaggatattcttttcagcaaataatgctggagcaattagatatctatataggaaaaaaatgaatgccgatccataccttgcaccatatgcaaaaattaactcaaagtaaaatcatacacctaaatgtaaaactgaaaactataaaacttctagaagaaaactttggcaatcttctcttagacaaagatttcctagatatgacattaaagtataacctaaaaagaacaaactggtcatttaaaccttttcaaaaataaacttgtgtttcttcaaaacacactgttaagagaataaaaggtaatcctcagatggggagaaaatatatgtgcaagtcacttatctgataaagtacttttgtccagagtatttttaaaactctcaaaactcagtaataaaagaagtaacccggccgggtgcagtggctcacgcctgtaatcccagcactttgggaggccaaggcgggcagatcatgaggtcaggagagcgagaccatcctgggtaacatggtgaaaccccatgtctactaaaaaatacaaaaaattagctgggcatggcggtgggcacctgtagtcccagctactcggggggctgaggcaggagaatggtgtgaaaccagtgagccgagatcgtgccactgcactccagcctgggcgacagagcgagactccatctcaaaaaaaaaaaaaaaaaaaagaaataacccaacaatttttaaatatgtgcaaaaaatttgtacagatacttaaccaaagaagatatacagatggcagatagactcataaaaagatgttcagcatcattagtcatttgtgaaatgcaaattaaaatcatgagataccactacacgtatattaaaatgcctaaagttaaaaagatagaccatgaaagtgttgttgaagatgtacaataagaatgctcatacacactattgggaaaccaaaatagtacaactggtttggaaaacagtttggcaatttcttaaaacgctaatgtggaggccaaagcaactccatcttagatgctaatcctccatgttaacttctgattatccccagttccagaaaaacctctaagatttccatttgactcattccttgtgtaagagcaccacttactgtaaatattgcccttaggtcaaaacaaccttgatgttatcattcttgccataaattctgtccttaagcaattatcttacacattccttctgaagcacctttctctatagcacagaaaccctgggtctggtggataatggcagggatccaccatcttgtcttgctcctgagacatggcttctgtttgtttgtttaaattgtatttatttattaaatgtttgtttctgagaaactgggtatgtcagcctcttgctttggcctctcagctttctcagacttttaggggtaggtttgcataggcctgtcccctgcaggacagttaaacacattatctaccatcatatccagtcattccactcttaggagtggtagaagggaactgaaaacatatgtccatacaaagacttgtacacgaacagtcattacaactttatttgtaggagccccaaagtggaaacaacccaatgtccaccaacaggcaaacagataagctctcacgcattgtcagtggtaatacaaaataggatagccactttggaaaacagtttggcagtttcttacaaagttaaacataccatatgtttcagcaatcacattcctgcatattacagtaggaaaattaaaacttatgtttcacatcaaaatctgtacttaaatatttatagcagctttatttataatggcttcaaattagagacaacacaaatgtacttcagtgggtgaatggataatgaattataatacattcacattgtggaataaaaaattacaaactactgatgtgcacaacatagataatctcaaatgcattatgctaagtaaaataaatcagaaaagaaaagaaaacgctacatactatatgattcaatttatatgatattgtgaaaaaggcagaattgtaggtataaaaaacagatgaggccaggcgtggtggctcacacctgtaatcccagaactttgggagctcgaggtaggtggatcacctgaggtcaggagttccagaccagcctgaccagcatggtgaaacaccatctctactaaaaatataaaaaatcagccatgcgtggtggcgcatgcctgtaatcccagctcaggaggctgaagcaggagaatcgcttgaacccgggagacgaagggtgcagtgagctgacattgcgccattgcactccagcctgggcaataagagcaaaactctgtctcaaaaacaaaaacaaaaaacagatgatacacatctgtgtttagaagcaccctgtgctcacctctatcatctaacatatctctgtgttgtacttatcagtttactgtgttccttgttaacctattaccctacgactagagtttagcacagtggttggtatatggccaggactcaataaattctcattgcttgcagaattgccctgacctgggccacgtatttagagaaaacttctggctctcttcgaggctctttcctctacaaaaaatgagtaacccatggggccaaggagatatgctcacccaaagcctagtttccctcttctggagtctagaccatgttcagggtaccaatacccctggaatttactgcccaaatgacaccatggcctgcatgagcccttctcagctttcacctgagggcagacccagctgctaatgtgagcactcctcgatctgaaaaggtggcaaaggcatggctgcttgcagaggtacgggcagacgttggatgtggcttggagtatcaggatggtatacaaggctcctggcagggaatgcaggtgggcaccagaaaccagaaaagaaagggaagtgggaaaagactgggagccatttctccccacactgccatattccagctgtgtttccaggtattctaaggagtctagggattctgaagatgaacctggccttctacatcattatgagggtctatttgtcaatgtaggaaaacagactatattttactttacaatttgttgcttgatttataactaaaatatttaaacatacggtgtgctggactccatttgtactcttacccagggcctgcaaatgttaggagctggcctgaccaagggaataaagattacgaaaatgttcaccttattttattttattttatttttttgagacagcgtctcgctctgtcgcccaggctggaaagcagtggcacaatctcggctcactgccacctccgcctcctgggttccagcgattctcctgcctcagcctcccgagtagctgggattacaggcgcccaccaccacgcccggctactttttttgtatttttagtagagacggggtttcaccctgttggccaggctggtctccaactcctgatcgcaggtgatccgcccacctcggctcccaaagtgttgggattacaggcgtaagccacagcaccggccgaccttattttgtggttatagagggtacattttataaaattactgccacggagtgggtaaggctccttttcttcaagccgcacagaacgaatgttcagcggtgcaatttcattgcaatctatttttgcttcactttgctcataatgactcttttaggatttcctcaggtaacaatcttctttcaatgttcaataatccaagcagaacattttctcacttcatccgcctcccatgctaggttcacactgtgaaattggcttatctctgacctaaccacttccttcaccagacatagagctggtgtagctcaagggaaagaggcacggcgctgggaaatgattaggccccaccgtcccaagcaagagctcaggggagttctgaggctggagagaccattcgggatatcaccccgggttcctgagaacctgagatctgcggggaggcgtcaggcatccggaaacgcccgagtctggggagacggaccccctcagactttcctctaggagactctacaggtaaaggggagtcctgggactcgaggggagccccggcatccaaaggtaagatcagttttgctcacctggccgggcggcgttgcgtcgccttggtaaccacaacttccggcttgaaccggaagtccgcgaagttgctctacagaaagtgtgcccgccccctctggggcggagagactcagcccctccccctcagcggataacctgggactgaccgttccctggggatccgacgggccccagaggacccacgcctgagccccgtgcgactcgtggcctttgggctagaagccatggacgccttcacccgcttcaccaaccagacccagggccgggaccgactcttcaggtgagtcaggtgccagcggcctccgcccctttctcgccctaactcggctcccgtgcctattcccctgcacccgggaaaaaggaggtgatagcctagtagatggaagcaggaaggacgttgccagctcctacggagggagtttagtatccgagcccctccttaccctaaattcaacgtgagtgggcccaacgcacccgcgtcccgtcctagccccgtgcacgaaagccccagtgcctggcaccctagccgcctcgagaccgccgacgacgggacaccggctgacagatcctcctcccctcctaactttgctctccgggcacagaaagattggttctctccactcaacattcttccgagggatctcctttaaagagaaactttggattagtatttgtggctagggaagcaaaccacttggtgtgacttcaaatatctctcttttttttttcttttgagacggagtctcgctctgtcgcccaggcagtggcgcggtctcggcccactgcaacctctgcctcccgggttcaagcgattctcctgcctcagcctcctgagtagctgggattacaggcgtgcactaccacgcccggctactttttgtatttttagtagagacgggggtttcgccatgttggccaggctggtctcgaactcctgacctcaggtgatctgtccacctcggcttcccaaagtgctgggattacaggtgcgagccaccgcgcccggtctcaaatacctcttgaaatgtttgaggagagacagaagttctcttccattattacccaggctgtatcattgagatactgcatgtggaatagttttgtaaattgtaaaacaaaatatagcggggatgagaccacaccaactggattggggggaaatacagtggggagaagctcagaaagaactaactgcacctctaaggttcatgc

SEQ ID NO: 6646 - DNA, 6000 bp, Homo sapiens
gtttctccatgttggtcaggctggtctcgaactcccgacctgaggtgatccacctgcctcggcctcccaaagtgctgggattacagacgtgagccaccgcgtccagctatgatttattgtttttagaatggtagcatagtacttttttcatatagaagcccataatttatttaaccaatcctccattactgaacatctaattgtttctgattttcccctattttaaatcatgctgtattgagcattcctgacttctccaccccttctggattaggtcaaagcaaacctgagacatcaaatcatttcatccacaaatataagtttataatttttatttattttttttttgagaaagagttctgctcttgtcgcccaggctagagtgcaatggtgcgatctcagctcactgtaatctctgtctcctaggatcaagtgattctcctgcctcagcctcctgagtggctgggataaccggtgcctgccaccatgcccggctaatttttgtatttttagtagagacagattttcaccgtgttggccgggactcctgacctcaggtgatccacctgactcagcctcccaaagtgctgggattgtaggcatgagccactgcgcccagccaagttaaaaaaagtttttaaaatagagatggggtcttgctatgttgccttggcctcaatcgatgcccctgcctcggcctcccaaagtgctgggattacagatgtgagccacctcacctggcattcaaatttttatattatagccaggcgcagtggctcacgcctgtaatcccaacattttgggaggccaaggcaagtggatcacctgaggttgggagtttgagaccagcctgaccaacatggagaaaccctgtctctactaaaaatacaaaattaggtgggtgtggtagcacacgcctgtaattccagctactcggaaggctgagggaggagaatcgcttgaacccaggaggcggaggttgcagtgagccaagattgcgccattgcactccagcctgggcaacaagagcaaaattccatctcaaaaaaaaaattatattataaagcctgttaatcttctggtctttcgtcttcacttttaattttatttatattttgattagacacggtattcacatggttcaagattcaagagaacaaaaggatatgctgaaaaatgcgtttcccaccctgttctccagctccagtttccttcctgggaaacaactcgtgttatcagcgcgtgcacatataaaagcaaattgtgtgtctctgtgctttttccatttaagtacaattgataaacgacttgaacacggctctgcgtctaggttttattactaaacaacctgtcctggggagcgttctgtaaggagaatcctagttatttttgatagccatatgcattccattgcagggcatacaataatcattcatttatcccatctctattggtggacatttaggttgtctccagctattagattggtgcaaaagtcattgtggttttggctcaatgttgcagcgatgcagtggaaagccttgtgtattcctttcacttacgtgtgagcattatctgtaggataaatttctggaagtgccaagtcaaacaggacatgtgtttatatgtttgataaatactgcccaaatattctcttttgaggtcgagtcagtctacacaccaaccagcaatgcagggggttgcctgttttcctcccacccttgcgaatagtgtgttaccaaacttttttttttttttttgagacagggactcactctatcgctctggctggagtgcagtgacacgatcatggctcactgcagccttgacttttcaggctcaagcaatcctcccacctcattcttccaagtagctgggactacaggcacgtgccaccacgcctggctaattttttttttttggtagagacagggttttgccacgtggcccaggctggtctcgaacacctggttttaagtgattctcctgcctcagcctcccaaagtgctggaattacagacatgagccactgtgcctgacctaccaaactgctttttatctttgctgatctggtaagtgaagaatagtatcttttgtagttataattttcattttcttaataagtgagttattgaacatctttttacatgtttatgagcccatgaattttctttctgcaggagcaagcactgtctcttcatcttttttttcacagggggtggacagagtctctctctgttacccaggctggagtgtagtggcgcaatctcggctcactgcaacctccacctcccgggttcaagcgattctcctgcctcaacctccccagtagctgggattacaggcacccaccaccatgcccacccaatttttgtatttttagtagagacagggtttcactgcattggccaggctggtctcgaactcctgacctcgtaatctgcctgccttggcctcccaaagtgctgggattacaagcatgagccaccacgcccagcccacttaggctatttctgattttccagtattataagtaatactgcagtgaaaagccttgcatataaatattctatttccttaggctaaatttatttatttttttgagacagtcttgctctgtagtcgaggctggagtgcagtcatgtgatctcagctcactgaagcctctgcctcccaggttcaagcgattctcgtgcctcagcctcccaagtaggtgggaccacaggcatgcgccaccacacctggctgatttttgtgttttagtacagacacagtttcaccaggttgcccaggctggccttgaattcccgacctcaagtgatccacctgccttacaggcatgagccaccacgcccagcctcttcaggctaaatttctgaaagtgatcttcattcctaaccccaaactgccctccagaaagctgggttgcacttctgccacagcaggatctttactcctcttaaaatctccgcggagcctgggtgggagaggcagagctccggggggaagattctctcctggcctgatgtagtgttttccttggcttgtcagacatggaggagattatgccagatatgatagtggagagagtcagacatgcatgagactggagagagaaaaaaaacaaaatagcctctgaggtctcactcacagcctacttactcttactttacacacaattctatattccgatatgtttgtgacctggtttttaagagtacagagcaaattaggaaggagaagcaaggctgctacctagaggtaccctggtcctccatgaagtttccaaaagaagagcaagtgcaagtaaaataataaaacacagccagtcacaaagccatcaatttggaccatgcagtgcaaggctttaactgtcccaaggattccaatcatggataaggaagagcttaaatttgattataaatctgaaagtctggaagtcagcttgaatattgtggtagacataatcatatcctcctcctcaaaagatgccctggttctaatgcccagaatctgtgaatatgttatgctaccccacgaagggaaattacagttgcaggtggaattcaagttgccaatccattgatttaaaatagaaagattaccctggattatctgggtaggcccgatgtaatcacaaagatgctcaccagtggaagcaagaggcagaacagttggtgtcagagtgacagattgtgagagactggtgggccactgctggctttgaagatggatggggccaccagccaaggaatgtgggcagcttctagaagccagaaaagccaaagaaacaggttcccttccagcctcaagaaagctgtatccctcaacccccttgcttttagtccagcgagacccattttggacttctgattttacaaaacttgtaagatagtaaattagtgttgttttatgtttgtgttacggcagccacagggaaccaatacaaatattatctggtaccgcccattaaagctgctcagagacagggagccccaccctggcggggctccggtggctgcacaacctctgcaagcaggatcaagatgagaggcgcaggccaggtgtggtggctcactcctgtaatctcagcactttgggaggccaaggcgggcggatcacttgaggtcaggagttcgagacgagccttacatggtgaaaccctgtctctactaaaactccaaaaattaaccaggcgtggtggcgtgcacctgtagtcccagctactcgggaggctgaggcaggagaatcgcttgaacccaggaggaggaagttgcagtgagcggagaaagtgccactgcactccagcgtgagcgacagagcgagactctgtctcaaaaacaaataaaggaaaaagaaaaaaatgagaagcgcgtgttcccgactccggtgctttttcgcaaggtcgtgctactgcgccttctgaactacgagtcccaggtaccaagaaagttgaattgcgtgctgtggcgggtccgttatctgcaccacccgtctgcacgggatgcgctggcttcctgccccggatgcacaaggctccctgcgggacactcagggcgaggctctgagcccctcccccgcggcagatgccgtccagatgtggccggcgggtcccgcgggctgcggcgacagggaccccgtcgggggcagcaggagccctggtgcatcccaggccccggggggaaggccgggccgtcggaggagcggaggagccctggggggctcccgggaagccgcgggcggacgggggaggagcccgggcggagctgcgggcgggcggcccgctaggggtgaatcgggtggagtagtggtcgggtccggttacttccctttaaaaagacgggaaaggaggagtccagtgctggaggggcagggacggcggcggcgcagctcggaacccgccagggtccagggtccaggttccagcgcccggcggcccaggcaagtggggcgggagggcgggggctgcgggcgcgggtaggggtcgtggggcagttgggtgcgcgggaaccgagggagctgcagacccagcgcttggcgcgtgcggagctggacttctgcggccgcgacgcccctcttcccagatgggtaaactgagggccagggaaagcgaagaattcttttggccgagctcccactacgatctcgcggtcaagtgggtccccagcgggcctcgcaggggtcggaggggctcccatctggggagggggccccagggtgggcgagggcgacgggagcctggggaggacggacggggagggcggcggagcggagctaagctgcggcgggtggacccggctcggccgcggccactctgtccctggtgggtggggcgcggccgaaggcaaagggcgaacccggcccgcctgtggggtctctggccaacactgggctcagaggccctttctttaaccttagatctcgctcctcggtctaaagcctccgccgcagctctcagtgaagaggaaggggaactctaggtgctcaacgcccgcgttacagtcgcgttctccctcgctcctacaacccggccaagatgccggggcatggatggggaccgaggtttgggggttgtggagcctattccacgccctccctggtgagcaactgagacagatccagggccccattgcaatccactcttggtctgggaaaaggtcccctaaacagggccaatgggatcctttccccaaatgactccagaacgcaccccccccccccagcagtgcggtgggcagggacggcccaggtgggctatgtcctggggttttgtgactggatccccactcctcccccacctcagcccctggactgcaacccaccaggccgtgttcgggggtggtcagagccctggtctcagccagacctgaggtctgatgtggcttcatccctgagtctctaaacgccctggccttactgggcctcagttaattcacctgtgaaaggggaggcttggaccagagggcccctcagggtatgtgttttgtggaggggaggtgg

SEQ ID NO: 6647 - DNA, 6000 bp, Homo sapiens
acaataggaagtatagtggggcaagtcttgtttttctcaagggaaaagccaccagcctgctttcataggcattgataaaaccaggaagaaaataaagtcacaaccaaatagtatacactgtctctactgaattcttctaattccttcccaacagaagtctaaatcctgcttagcctaaacatatctatagccagcgatgggcaaattatatttgctgtcagcatgatagaataagaatcagaaaccccccagcagtggggtaagatcgtgcacttcatcccctcaaaatgctgtcaaccccattccctctccatgccctcaaacaactgcacagtcacttgttagtgaatttctcgttcagcgttttgtttttttctctccatacttaaagaccaaatcatttgtttgctctgaagaaaaagaaaaaacaaaacaaaacaaaaaaccacccaccaaatcatttgaaatcactacccgttaaaaaaaatcaccagtggaactaaacagttgagtggtttgggatgtgttcgccatttctgtgtttgacctacatggcctctagttctttggaccactgtaactgtgaaaccatggcttaatactgttaaagaccccaaggctcaactctgtagccagggtgtacctcaggctgcacaaatatcacaccagaatgtcacaatcattcattgctccagctactgagtgaacagggtgcaagacagcactggcttgggttgtatttttgcagccagttaactttgcatcaggtctacacagtccttgcagcctttgatttctccagttgtagagatttgaaatggggtgcccgggttcctctcgtttttccttcaacctacctagcatgcattttacacacattggaggagtcttatgcactgtttttctctgttgctgatggaggcaagaaggccttctaattagtctaacttaaacggacgggattcacctaacaaaagcaagaagaaaagcacaagaacaggtgtcttaatgcatttggataatttatttggggtgtgtgcgtgtgtgtgtgtgtcttggtggaggtgggggccgtgttctcaccaagccttttcataatcaagtttgctttgcaaactttatggccttacacccagcagaacagtccttgctaataaaaggaggatgccctgtcacagttctctgtaaattatcatgtgttgggaagttctgttgatgcttagtttgatcttccatggtggacacatctgttctgtatgtacaaggcattacatgtgtgttttagcggatgggaattgaagcctttccacagtccttgtgctctgagatggctgttgagctctgctcagctgtcgtagctgaattctttttttgtgctgaacactgggcagcctcaccatgttgtcaatgtgcttctggggcccctgtgactgctgccagatgccatgcacacaagcagagtgcctttgcaggtttgtgcaccccttggcgagctggaactgggagccctgtggggtgatctcgccttctcatggggggtcggggaggggagtgcctatttttaatcttgtctgtttgttgcaccatggaaatcactgtgatttgtatatatgccctaggaaatttttactgcagtctaatttatgtaataatgttgattccaggtttgtttaataaagctttgtatcttttaagaaaaaaaaaactgtagcatgtagaggaaagtgcactgggataatccaaggccaggctttgaggttccaccgctacattatgtgactcttagtctaaaccttttggtgtaatttctttggtctgattatttataagtagcagataataaatgaattttatactacaaacacaagtgacaagcttttgcctcttcttcctttttattaaagtaaaacatacataggtgtaacctcttaaataatttttcttgtcataaattacatatttgtcattttattgtagtgtttcctttgttttcttttgggttgcatatggattgttagtgatttgtatttctctcttatagttatttggaaaatatatctgctttaaatcattgcctttcttttttttgaaaccaagtctcactctgtcacccaggctggagtgcagtagcacaatctcagctcactgcagcctccacctcctgggttcaaacaattcagtctcagccacctgagtagctgggattacagacgtgcaccaccacacccagctaacttttgtatctttagtagagacagggtttcaccatgttgtccaggctggtctccaactcctgacctcaagagatctgcccgcctcagcctcccaaagtgctgggattataggtgtgagccaccatgcccagccaaatcattgcctttctatgcttttattttttagttttttggagacagggtctacctctgtcatccaggctggagtgcagtgacacaatcatggtggcccactgcagccttgaaactcctgcgtacaagtgatcctcccctatcagccccccgagtagctgagactataggtgtgtgccaccatgcccagccttttacatttgtttgtagagatagggtctcactatgttgcccagcttggtttcaaactcagcctcaagtgatcctcccacatcagcctcccaaagcactaggattacaggcatgagcctctgcacccaggcacttttctcctcttttcaaaaaatatgcttgaaaattcctttttttagtcatcaaagccaagactgaagtaaattatgcatgtaatgggcttcctgccccctccagctttctggccattgttaatttcacttgaatttataaaccaaattgctattcccaatgattttttacactatacatcttctccttaaattttattcttgacttttacactacatcttgttatcaccattatatttattatttagtctttactctatttcatgatgtgtctaatgaaaaaatcttaatttgtgttcctttctttggtaatgtttccaggaaaaatggctgggttatgtaagcatcccaacaatttcctaagaagaaagatatattttctgagactttgtatatcagagtatgtcttttggttgccattcttttggttaatggcaatatgatgtcttttataaacccatcccacattttttttttttttgagacggagttgctcttgttacccaggctggagtgcaatggcagaatcttggctcactgcaaactctgcctcccaaatctcagcctcccaggtagctgggattgtaggcatgcaccaccatacccagctaattttgtatttttagtagagatggggtttcaccatgttagtcaggctggtcttgaacccctgacctcaggtgatccacctgcctcggcctcccaaagtgctgggattataggcatgagccaccacgcctggtcctctttacttcttcatacccgatttgatcttcttccgtgtcaattcaattcattacatccaaaacaggttttactcatgagggaattagtgtgtcaaaaggctattaaaaagcactaacaaggctgggtgtggaggctcacatctgtaatcctagcactttgggaggccaaggtgggcagattgcttgagcccaggagttggagatcagcctgggcaacatggtgaaaccccatctctacaaaaaaatacaaaaattagtcgggtatagtggttcacgcctgtcgttagttactcaggaggctggggcgagaggatcacctgagctcagcaagttaaggctgcggtaagctgtgattgtgccactgcactctagcctgggtgagagtgagactctgtctccaaaaaaacaacaacaacaaaaaaagaggttgggcgcagtggctcacttctgtaatcccagcactttgtgaggccaaggcaggtggatcaccaggtcaagatattgagaccatcttggccaacatggtgaaatcctgtctctactaaaaatacaaaaattagctgggcgtggtgccgcgtggctatagtcccagctattcgggaggctgggggggagaatcgcttgaacccaggaggcagaggttgcagtgagccacagcaccccagcctggtgacagtgtgagacgccatcttaaaaaaaataataataaataaaataaaataaaatagaaaaaaaaagcactaaaaagcctgaagtcacacatcccaaagttagtgaatgagtggagtttaaacccagggctgtatggctatcatgcctgttttcccctactctgctacactgtctcctctgtaaatgttttgttttgtcttttggagacagggtctcactctgtcacccatgctgaagtgcagtggtgccagcacagctcactgcatgtaaatggttttcctagatttgtattttaatcaaatattcagagaaacaatgctccctgttctctctcgctggggatggtttcattgccttatcttatctattttctatttttccgtgtctgttaattcagcctcataatgggaaatggctgcagacctgggcttgctggctgagataatccatgggtgcttatggacttactccagaagggcttccccttcctatcaacagcctgtagacccttcgtgttttcaccttctgaagaggttgtgtaaggcgctgggttcggaatcacggaaggcccaggtgcaaacctcagcagtcccgggtaccagctgtgcagcgcaggtgagccgcttagcccctctcacccagtcacgagtgatggtgtctcgcgaggccggtgtaggacgagtgtggtccaggcgcagtacctgaaaagggcgcccagggagggagccggcggtcgttgggcgctctctcggcccgcacccgggcatccctcgacccgggctggaggggcagtgtcccgggatgcaccgctgcggggaccccccgcccggcctcgcggacccgcctcggcccaggacggaggaggaggcaggtgcggggcccggggcgggtgcggggacggcaggtggagggaagagggcatcgggccctgctcaccgcggtgtgtggggctgcccgaccgcgccccccgcaggtgccgcccagaccccggccgagggtcctcgtccccgcgcaggcccaggtcgaggccgagagagggcccgtgtccccgcgcagacctaggccgagagagggcccgtgaccccgcgcaggtcaaggccgagagagggcccgtgtccccgcggaggtcaaggccgagagagggcccgtgtccccgcgcaggtcaaggcccagagtccccgtgctcgcacagatggtgtcctggggcccagtcgcgctccccgctcgcggcagcccccgtgtactgggccttgcaaagtccgttaggagcgctccagggcgacagtgcccagcggttaacaagtttgtaattactttcgtgggtttctacgttgcaaattgagaagagggttgctgggttgggcccccctcctctggacgctaaccccacccaggtaaacagggatctggcccaggttcctgctgggtgccgaggtgggggattcagtggggagcactgaaatgtgctggaggcctggacgtgattccactgccaccaccccctttcccccggctacaaagcctcctgcggtgtgctttgtttttcccaggtagcagttattagccctgtatcatgactaaacgaacactaaagatacccttttacttattctcaaattcaaaacatgtatcaggggtccagaattatacatgctaggacctcaaaggtaagaaaggcacccacccacagccacgtgcggtggcacacgcctgtaatcccagcactttgagaggccaaggtgggcgaatcaccagaggtcaagagtttgaaactagcctggccaacatggtgaaaccccgtctctactcaaaatacaaaaataagccgagcgtggtggtgggcacctgtgatcccagctactggggaggctgaggcaggagaatcgcttgaa

SEQ ID NO: 6648 - DNA, 6000 bp, Homo sapiens
tgaacactggggtctgatcttttactatcacaaacagtgtcgcagagaataacctcgttcaagtgtcattttgtactggtatggctggaggacaaatctcagaagcaggactgtggggtcgaaagcaaatgcacttgtaatgtgtaatgttgacagtgagccacgatcactccaccgcactccagcctgggtgacaaagtgagaccctgtctttaaaaaaatggaaataaaaattcacacttatattcaaacaaaaccgccctcccagtgggtttgtatgactttgctctcccgcaagcatgttgggaaagcctctatttccacagactcctccgagtgaatatacatacggtgattattttgagttcctagagaggccttaattgccaactttggataacaacatttatcacccatgaggtgtgcattaagagtgtttatgaccctagcatgggcttgatagcataactgggtgtgagaaggatcaatgacctggggccatttagccatgagtattatggtgacagtgttttctcttgcattgtactttcaggtgtttgtagatccctatttctgctgcctcaatttgtagcttaaaccgtcttctgcagcgtgaatgtttttcccagttttacgtttcattaggcctccagtgggaatcgaatctgagctgcacatctggccccagctgcactgagccctcaggtggccatgctgctgcccagctgtccagtgcctgggttcctacagggagttccctcctgtggataggagctttgtctttgtgcaaacttcccagctgtggaaactctggcaccgctttaaagatcaatgcatttcttggcaagggatgggaaaggcaaactcctctccacaaggattaagtcttaacaccagaagccaactgtcctcagcctctgcagtgaggttgtctcctaaagaacattcaggctggttcccagtagtgcctgtgctggcggcacccagcgttttctagttaggaagatcacatcccatctggctggtccacatggttatactgaacttaaatctcttttgtgtctctatcgtacacatgaaagctcacacacacacacacacacacacacacacacacagtgtgagaagcactcacactgactcagcgtctgatggaaacggtgtacacagctgataagcactgaaggactttgcagaacacccagggctggaataggccagtgtgtgaaaccagaacgtgagccctgctcacttgccctttcctgcatctgactggaaatgctacaaacagaaggaaatagtgagcgaaattaacaacctcatgaggatcttgcttgtaagtttaatagcagcattcataatgaagcagtgttttattgggttaacagaggttaagtggcaatattagtaaagtggtcattatagattttcttctttgcaggcagtgaacagaaccttctgaaaggatggatgattataactcctcagcattcactgtttcttaaaacaggcctttctgaaagttttttttctttaataaaaattaccactttttccaaggacccctgtttgaggcgtgagtggagaggcttcatctttaaagaagctctaacagggaactctgtcggtcgtttgaggcttgctgccaacaaacaattgaggtatttaccaagggtttccaagaaattgctgcaaattatatgaaatgttatactggtaacagacgttcaatgtattagcaacagaaaagaaatgtgaagtgtgtgggaacaaagttgccatctgtgagaaaatgctcagtaaggtaggtggcgatgaactttaataatgtgtcataaagagtcacactcatgaacacagaagggaagttaagtgatctgggatttttgaacacatttctgaatactggtctggaatcactatggaggaccgtttaacgtgatccagcagaaagactcatttggagacagagccggactcccggagcccctccaggtggaactcactccacgcagagctcagactcggtcccacactcctgatccctgatccatcacagcccacctcttgggccactcctgtgccattgggactttcatggaataactacagttaagggcttccttacaagtgttcctggtaacagttaatacctccccttcttttatgatgagaaaaatggtcaatgattccctcaacagagaaggccagtagcacagtgaaatcaagaagcccggaacatgaaaagtctttcctcagctccctgcagtgaaatccctataaatgcgaatcaccctgcctactccttacctttaaaaattacttagggtgagggggctttaggatgaggacagccttggcctccagggggctgtggggaaggacgcatgtgtgtgcattgggggcagatgttccagaccctcgttgtcctccctggctccttgctggtattgactagtggggctgggcatgggacaggccttcatactgggggtaccagtcctgtccagctgtttgggtctctggctgtcactgaagttcttgattccaggtatttgctactggctgtgaaatccccacttaggatagccttgtctcctgagccaggccccttactgggacacttttggattcttccccaggagaactgcctcagctcaacaatccagctgctccttccagatgtgctagagcttgccctcctgctcctaggctgcatgccggaattggtccctgcccctggcagacttctacaggacctcagtttctctcttctccttccaaccctctcttggcctggcatatccctcttctcccagagggagttcccgtatgtcttactctccttctccagggaattgtaagccctcaggctcagcctttacaaagaaaagggtatcctttctacattacgaaagacccccattaagcctgcaggtgagacaggtgagactgttaacctaggaactgagggacaactaggaaccaggatattgaggaggacaaaatatttggcatcctcagaatattattcccatcagatatttatatactttttttttttttttccttgagacggagtttcgctgttgtcgcccaggctgcagtgcaatgcaatggcacgatctcggctcacagcaacctccacctcccgggttcaagcgattctcctgcctcagcctcccgagtagctgggattacaggcatgcaccaccacccccggctaattttgtatttttagtagagtcggggtttctccatgttggtcaggttggtctcgaactcctgacctcaggcgatccgcccgcctcagcctcccagagtgctgggtttacaggcgtgagccaccgcgcccggccagcttttcactggacactagtttcgaagaaaactaggtaagtctaaagcaggttagaaaatactgaaatcgttgaatatgctacaaaattgaacatctgaatctggccagattcgtacttcatgtaaatcactgtgaatgatggggctgctgaatttgggggatctggtgactcctcggcatttgtggtttatggtcttagtggaaacctttttcgatggttttcgagcctgtaattcatggttgtatgttctgtatttttcccaagaccactgctggaatcctgtattcactgcataatgagtattttatttttagatgtggatcaccccttagggaggggctctgtgggaaggtaggtaatgaactatttttaatataaatcacaagtgtcaaagaaagtggtaatatccaaagaataaacaagagtgaccaccattcaggtgccgagaaggtatctgaagctcccacaggcattttaaactgtgtgatagtatttcaaccatttggtcaacaatgaagaaagatccaaggattgccccaggcatgtgtttatttgattcaatgcaggtaacttctcaggcccagggaaacactttgcccttcaaaagtttcattagaaaaccccaatatactggtgactaagtaacaagactgaaactctacacaaactttcgttgtatggagacctccgcttttgctgccttagctgaagtattgcagaggaaatgtataaaacttaaaatccagagtagaggatctgggacccaaaatccgtctttagaaatccacggcacttttacagacggactatattaaagtagggacaaagtcccaggctgggggtactagccggctatctgcccacacagtatgtaaatgaaagtagggtttaccatccagggcattaacttcattttccttgtcttcgagatccattaaatgctagtactgtatgagaagcgtggaccttaagtattaaagatggctttttcttcttcttcttcttatttagcgtagaaactagcaacagggaacaaggtaactgaattcacggtccactcgcaggcgcgcacgtccccagggctccgggacggctgttccctgcgtgcggccgcgggactgcggacaaagctgcagtgtggtcgggagcgcggggccgggagcgcggggccggcccggcggcaggaagggcgtggccgtggggtgcagcgaggacggcccgtgcgggaggaacgtgcgcagcgtggagtctgggggccgagaagcccccactgcaaggctggctcccgagattcgcgcccgggcgccgcggtgcgggaagcggccgtcctcgcggggacgcccttgcgccgggtgctaggtgcggatcacgggcagctccggccccgcgggcgccgggcgggggcccacgccccctccgcccgccagctccagtcgcagaccgcgcgggcggggcgcccgagagggctttttttttttttggtcaaacttcggccacgtgaaccgcccctcattcacttttgcgccaatcgcgcggcgcggacggatcccgagaggggccacggctcgccgccggcggggccacttcataacgcgccgtgcgtgacgtgaggggctcctgttgcaatggcgagctaagccggaggatgtgcagctgcggcggcggcgccggctacgaagaggacggggacaggcgccgtgcgaaccgagcccagccagccggaggacgcgggcagggcgggacgggagcccggactcgtctgccgccgccgtcgtcgccgtcgtgccggccccgcgtccccgcgcgcgagcgggaggagccgccgccacctcgcgcccgagccgccgctagcgcgcgccgggcatggtcccctcttaaaggcgcaggccgcggcggcgggggcgggcgtgcggaacaaagcgccggcgcggggcctgcgggcggctcgggggccgcgatgggcgcggcgggcccgcggcggcggcggcgctgcccgggccgggcctcgcggcgctagggcgggctggcctccgcgggcgggggcagcgggctgagggcgcgcggagcctgcggcggcggcccggcgggcggagcggcgcgggcatggccgcgcgcggccggcgcgcctggctcagcgtgctgctcgggctcgtcctgggcttcgtgctggcctcgcggctcgtcctgccccgggcttccgagctgaagcgagcgggcccacggcgccgcgccagccccgagggctgccggtccgggcaggcggcggcttcccaggccggcggggcgcgcggcgatgcgcgcggggcgcagctctggccgcccggctcggacccagatggcggcccgcgcgacaggaactttctcttcgtgggagtcatgaccgcccagaaatacctgcagactcgggccgtggccgcctacaggtgagcccctgctccccgggcaccgcctcctgcgtccggcatcccggcggccggcatcccgggtgctctcctggctctcgcctccgcccgcttcctaggcccttcttgggcttccggcgggatcgggttgcctctcgggagacgccgggccgagggagaaaagatcagaggcgggatggtgagcgcggcgctcaggaacatggcctttggggtca

SEQ ID NO: 6649 - DNA, 6000 bp, Homo sapiens
cttcatgcccgtcaatcaaaatgccgtattgcacaggatggaatgatgaaaccaatacaataattcagctgactgatgttaagtcagacattaagtcaacaataacaattgtttcccaaacaattgaaggagttacaacttttttttccccctggaatacattgagcaaaatacctgccataaattgttgaacaaatgtaacattttttggtagttgttggcatatttccctaatttagagacaataaagtcattgaactgttgccagtatatggcatgtagtaggtgcccagatgtttttgagtatttccggtttctttgcctacggtagtgccatgaaaagcacatgagtataggctttaccttcaccaaaaatgaattattatcaactacaatgggaggcaacaattttgaaatctttgtgacccttttcctttgaaattgagcatcccttccagtacctgccaaagacagactagaccgtccctggacgataagctcctcaaaggcaggtgctgcttttgatctttttgtacctacttcagtgtgtaacaaacagtggccacagaacaaacacttgcatgctaagggaatggattctctaaaattgatactacttttgctttggtggttttctttagggcccactgatgatggtgaagaagagatggaagaagacacagtcacaaacgggtcctgagcagtgaggcagatgtataataataggccctcttggaacaagtcttgcttttcgaacatggtataatagccttgtttgtgttagcaaagtggaatctatcagcattgttgaaatgcttaagactgctgctgataattttgtaatataagttttgaaatctaaatgtcaattttctacaaattataaaaataaactccactcactatgctaccaagttgtgtgtcatcatggtgcatttgcagtgaggtctaaggacacgttgaaattggaaatgcaggagggcagcgttttctcggtaggcttcctgggctggattagcgtctggctcctgcagtgtcatgacacatgccaggaaggccgccttttccactcccacatagcccttctgttagtgcagacttacctgtcgctccggcttctgataggacaactgaaatgattccatttttgaaattgattggtgtgtcccaccaaacctggctatgttttttgtttttttctcccccgcccccaggctggtctccaactctggcttcaagtgatcctcccgccttggcctcccaagggagtacaggcctgagccaccatacccagcctttagttttatatatgtacatagttaacataaaggtcatatggagagtctacaagaacatttgttgaaaggggcgtaagttactcatatttgaagaacactactgtttcattgccatctctctgatcccccttagccacgacagtcttaatcccatcttgttgcatatacttttgtgaaaagcttggcactttatcagttagctcttgctgcaataatgctgtataacaatccacccgaaaactcagggttttgtttgttgttttttttttgagacggagtcttgctctgtcccccaggctggagtgcagtggcgcgatctcggctcactgcaagctccgcctcctgggttcacagcattctcctgcctcagcctcccaagtagctgggactacaggcgtccgccatcacgcccggctaattttttgtatttttagtagagatggggtttcactgtgttagccaggatggtgtcaatctcctgacctcatgatcctcccgcctcggccgcccaaagtgctgggattacaggcgtgagccaccacgcctggccaaactcaggggttttaatcaacaacactattatgtagttggctctgcttatcactgtaggtctggattaactggggtggcttggtttctttacaggtctcagataagccagctcacccggcaaaggcacaagaaataaacactaggagcttcttaaggcctacctacactcaaaactgacacacttatttctgcccacttgatattaaccaaagcaagccacctcgccaagtacaaagtcaaaggatgatggggaaatatactcctttgaccttgccatagcaaggatatggctgtgagaaggagtgacaaattagggccactctttcagcctcggccaatcatttagcctacaacagtcagtgataggtggcagccctggttactgtccacctttgtcctctttttgcaaataatacctgagcaattacattgagcaaagtgtttgttgaaatacctttccagttctagacaagccaagccaggtgaggttataacacctgattaaagggacaaaggtaacaaattcctggctaggatgagtaacttctatcaataggaccataagatcaatgtgctaggaactgaaaagccatcatccatgcattcaaataatatctattagattttagtggaatatatgcattatatgtatatatgtatacaatagttcacaatagtttacaaggatactttggttttctatatgcttagaatgtgcattattttcatgagttaatactggtttccattttatatcgcaaagtcctgagtgaaaaggattgttgcctttttttaatgatagaacctaaaatgttacaatttattccatctttgtgattacagacattacaggataaggtagctaaacaaggcaaataaagcaaacgttcccttcatttaatcagatgcaacattttggcatttttatactgtgcacgttgactttaattcattgacatggattgaaagccggcaacaacaaatctttgcaatttaggatcttcttccataactaagttttgtgggttttttttcttttcttttctttcttttttagacagtcttgctctgtcatccaggctgtggagtgcagtggtacaatcttagctcactgcaacctctgcctcccaggttcaagcgattctcctgcctcagcctccctagtagctgggattacaggcgcccgccatcacacctggctaatttttgtatttttagtagagacagggtttcaccatgttagccaggctggtcttgaactcctgacctcaggtgatccatgcacctcggcctcccaaagtgctgggattacaggcgtgagccaccgtgcctggccaaatttttttgtagagatgggatcttgctgtgttgcccaggctggtcttgaactcctggcctcaagtgatcctcctgcctcagcctcctaaagtgcaataggattacaggcaagagccaccactcctggcccactgcaacattcttgaagctctcaagtcttcatctgacaccttgtcaagatggggaactcttgtgttaaaccatcctgttaagttactgtataaaaataaaactgctcccaagcattgattgaaactgttttggtatgagtttcctgagagaaaagtgaggccctaaccatttttttccatgaactatgaccccagtacggtatacctaatgtccttcacagcctaacaaaatagttgaggcaaccctgctcatcctgtctagtttatcagtatttagatgtaaggcggatttaaagctaatctgggactgagaattgcaactaattccatagaagtcattcaatttagcacataaatgttcctgcaagatgccagagcaagtgagaaatcatctgtagcaaagcaaagagtggtgatggttcatcaccttttacaacggaaaggcaaacatgaagaaggaaattctccctcctaaaattcctcattaaatcgataagctatcttcacagcctttatggataacatccagagtcctcggttcatctgaggagtccattttcaaggtggccaacagggaagaagagctttcaggcttctctttgctatggctcatgaatgccaggtcccctttattgctttctgaacacactgctgggaaagcttgatgaggtcagtgctcaaatccctgcagctgtcccccttgaggaacttcttggcaaacctgcattgaagaaacactgattgcgttcacgcttcatgtcatggtttgccttccccacactgctcctggcgacagtggtgacgcagcactcggatgttgtcacctattcattattttttcagttctattcccaattcccaacccttcttttgaaacacagctaggtatgtgcacttcaaatgctccagaaaaacccaaggtcacatttcaaataggatggttatggtcaccataaaggtggtgacgtttgagtggtggaagagggtgcgggacggcgttgcaggcagaggaacacagccaggacactattataagtaactctgtgatcgtgtcttgtggtgatacagtataattcaacacaggttagagcagttactatgatcgttctttcctaaaaggctttgattttggagaaagaaccttgaggatcggtggggactttcttggcctgaaaggtatcaccagcagcaggagcaggaggctgctcacatttcgtgtcttcacttggggtggacgttggctgcaaccctcaaatgctgggagtcgtcaaccaactgagccctgttgtccaatgtgccccgggcaaggatgtgggtgcaaatcctgcttccgggcgaccactgacttccttggcttcagtgtccaattagaaaaaaaaaagaaagtagaaattcggtaagaaatccgtgaacgaggtccgtcctccacccccgactcaagccaagagatagcacagaacgttcccacacgcgctgtcccggccccggcgagcgtagccgggatttctcccccgccacgcccctcggccacgcccccctgcgtttggcccagcgacggggcggggtcggcctgcgattggccgggaccacgaccgcgtccgggcgcgccacgtgtgcgtaggagcgcaccggaagcgcccggctggaggcgcggcggcagggctgggcggcggcggcggcggcggtcatggaacgccaagaggagtctctgtccgcgcggccggccctggagaccgaggggctgcgcttcctgcacaccacgggtgagtcgttgcggggcagccgggcgcgcgccgccacttttgcgacgcgcagccatgatgggtgggtcgtccgccgctgcaccgggcgccggagcctgggaggcctgggaacggtcgggcgttggcgcttacgcggaccttgggcagcaggcccggaccttgcgcggaggcttctcgggagccgcacttccctgggcggctcggctgtcccttgtttgcgcaagtcttttttgcgaaccaagcccttcctgtggtagttactggggtcactcggccgttggcgtttgcctctgggacccgtcccacacagccccatacacactcctgactccccgcgctgtcacccctttctatgtggctctgaaaggcctttgccttcctgattcagattagttgctcttcattcttcaaaacccagttgctgtgccctccacactctaactgcccccgactccccagatggttgggaagtctcacttctcagtgatccctgaattgtcgcacttcttgagttcgtgttttaacgatctacttaggaggctttttcctcagcctagaccatgaaggctttgagggcaggagttacactttgtgtttgttgagtcttatggaaaggtcaactagtagtgtcatttttagttttttgaaaactgtttttcttttcagtgggctccctgctggccacctatggctggtacatcgtcttcagctgcatccttctctacgtggtctttcagaagctttccgcccggctaagagccttgaggcagaggcagctggaccgagctgcggctgctgtgggttagtgcctgataaccgaaatgaaagcggtggttttgcacctcctttatattaagagttagtctcttagtaaaagtaagaggggccacacaggaagaccctgtctctatttaaaaa

SEQ ID NO: 6650 - DNA, 6000 bp, Homo sapiens
gtacctgtttcctgtctattttagaaaggaatctgaatcaaggatttttggtatggcttccaagttttaggacaaagctatattagtataccaatttagtagcttattataaagatcttggaaacaattgataattttttcttaacattaaaaaatgacttttgtaaaatgtgtataccatcgttcctactgacaccaaattaaaagcaggtgtagtctcaggagctctttctgttcacaggcttccctggtgaaaataacttcttgccttggaacacctgaacaaaaagcagagaaaagtgtttttttttctttttgctaatgaaaaacaaataaatcttcagtcagtatataatagtacttgtgtatatggtgagatattttaaaagatggtagctagcagagtcagttccctcaactctacagttctttgcatcattcccttttatatgttccttaggcaaatcctgagtcaatgcagaccaaagccatgagcgcaattaatggaagaaatgcattttcagcaaatggatggctgctatagttaggaagtgaggctgaaatggatattggagaaagatttagtgttgtgtagaatttaatatattgctagtaacatgggtgaaggctatctttatcaagtgtgacctcttagcttctgtgtctccaagcatgggaagtcctagcttgttaaagcttaagcctgcctcccctatggctaaatgaacaaagatgtatgagacttttaaccagaatgaaggggccagagtctttggacagcaaatggagtgaagctaactggccctcctagaactgaatccatatccttggcctcattgagaccacttgggcaactggctaccatgaataatacaacatagcaaatgagatactgacttatatgagtgtggacattttcattagcattttaaaactatagcaatattactgttaaaacacaaataagaggccctcttatgtgagaaaatccttaggaccaatactttgagaacctccagaggagaaaataaatacatgaattttatttcaatagtcaatattgaataacaatatttcaatgtcaggcctttaaaattgtatatgtaaaaggtataaaagtgctataatgataaaaatgaaaaatttctgatttggcccccactacaggctctccacctgctgttgatattggctgcagagtgccccaacattcaaatacagcaggctttgaggtctgactttgaaccatgccagtatcccaaaggtatttgatttccctgttgtgtgcacctaattgaagtcataataatggctgatagctttctccagaggtttagaaacctgggaggctttgggtttttctttcaaaatgtagtagctacagtaccctctaagacctaaggtccaagtcctccggctctctactaagagtaactggtcttgagagagactcagtttaaaatataggctgtgtggaagcaaacccaatgtgtatggggtatgggggcatggaggtggtgtatgaacctgatgttttccactttgctgttctagaagcaaggcactatagtggagaaagtactgaaaagtattgagattgttttactccaagtaagaggagattgtgtgactccttttactagatgtatgaatttagacaagtaacttactattagtttattctctcccggtcttaatgggtgaactaatagcaaaacaagtatcaaagcacagtgtctgaactactatttatctgtacctgtatgactacagcatcattattggtgcatctttgggaaatcttagagaatggaagaagtaccaatagatttcaaatagaagtaaatgtccaccttccccagtttacagtctgaaacaacagcctgagactcttttatacgctgagctccagaacaatcttagattttgataattaaacagcttacttttgggaactctaaaggaacacaaagaccatcaggaatccaagtggatgcaccaatggtgttacagaactccattcttacttcttttgtggtagggttatttgactgatgcgggaggtggtgtcccagattacatatctgtatttcagtaaagtatgtaagaaaggcatttatagtagccctatgaacaagaagaaatttgggctgcaaaataatatatttatgtaggttattttttaattataacttttattttaggttcaagggtacatatgtaggtttgttacataagtaaactgcatgtcatggaggtttggtgtacagattattttgtcacgcaggtaataagcatagtactcaataggtattatttttctgacttaggtaagttcttgatcattaaataagcataatcaaaagtatgaaagttaatccaacagggcctctattagtattctgaaggtatgccatattaagcataatcaaaagtatgaaagttaatccaagagggcctctattagtattctgaaggtatgccatatcacaggttagtaataattagcaccttgcctggcatactctagctttaaaaataccttaaaggttcacatatagagacatcaatacatgattgggtattacaattggaaggaacacacacacacccacccacacacacacacacacacacacatatttttgagacagagtctcgctcttgttgcccaggctggagtgcaatggcatgatctcggctcacggcaatcttcacctcccgggttcaagcgattctcctgcctcagcctcccaagtagctgggattacaggcatgcaccaccacgaccggctaattttgtattttttttttttttttagtagaaatggggtttctccatgttggtcaggctggtctcgaactgccgacctcaggtgatccacccgccttggcctcccaaagtgttgagattataggcgtgagccaccgtgcccacaggtactcaagcacttgcatgtgatcaagatggagaagagctgacttttgcagttcacgtgggaggaaaaaagtaaatctagaaattctagttaactccaaacacagtgagtgtcattagtgtttctccagaagccaatccaatattaggctgcacataaagactgtccaaaacaaggacggagagcacaacaattcaggaagaagaccacctggaatgctcatatggccatcaaagatgacataggctctggaaactatactacagggaaagttggggctaagaagaaccttgagccaggagaagaaaagagtggatggtgggccatagaggcaagcatggcagatgccttctaagaggtgaagggccacaatgtacagatggtttgacttattctaggcgggtttcagaagaggcacaaggcccaagctgaagcctagaaggtagcagtttgagtacaatacaagaaaaaaacatttttctttgcatttctgatgttcatcagaacatatgggacggaagctcaggaaagagatcttaaggtagcatcaagagatagatgtcgtccacaaggaggcggtatatgaagctgtgaaatggcttggggtttccagtgtcttccaccatcatcagcccagaattaccaccttcccagttgcacttcctcctaaatctacatctctggtgccttttgccttgaacagtctcttgccttggagcttctcggccatcaaacagaagggggcaccctgcaccgtcagtcaaggcaaggaccaatctggcaatccccaaccatggaaaaggacctaaggctgggtgggatgtaggagccttccaggacctggaagggagcctcctgtaactactctctactccctttagagtccacagggctggaactctaaatgcagaataaggttaggggtgggcagagaggaagggttgtgatgccacctgacttccaaattgagggtggcacaggatcccccagaagctccctggggtacagaagtcacagcaaccctggacaatccaggggtttggtaaagtgtacttaccaattttgaagaggggaaggggttctcttaaggtgtagaaaggactatccagggagttgcaaactttgttgtaagtggacaatcaccctcgctcctcactgcaccgtcttctccttgcccaacaatgcacgcgggtcctagcaaggtattcgagtccagatctctctctctctctctctctctctctctgtctctgtctctctctctttcctctctctgtctctctgtctctgtctctctctttcctctctctctctctctgtctctgtctctctctttcctctctctctctctctatctctgtcacacacacacacacacacacacacacacacacacacacacaggcaaagtgggcaaagcgggcaaagcgagcaaagcgagagggttggtacccagtctgggcgcgctggagctaagcaactggcctttgtttgtgaattggagcagtttaggggacatcctccggtcgccgcggggcgcgcgcctccgctgagtgtgcggtgcggtacccagcggtgcgggggaggctccaccgcgccagcccagggcccccgcaccgcccccgccagctcgacgcgcccagcgttgcgctctccacggagcgggcggccgcagcgcacttggctggggcgagaggcgagaggggtgggcggactgcttggttggcgttggcgctctgcagtgcagtggagtgttagcccagctccctatatggtcggggattagcttggcgctgctgaggctgaggctgagccaggagctggaggaggaggtggaggacgaggacgaaaaggaggaggagaaagagcgcagcagcagtcagcgcacgccgagcggctgccgggggaagcagaggcgccggaggctggggcaccgccgacgcctcgggagccatggccgaagggggagaaggaggcgaggacgagatccagtttctgaggactgtgagtctccgcggcgggggcgaggccgtgggcaggtggggaggagcgcggagcgcggcgaggaggggctggctgcgctgcgccgcggtgccgggtgcccggtgccgggcgctttctccgcacccgcgggctgcagaggcggaccggccacctacccgcggggccgcgaggggctgcgtgggaaggggcaccatctcctgcctctcccttgttcccctaccgccacccctgccccaggccctccacctaggaccgctcgctctccaggcaacttgctacttggtctgaaacccttgatgcccaaacttcagccggggtttgttcgcggttgtcctgacccataagatcggcgttggaagccctcgccccggggtcggccctctgacacctccatactccaccccagccccattcctcttccagggcgcccccacgcacaggggaacctccgggaaggagccagcggggcaggggggagtgtggggagccgggtcggagaagcgggcgcaggcgcttggtcctagccctgggatcgctcggaggggaattcacccagcgctgcccctctcgtgttaagccccacgccggcaactgctgctggagcctgacttgactgactgcctgtcgtgtgttcgagagctgtggcttctgctcctggctcccgcgagccccgcaggacagggaaaccccagtcagtggctccgcgtcactcaggtcccctccttgacacctgagggcgctgctccgtcccagatttgggggtgagggggcgaagtctgttgcagccacaccagccttgccctgtaggagataatacaaagactttcagggtggacggccacccggaggggtgggggcattggggatgcatcctagcgctgacttcagccaagtgaccttgagcaagtcgcataatccgccctactcagcctcagtttcctcatgtgtaaaataaaatgtaaccagcgtttcagggtgataaggattaaacgttatcgtgaatgtcataatgttttgtaaacggcaaatcgctctgtaaatcttaggtaattttata

SEQ ID NO: 6651 - DNA, 6000 bp, Homo sapiens
aatatttgtatttttagcagaggtggggtttcaccatgttggccaggctggtctcaaactcctgatctcaagtaatccatctgccttggcctcccaaagtgctaggattacaagtgtgagccactgggcctggccaaatgttttaaataaaatgaaaataaaaacagtcaccttgatagttccttcccaggataaacttatttctttaagtacaactctaagtggcacttattgttacatttgtctgtcctgcaatatgtccacagagagctacttttgctccttgcaccactaaattgccaatattcatttaacagtgtttcctgagtagttactgacttccagcactggatcaggcattgggaatacaaagaccaataagccaagggcccaggcctcaagaactcacagtgctgtgggaaacacggagaagtaaacatatatagtgtgatatcagctactataaaacattcacaagatgttacggaagcacagaaaaaacatcaccaatgggggagaagggggaatgggggacatcttcaggaccaggcttgtgagccagtgggaagcaggaggatgacatcacaggctgagggaagagtatgtacgaggacccatgagcgagaaacagttctgctctagatgtagactcacggcctgagatgagcctactgaaggaacggctgctatcttccgcctgctgactcttcccaacctcaagaacagagggaactcacattatcccctgccttggtattagcaaagaacgtgcttctaaccaagagataacagctgttcaaaacaaaacccggggagatcaacaatgggaaattttaaaaaagaaaaacacatttagctgggcacagtggctcacgcctgcaatcccagcactctgggaggccaacatgggcggatcacctgaggtcaggaatttgagaccagcctggccaacatggcaaaaccccatctctactaaaaatatgaaaaattagccaggcgtggtggcacgcacctgtaaccccagctacttgggaggctgaggcaggaggattgcttgaacccaggaggcagagattacagtgagccaagattgtgccattgcactccagcttaagcaacaagagcgaaactccatctcattaaaaaaaaaaaaaaaaacaaaaacaaaaaccacgtttgaggattctgggaagatggcagcagcagcagtatggttttcccaggtcccctgataaaaaatacaaagagcaactagggtaacaaaatcaaaaatccatgggaaacagccacaaaagcctaggtgacaaagtatctccacaaagtcccaaagatgaacaggtacaaatcaccaatagtcacaagacctgtaaggtaggtaccagtgtctgtgagaggaagcagagatgggatcaatgcagcatctgacagacctgggcatcccaaaacaaacaacaggcactcaactggaaagttcagcgggcccatctgggaacagcggctaaatatgttgggtctactccaacagctggtgagttcaaggaatttgcagctaaggctgaaggagctgagaatgtggccccttgacctctcaaaactaactggccaaaagctcttttgccagacaaaactccactctgaagaaaaactcctgggggcagaattcaaattgagcagaagaggaataataaaagataaacagaaaggaagggtcagatacagggggtgaggggtgccggatttgagaagcagggaccatctttttaatcacttcaagacaacagaagacttctggtactctagagtcctgaagcctgaaaagctgtccttaacagtgtgtctcccttctaaaagctgggaaaactggctttccatgaagatgagcaacaacaaaggatcacagtcaaatcccattcaaagctgttatcataaggaaaaagataacaaaggagcactttttaaaaaattccacaaaataggccgggcgcagtggctcacgcctgtaatcccagcactttcggaggccaaggcaggcgggtcacgaggtcaggagatcgagaccatcttggctaacacagtgaaaccccacctctactaaaaatacaaaaaattagccaggtgcggtggcgggcacctgtagtccagctactcgggaggctgaggcaggagaatagcgtgaacccgggaggcggagcttgcagtgagccgagatcgcaccactgcactccagcctgggtgacagagcgagactccatctcaaaaaataaaaaaaaataaaaaaattccacaaaatatccaaaaatgttttattataatacaatctcactgttttaggataatttgggaaattaaactaactaaaaattccaccctcggtctttaggagctaagaataaaaaagtaacagttgtcagctctcagtcttgctcagaaacagcaacacatgagggaaaaaaaagtgggtagagagactctaacagacaaaaaggtaaaccaacccacaaagctaatgttcaatgacacgtctcacacggatcttcactccatccctttccttctccaagtccttatatctttctcataggtgttattttatttcaaagataaaatgataaaaatgagaggcatgaaagagtaattaccattcgttagcagaatcaacaattggagacagtacattcctggctccttagatgcactcttaactttccttcaaataatacaccctcagatctgaacagtaaccattatgtgacataaaactggaaagcggctgggcgcggtggctcatgcctgtaatcccagcactttgggaggccaaggtgggcggatcgcctgaggtcaggagttcgagaccagcctgaccaacatggagaaaccccgtctctactaaaaatacaaaattagctgggcatggtggtgcacgcctgtaattccagctactcggttacagtgagccaagatcgtgccattgcactccagcctgggcaacaagagcaaaactccatctcaaaaaacaaaaacaaaaacaaaaccggaaagcaacttatctctcctaggttctgcattagaatgaagtgcacagtactatcagatcaacaaaacaacagacttttaaaaatcttattatgtagtaaacttacaatactaatagacactgagttgggctcgcatgggtactgacctctccatctcacctggtcaattatctgcttcctggtacttgattctctgcatgtggccacatgactcttttttcttacaaatttccccctttcccttcataccacacttcagtcaaaagtatctcagcaatatttatctcctgggctacaaaatgtaacctgaatctttaaaaaatattaccaacaggagtttttgatccagtcaacaaacttttctccactaactaaagccaagtgtctctgcctgcttgtatgctatggagtatgtaatcagaaacaaattaaatactcagagaattcccttctctggtgagtggtccattttaaaccagcgtaaccgtttggtcaaaaacaaaaggtttgtttcttcttcacattcagagttctagaccattaccttctaaataactcaggttcaccaaaatatcacttgccaacacccacgtgtggtggcacacgcctgtaattgcagcactttgggaggccaaggtgggtggattactagagcccaggaattcaagatcagcccggacaacatggcaaaaccccatctctacaaaaaagtaccaaaaattagccaggcatggtggcacatccctgtagtccaagctactcaggaggctgaggtgggaggatcacctcagcctggggaggtcaaggctgtaatgagctgtgattatgccactgcattcctggatgacagaatgagactctgtctcaagggggaaaaaaaaaggtatcatttgacaaagcttctcacctacaatgaatccaaccacccgtctcaaatccacccactctgttcacctattaacaattcatccaaaagcctagaactgagctctcatacaaaatgaaacaaagcaaagcaaacaccaccaccccattttaaacagcatggagatctcatccctgttccataaagttaagcagattccccaaagaatgacatttcaaaagagaaaatatcaatcacctaagatttttcaggtaatgtccctatccccacataactacccattctcgtaagatgccaattaaccaagataagtgatttcagtatgattttttttttgttttttttttttttttgagacagggtcttgctatgtcatccaggccggagtgcagtactgcgatcagcttattgcaacctccatctcccagttcaagcaattctcctgcctgagtctctcaagtagctgtgactacaggtgcatgccaccacacccagctaatttttgtatttttagtagagacagggtttcaccatgttggccaggcaggtctcgaactcctgacctcaagtgatccacccacctcagcctcccaaagtgctgggattacaggattgagccactgagcctggccagtaagcctaaggttctaaaattattaaaaactccattgtctagcaactaagtaatgcaccacataccattttggtcaacaatggaccatatttacaacagtggtcccataaggttataatggagctgaaaataatgtcatagtgcacagcattattcacaggtctgtggcgatactgatgtaaacaaacctactacattaccagtcatataaaagtccagcacatacaattatgtacactacataatactgacaatgatactaaatggtttatgtatttactatattatactttttaccattattttagagtacagtcattctacttacttcttaaaaaagctaactgtaagcctcaagcaggtccttcaggagctattccaaaagaaggcattgttacataggagatgacagctccatgcattttgctgaccctaaagtccttccagtggtacaagatgtggaggtggaagacagtgatattgtgtccggaatttattccttcttgtgggttctcggtctcactaacttcaagaatgaagccgcagaccgtcgcggtgtgttacagttcttaaagatggtgtgtccagagtttgttccttcagatgttcagatgtgtcgagtttcttccttccggtgggttcgtggtctccctgacttcagaagtgaagccacataccttcgcagtgagtgttacagtttttaaaggtagtgcgtccagagttgtttgtttctcccggtgggttcgtggtctcgctgacttcaggaatgaagccgcagaccctcgtggtgagtgttacagctcataaaggtagtgcagacccaaagagtgtgcagcagcaagacttattgtgaagagtgaaagaacaaagcttccacagaatggaaagggactccagtgggttgctgctgctggctggggtgaccagcttttattcccttatttggccctgcccacgtcctactgattggtccattttacagagtgctaattggtccatttacagagtgctgattggtgcatttacaatcatttagctagacacagaccactgattggtgcatttttacagagtgctgatcagtgcatttataatcctttagctaaacacagagtgctgattggtgcatttttacagagtgctgattggtgttttttacaatccttcagctagacacagagtgctgattggtgtgtttttacagagtgctcattggtgcatctacaatctaactagacacagagcgctgattggtgcgttttttttacagagtgctgattggtgcattttcaatcctttagctagacacagagtgctgattggtgcatttacaatcctctagctagacagaaaagttctccaagtccccactcaacccagtaagtccagctggcttcaccgcttactattgatgatcctgaccctgtgtaggcctaggctaatgg

SEQ ID NO: 6652 - DNA, 6000 bp, Homo sapiens
aaagcatcagaactctcagcttggcccaaggtaccttctgtggttcccctgggtggagatttccgaaaagtagtcttctctgaggctgggccaagcctgagggaaatggggccctaggagggtgggggcgggaaggaggggcaaggtctttcaggaaccagacccaacaggcccttctgtagcctcccccttgccctcaaagggggagtgggggccagctttacctcacccactgtgacccgccgcttccccttcagcctgggaccaggctttcctagatcccagcacagctctgagcttgttcctttgaggcatagagagccagagtctggcttccagagcattgacttcctcttcctagacttgaggccttttctctggctttcctcctttgccctgcagtagcaactggtgctgggacaagttgacccacctctcacagtcatgggtgtggcccacttgtgggagtctcctgtccacctcccagagacggccacccagcgggtctggcttcccagaaagttaactgatgattgtggggtttgtcatatctgggagggaagatgggtgctgggagagggttgggggcagggggcaaggaaaattgctacctgatttgttgaagatttttcctcttgccttacacatggaggttccaggaaacctcttgcagaacttcacacgtgattcttcaagccacacccacctgaaatcaaaccaaaggagtgctgtggctccccttgccctgccaccctttccctagtcttttgtagattgcactaatttacatcctagcaagaatcaacactgtatcagtccacggacctgctgagctgcagccacttgctctaggagctaaggacttgcattttcagtttgttcctgttgcccagaggccctgttctcacctcatgctgctccccagagtagactaacaggctcagtcccctgttgtccttgtggagactaggccttggccctggccctgagactctgtgagggggctggagcagcctggttatttcctatctgtaccaaagaggagtatggtgggagagggagtggagtgcagtgtggcttgggcctggtgctgggaacctgctagctgagcacttccacaagggcatacccctgggggcaggggctggggctgagaactgcagccctgggtcttcccttagggaggaagggcagatgaacccagcaggcttaggaggtggcactgggtgaggacagctgggcaggggctgcagagggaggtggaaatgaaccctgagggctcccccaacttgccatgccctgtcccttagtagatgagttgctcctgattggtcattgggtttgggtgaggcctggaggcttcagaggtgaatttatgcttgggaagcctgatcccaaacctgaagggaagggacttggatctccttatattgaataagctgtttggaggaaggtgtctgtctgggaggatggggcagtaaatgaggttggcagagtggcagtgggggctctgcagagccagccttggagcctgctcattctgggcccttgctgccaaggagcccagcctcacctagcaggaaaggagatgaaggccctcctcccaggaggtagggtcttggctgccccgaacttaaatgcttttgaaatctcttagatgtggaaatattttttcgaacctgaaaatgcagctggtagaatttcaatggaagcataatccatgtaaaatatattttagttgatattttgtaaaatgcactttttgtgtgtgttgatcctggtttcccagatctgtatttcagtgtttacaagggaggaaggacctttcctcacctcccttttgacagagattagaagtacttctttaagaaaaaaataaatttgagaaattgtattgatttagaaaaggatcgtttcctgtgtgtcctgtcatcttttggtgtgtgggtgtggagagacccactattcttatttcagaggtccctcttaacccctgtggcatggatgctcaccaaggccaatgagcaaagagggcagggaagcagagggaaaagagagtgagggaaggagacagagggactgggaacttggagttgacttcttgatttcatggtggccacagctgcctgcttaggtctgtgtgaaatacttcagttgccagccctcacctgaccagtgacctggaaattggtccccaagtaggtacatggcaaagataccttcttatcactggcctcatgcagtggctcctgcctgtaatcccagtgctttgggaggcagaggcaggagggttacttgagcctaggagtttaagaccagcctaggcaacatagaccatgtctctcgaaaaatttaaaaattagcccggcatgtcagtgcatgcctatagtctcagtcaggaggctaaggtaggaggattgcttgatcccaagagcacgaggctgcagtgagccgtgatcataccactgcagcctgggtgacagagtgagatcctgtctcagaaaagaaaaaaaaagcatccctcctcatcaccttgggtaactggccagcactgtcctagggcctcagtgtcttgcagctggtgcttcttgcttgctgaggaaggccacatcatggggccaagggtctgcggccagctgacccctgcttcagcccagccctggtcccagcctggaagcctcagtgttgaccatgttccaggtggggcagctctaaggccatagaggttcctgggagccacagcacccccccgccccgcctccacttctgcattttgctaaggcatggtgcatgtgggcaggaacattttttcagaatttattggtggcacagacaccaccatggatttttctagctctgccttcagtgtggtgtccacaagactcccttgaggcgagtggtagcttgtccttatcttacagacaagaaattggtatggagataagtaccaggcccaaggactccccctgcctcaccctgactgctaacacagaaaactaccctgtaacacagaagggagcacatgtggccacattatcaaaagatttttaaaggtctaaggcctttttttcctctcctggtttaaaggacatacttactggaaaatatgattttaatagaaaatcctatcaccagaaatgtatacctttaggattattggaagcaaggagcagtgtagacaaggcagaaccttcacgcaaacttctggtgcagcaaatggacaggtggtagcctgcagatgcactggggcaatcagatgtggagagcctgccctggagagctggaaggctgcaaggctttaccgttccttcccctggctcatctgtgtgcttttcctgttgctgggattgtggggtcatcagtgagccctctagtatcacctcatccctcaagtcccctcacccttctgaattcatctgatcactggtagctccattctcccactggtatcttctattttccatcacctgctctgtacagtccgccctcgagtcagctgcttcctcccttctagccattccatgatatgctcctttaatctctgaagggccgtgattagaaatttaggttttagactcagaaccacccatactgagtcacatcttccctgagcctctgttacttcagctgtacaaagggaatgtccacactagctccctgccagggtggctgtaacaactaaaggagataatgaatataaaacacttagtgggcgctgtcctcagtacacttgggctctaatcatattcctctgctgcttcagaggcttgctggctctctgcaggcagcaagcacatagctggaccaagtctggctactgagccaggttcccagtgggaaatggtggttgctgacatccaaagcacttcgggtctgctgtccgcccaagtgaccagcctggtgccatggagcacacatctagctccaggcaaggagactacgtgctgtttccctgctgttttgtgcccccagctcctcacccttccaaatgtgtgttggccacaccagcagctgatggaccaatgtgtcagaccctccccagagtgcccagttatcccactgcctcatgaggagaaggcagaggaggggagactccatttccagacatttcagcattacccagtggacaagcactgtagtcagtccccaggtattgctaaacacaagggtcaccatggagactggtcagtgtctgacagttctgcttctccttcctggagtggccacgacctgcaggacggagggagttaagggtggcaagggggagcacaccgagggctccgcttccagctggaaagaccagcctccggcacgtctggactcggagagagcgctgcccgcctccctgcctccagacccgttgctggaggaagggctaggacaggcctgagtttgtggcgaatcccccttgtccacttccctgaggacacacgctgcaggagagcagcctcgagtcttttctgccttcgaggtctcaggagcttttgtccccaagcccagaggacaggggtggccctgactcaggcgccctcttccgggtaggggtccgcgtgcgccctcccaagcccgcgccccgcaggggcgcccgcccctctccccgcccccggcgtgggcccgcccccgcgcctgtgtcactgcgaggccgggggtggagagcggccgggcgggacatccggcccgggtccctcgccgcgcccgccgcccgccgcccgcttcggcgccgcagcccgggagccggccacccctacacgcgccagggctgtcccctgccctcccctccccaactacccccggtcccagaccctcctcccgcccccagcccgagcccgccttccaggccgccctcggatcggccgggcccgcgcaggcccccaccccttgagcaccatgttcccccgcccgctgaccccgctggcggccccaaatggcgccgagcccctgggccgggcgctgaggcgggcccctctgggcagggcccgggcggggctgggtgggccgcccctgctgctgccgtccatgctgatgtttgcggtgatcgtggcctccagcgggctgctgctcatgatcgagcggggcatcctggccgagatgaagcccctgcccctgcacccgcccggccgcgagggcacagcctggcgcgggaaagcccccaagcctgggggcctgtccctcagggctggggacgcggacttgcaagtgcggcaggacgtccggaacaggaccctgcgggcggtgtgcggacagccaggcatgccccgggacccctgggacttgccggtggggcagcggcgcaccctgctgcgccacatcctcgtaagtgaccgttaccgcttcctctactgctacgtccccaaggtggcctgctctaactggaagcgggtgatgaaggtgctggcaggcgtcctggacagcgtggacgtccgcctcaagatggaccaccgcagtgacctggtgttcctggccgacctgcggcctgaggagattcgctaccgcctgcagcactactttaagttcctgtttgtgcgggagcccttggaacgcctcctctctgcctaccgcaacaagtttggcgagatccgagagtaccagcaacgctatggggctgagatagtgaggcggtacagggctggagcggggcccagccctgcaggcgacgatgtcacattccccgagttcctgagatacctggtggatgaggaccctgagcgcatgaatgagcattggatgcccgtgtaccacctgtgccagccttgtgccgtgcactatgactttgtgggctcctatgagaggctggaggctgatgcaaatcaggtgctggagtgggtacgggcaccacctcacgtccgatttccagctcgccaggcctggtaccggccagccagccccgaaagcctgcattaccacttgtgcagtgccccccgggccctgctgcaggatgtgctgcctaagtatatcctggacttctccctctttgcctacccactgcctaatgtcaccaag

SEQ ID NO: 6653 - DNA, 6000 bp, Homo sapiens
ttctccctccagtcaagaactttgtcacaccctcttgccacaaacaggacctccaacagttggctttttccacagggtccggatcccttccgagccccacctagctttcctctcttttttccccaccctctgctcctcatgcctcatcccttatgagcatttgtctgcggttctcctttttccttcatttccttctggaactcatttgcagtcagggagctcccctccactctaagtctgcccctgactgtctggatgtcacctgggggaaaggaaatgactgtttattgggtcccatgaatgcataatctgatacagtccctcagccactctccaaggctccaaggttattattattattattattattattattattattattattattagagacagagtctcattcagtcgcccaggctggagtgcagtggcatgatctctgcccactgcaaactccgcctcccagcttcaagcaattctcctccctcagcctcttgagtagctgggattacaggcaaacaccaccatgcctggctactttttgtatttttttttggtagagacagggtttcaccatgttggccaggctggtctcgaactcctgacctcaagtgatctgccctcctcagcctcccaaaatgctgggcttataggcatgagccaccacaccggccatccctattattattatcccattgcacagatgagaaaactgagtgtagagctagagttaggttacaagcccaagaccacatggttaggaagtgccaagaagcaggtccatgtcaggcttattcaccagactcacctggagggtggggagagactcgttcctcctgcctcctccccatctctgctcagtccccctgaccaagattcttcagagttcggtgtccctcagcgcccatgccctaccccttccttctcaccggggcccttcttatcatcagtcactgcatcctgttcctcccttgaagcccccagatgagttctcaaggccaccaccaagtcatcaccttcctcactcctctctccagtctcaggcctgttctatggggaacccactctgtcccgcgggaaaaaccctcagcaggcggttccttgtgggggctccagagagaggtgaaggaggccacgcggggcaccgcctgctgagcgggaatcccgtccctaaccgctggcgcccctcgaggggaggggcgagggcggaggtggttctgctgcggcatctgtcccaggcgggcgggaagctgctgcattaaattgtaaaatcgatttattgaccggcaggtgcgagcagcggcagatggagagtagccctgccggggcgcatctgcggggagcggcggcatcgatcccggcccccctctgaaacccgtcggtcctgggcctttctcgccagctcactcccaattgtagggccaaggtccttgaaactgcggcgcctgaatggctagggtagctcgactccctcccccaacaccctcctggcctcaggccccgggctgcgcccccacggctgccaggctctgccagtcccactgccccagttggcacgcggcgggccgggctgacgcgtggcagcgccctgcggcagatgaggcacgcgccggcctcatttcaatgtgaatggatcgaatggagcagccatgtggcagcaacagtttgcaaatctccacgccttctgtgcagctccccggccgccgctccctgcacgtggccccttctccgcagcgaccgcagcggcgcccctcaaggcttaagcgccccgcccaagccaggcctgcttccccgcccctggtctgcccagcaggcacggtggcccggcccccaccgcgctcctacccgggtgcagtgtgccccgcgaagagcgccgtcccctgagagggggttggggagaggagaggcaaaaccgcgctgaaggtctcggagctgcgcctgcggccgtggggagggcacagaggctacgctgcgggggaggagtcccgaggctctacgaggctcctgttgcgccccaataacctggggtcagcttggggacaccgctggaaggcgaccttagcgcttcccggtcctcagtgccggttcttatggctggaggactatgcgcaatggccaagcgtagggggacagcagaagcagaaggcctctaggggcagaggcggtgggcctttcatgaagccaggcctcgaccctgcgcccgcttccgacgttggggagtgttgagggtgcgggtcgaattgaggaaccctgggcctgcggagggtcagtggtctttcggactctgggtctatctgtgcaccctttccatgctgttgtggagggtctgcgtcaggggcgggggcagccgacttcgatgggggtccagccccacggtgatcggtggcctcccatcccaggaccacgcgtgtagcgttcttccgcccgcaagtccgaaagtcccgagtgggagaagaaggaaggcgcagccccagttttgggctgacagaaacacttgcggccttcgcactgggctccccacccgcagcatgaccctctcctgctcagcaaatgtgggcaaagctcgaccgcagcgtgtgggagcgctcgtaggtacccagggccaagggtggcagtgtcctagcccgggaatgagcttctgggacagcgcctccgcaaataggtgtttcatgaatgtcttttgatgctgagaatttaaccctttcctcttctggtcagagcctttctagatctctgggatctcctgggtgctgcctctctgaagataataatcccaacttttgtttggtccttgataatttgcaaagtacatttgggcacattagtctgggcgtgtatgagggtagagagtgttccagattttccagtattgggagagatgccttgtgtgggactagatgtctcccttgagggtcaggtaagcaggaccagcgccagaaaaggaggatgtttttattaactcctgggccaggatttggagttgagagaggacagggctaggtagggctggatgccagcttggaggggagcaaggggcacccgctggcatcttagagaggcaagtccagggatccatagggtataggcggagagaagatctgggagcccacttgccaggatcgccgggaggcacgccccggactccccctccctcgggcctgggactccgcctgcccataacctacattaactcccgagcgcagcctgggcccatctgccgccccgccccacctcggttccccacgccaacccgctcgcgccagatggtggctgggaggggtggccgtgcgtgggggaccccggagcccgtctcctcacctcgcccctcccccaacccacgctcccaacctcttgtttctcatccttcccccccccaccacacccgtcccccagtcctccaccaccaccacccaactcaaaaaaaaaaatcagaccatgctcggcattggcagctgttgggcttctcgccgctcccccacccttaccgcctcccccgggttcgcgccgcgtcccggctccccccccgcgctgatcttaccgcccgactacagccatcacctcgcgggcgggctgacagctgaagccacagggcccccgctgccctcggcgtcgcaaagagagagctccccggcacccctgagactgggagaagccggccctccccggtctgcggtctccggggatcacgccgggttccgagaaagcagctgcgctgctgccgcttggaggagtggggccacccaggggaccctctcgggcgagacttgggaagccgcctgaaactcaaacagctccgcaagcctccagttccaccccacatcccgccttatgaggcgaggacccgggccgacccggcctcagtccctcaccttgattctccagtggcctgagccaactctggcgtcaggagagttcctccttgccccagctgagcgacagggcgcggccgggggcttggggctgctggggtggggggaggcagtgggcgcaggaactgaagctggactcaggtgaggggacgcgctggaggcggggccagaacctcattaccatacagctgaggacgcgcccccctcctacctccgggaccacgccccgccctcccccacctcagggaccgcgcgtctgggtctctggcacgcgccaagccctggcagggggcagaagggagaaggcacgcgctgggcacgcccccccttagctagagagggagacgcccaacaggtgcacagagagggccccgagccttagacccttagcccctagccttgctcagagtggccacagagaggttaacgcttctgctggcttccctgctgcgctggggacgcgtggtgggtgggcactcataggttgggggccgttgagacaagggctccagaagctccaggaaggaaaaggagatcggatttccctagcgctggtttttgcattccgggcttaagttctttttacctgctttggaacactaggtaactagcgcctgctgcggatgcacagcctacagggactgcctagtgtctccgcccccaagaccatccccgaaccacccactcacctcctgccccattaccgggcaacccctctatcctccggcggccagggtctcagcccttaaccccgccatcacggaggactggtcacctcggcacgcgcagagctgggggacctagaggttgggagcggcacggaggggcggggacctgcgcccgactggctgacggggaggggggagcggcgggggcggaggccccctccgggcggcgctgggactgtagcagctagaggccgggaggggaggggagaatgaccatgagtctgagtgacaggcggcgaggagaggagccaatatatataaggaaggcccccagcgcgcaggtttcagtagcggcgctgcgcgcaggccgggaacacgaggccaagagccgcagccccagccgccttggtgcagcgtacaccggcactagcccgcttgcagccccaggattagacagaagacgcgtcctcggcgcggtcgccgcccagccgtagtcacctggattacctacagcggcagctgcagcggagccagcgagaaggccaaaggggagcagcgtcccgagaggagcgcctcttttcagggaccccgccggctggcggacgcgcgggaaagcggcgtcgcgaacagagccagattgagggcccgcgggtggagagagcgacgcccgaggggatggcggcagcgtcccggagcgcctctggctgggcgctactgctgctggtggcactttggcagcaggtaacacgtcccgcgccctctccgtcccctctgccgcgctctgggcctcagccccgggcaccagctgagctgaccggtcccctccctccttccctcggtccctgtgcaatagcgcgcggccggctccggcgtcttccagctgcagctgcaggagttcatcaacgagcgcggcgtactggccagtgggcggccttgcgagcccggctgccggactttcttccgcgtctgccttaagcacttccaggcggtcgtctcgcccggaccctgcaccttcgggaccgtctccacgccggtattgggcaccaactccttcgctgtccgggacgacagtagcggcggggggcgcaaccctctccaactgcccttcaatttcacctggccggtgagcacagcctgggcgcactgggaggtcgcagaagccgagagaggaggcgccctgggaccaaagccccctccccagatttccttgtacacacacccccacccccaaaaagcccaggatgcattctttcctggctcttcccgactctctcctgagactgatcccagaaaaggctctcaccagtctccgtcttcccagtttatgtcctcccgtccccagctcttgggacacgattttcattacctaccactctggggcggtaccctaccaccccctcctccagtggctctcccttacactctcccgtctctcaaccctccctctaccgggggttctc

SEQ ID NO: 6654 - DNA, 6000 bp, Homo sapiens
ccacatctggctaatttttgtatttttggtagagacagggtttcaccgtgttggccaggccggtcttgaactcctgacctcaggtgatcttcccgcctcagcctcccaaagtgctgtgattataggtgggagccatcacgcctgggcaactcttatctcttgagacagtagttgggaaagaacaggtctttggttatatgaccagtgagactgtcatgatcctgcagctcaccatggtttcctcttgtttcccccactctaggggtggggcagaaggccttaactctgaaaaagctgaaacagctgcttcttcagagtgccggaagttggtagcagagtgccctgcttctgtggacaatggtttttatctccaggtttgtcttcatcttctctggatccttggcctccttgaacagttctgggtcataaaaggctgagagtgggcagagagttattttactagattagtgagatgctgtgcccaacctagtcccatccataatcaggggctgccgctggcccttcctctcactcagtcttcctccacccttgcggccccttcttactcctctggaatagagtatagctgcttctggttctgttctaaggacaggaactcctgggacagccactcccgcattaggtcaaaaacatttcctgttgattttattagtttccttccaaacaatgcatttatggaagaagaagagcttttgcaggcatgcatttgcacaggcagccaacctcctccagtcacacacagacacacacacacctccacacccacacgcacacactttcttcccatccgcccacaaagcatcagtcacatttagaatttgcacaaatgcacaccctccctcatacatcacaatgcacaccctctcatccacctacatgtctcttccacaaaatcacacctgctcacatacccttagaagcacattcctgtactgtgcccagagagagaaaggtgggggagataagcaaggagaatgggttagaagggctcaggaggtcaaacctctgtaggagctgaaaagtcagaagaccaggaccccccactcctctctgccctttttttttctttctttcttttttttttgagatggagtcatgctctgtcgcccaggctggagtgcaatggcgcaatctcggctcactgcaacctccgtctcccaggttcaagtggttctcctgcctcagcctcctcagtaagtagctgggattacaggcagccgccaccacatccagctaatttttgtatttttagtagagatgaggtttcaccatgttggccaggctggtatcgaactcctgacctcatgatccgcctgcctaggcctcccaaagtgctgggattacaggtgtgagtcactgctcccggcctcctctctgcccctgtaagtagaaatactacggctgggcaaggtggctcatgcctgtaatcccagcactttgggaggcgaaggttgcagtgagccgagatcacgccattgcactccagcctgggtgacaaagcgggactccgtctcaaaaaaaaaaaaaaaaaaagaaatactatgaattgagagagatttagaattaggggtaggggaagcaggaactcagggccccctgtcccacacagaaagtgtgctgcctctgtgacagtgatgtatctcaggctggtggctgaggtgggaagtttgtcaaggctgtaagtggcatccatcacatgtccgagaagcccattttgaccagtagaaaaggatggcctttagggtgggattccctatcagctcaggaaatggtgcggagggaatgaagagagataaggaagtaaaaggctgggttgggctctgggtccaacatcctctagaatgaatcttactaatgtcagctggaatcaagaggaggaggctccccttcactggaaacttgaagtccccctcagagaaaaggcgggagagagggcttggaaaagtgacaagtgcccaagagcagcccaggcaattctgccttcggccccagactattgtctgcctgccctgactcagcccaaactcagaaactgtggattctggaaagtaacgagacttttcctttgggaaagggtcctgaagctgacccacagtgctcaagaaaattggcagagaggccaggcacagtggctcacacctgtaatcccagtattttgggatgccgaggtgggcggattacctaaggtcaggagtttgagaccagcctggccaacatggtgaaaccctgtctgtactaataatacaaaaatgagccgaacgtggtggtgggcacctgtaatcccagctactcatgaggctgtggcaggagaatcgcttgaacccatgaggtggaggttgcagtcagccaagatcgcaccattgcactccagcctggacgacaagcgtgaaacttcatctaaaaaaaaaaaagaagaagaagaagaagaaagagaggaagaggaagaagcagagaagaataggaggaggaggaggggaaggggaagtggaaggggaaggggaagagagggagaggaagaagaagaagaaagaaggaagaagaaggaagaaggaagaagaacataattgccagagagctcagtgaaacagagacagaggagacggaagtgagccacacactctgtgtcctcgcctcaccaggaaactactaaagttcctggggaagcaaagtagaatttcataagaacaaaatggatggagaggagaaaacctatggtggctgtgaaggccctgatgccacgtatgtcaaattgatatcatctgatggccatgaatttattgtaaaaagagaacatgcattaacatcaggcacgataaaagccatgttgagtggcccaggcgttttatgggtttggcttttaaatttaggtctttggtcttaagttaatttttgtttatgctgtgaggtcagtttgctgagaacgaaaccaatgaggtcaattttagagagataccttcacatgtgctatcgaaagtatgcatgtattttacctacaaggttcgctacactaacagctccatcgagattcctgaattcccaattgcacctgaaattgtactagaactgctgatggctgcgaacttcctagattgttaaataaaataaattataataaactgttaactcttttcagtatgtaatacctgtagatcagttagtaactttttcatatatagcatgttgcctgtatgcagtttaactatataaagttcattgcaaagcagattatcttgtttttttcatagcaatcaaagttgaaatttgtttgctacatcaacaaattaagaacattttcacaaactgagaaataaacaaatatgccaattaaaaaaaaaaaaagaaagaaacagagacagagatatctggcccctgccatccatgtcttgacagtgcctcatgagtctctcctcctgctgccgcctgggggcgcccccagctgggtctcaggctgctgccagcactgctgttgttatcattagggtaattaataaacaagcactgctggggccaagtggaagaagaggcaggcccctgctgctcaggagaatccctgaaaagatccagtgagcctgcggcaaccggagctgagtggctggtccctcctctctacccaggacctctggaaggggtgtggggtgggcttccccctggagggaagggcaaggggaggagcacacttggtaggcttggtttggaaccagctctgcatgtgcctaacaggatgtctgtgggcaaggccaccctcgtgattactggttgtggggcaggctctgaagcaattattcattcatttaacaggcatctgcctatttatttatggaaagcctactgtgtgcaaggtggtctactaataatagctaatgtttgactggacagtgtgacgacacagccaactttcacaccaggtcctgggaaaaggggtagaagcaggggaagcaaccaggaaaaatgacagcccaaaaagatacgggcaattaggctttggcctgtgtagtgtagtggtggggatatatattaggtaaaacctggggattaccaagatcttgggaaactcaggacccaagttggaaaacatacggcaattggggctggagaaaatgggcatttttcaggtgggagggacttggagataaaggcatggcaataggacatgaatatggggattttgggtgaatggctcaatgaaagggaggcacgaagggatgctagccgatcctgttgggggagccccgggtcacggcagtttcggggagccagatggatgggagtgtctaggggttgaggtgctctaagtcctgagagggggatgctggattctgggatcagagtccgaacaagagttggggtgtggtgggggctgacagcggggttttgagggaaggctctggagggctgggttagaaaagatgccggagcgggtttagggaaaggaggggcgtggccggggagcccatcctggaggccaagccggatcctcaggtttggccagggggcggctggggccggcgtgccggcggggcgccggcggggccgcgggggtttgcggcgctggctgggattcgcgctccgagccagtcgccggggctccgcgggggggcggtgcgagctcgggctgcgggcgggccgggaggaggcggcggctccgagaagaacatgaatcagcggcggcgacggcggcgacggcagtggaaggagcgcggtggcgcgggagcggccccggggaccccgcgctgctgacggcggcgaccgcggccggaggcgggcgcgggtctcggaggcggtcgcctcagcaccgccccacgggcggccccagcccctcccgcagccctcctccctcccgctcccttcccgccgcctcctccccgccctcctccctcctcgctcgcgggccgggcccggcatggtgcggcgtcgccgccgatggcgctgaggcggagcatggggcggccggggctcccgccgctgccgctgccgccgccaccgcggctcgggctgctgctggcggctctggcttctctgctgctcccggagtccgccgccgcaggtaggggctggcacgggaggcggcgggaagcggggggctgcggaggggcgcggccgggggtcggagcccggggcgggcctggcgggctggagtcggggtgggggtccggagccgaaggccgaggctcggagccgggacagggcacgctgcggagtgctcgccgccagatctccggccgggcccccacccccaactttctggcgctcggggctcttctggcggggtggaagagaagggagcggggtgtgggctgtgtggtcagcggggagtgtttgggactgcattttcccgcctcgatgttcccagctgttagctccctccttcccagtactggggaccccattctgcctgccccgcacgcgaaggtccgcctcggaaaccacacgggccggggctgggcacccaaaggccaccctgataccatttaggtacacaggggctgtgagggtgcccagtcacaaaaaacaaatgggcacactcgagttcctgtgccctcagagcttcctgaaagcagaaccttggagaggatgggctggtgccaggttgctggtctttgggaggggttagtcttgtgttcccacatagccactgaggcatttgctggtgacaagagcgttccatgcagcacggtgctctccaagttcccaccccgcacctcggggactgatgggcatatagggagcgggaggctggcccccatcctgtgactggtcctgagagggtgaagggagcagggaagagccacaggccaggacagcggccacccgctggcatcttctcttgagacagcattccttgccatatcagcctctcagggaagggaagggaaacggggtgacgagtatttacaagccgaaaggtgcggacctgatgctcagggagcccacgactttgcctagagtcacacagcaaagggtgagaagaagcagggctgg

SEQ ID NO: 6655 - DNA, 6000 bp, Homo sapiens
cgaaggaggtcagtggcttcccctaaaggtcaaggctttggagccacgtttccttctggggctgggagcagagctggaacgcccccgcgaaaatccgtaccccgaagccagcagcaccgcctgcccataaacccgcgccggctctgggagagtggaccaccaggttgcccctgagccgcagcctgcaggagtagaaacccggtggtgtcttgcagccccacaacctccctaaggggcagacgaccaggacccttgggctccgatacgctcaacgcaggccggcccgtcgatactcacattcacagccaacccctcttactccatcaggccgccgagagccaggcgagggagctccctgacgcctcagacgcccccttcagttttgggtccgggagcctgctccggacccgctccccgccgggccccgccacagccgccgccaacgcgcaggcgcacaccgaagccgtcacgctcgcttttttttcctttgccgtccgcagttctcaataatctagctttatttgaacacaagagagtgaacaacggacacacaggaagaggtttttctcaaaaagaatggaggaagaacaaaggcaggcccgcttgcgggagagtcagtacgcagcgttggacgctatgaacagcctccctggtccctttttcattctccttgtttctccttgttctttcccggcctccctgtagctcctactctcttccttggtgtcccgccatttcctttagtcagtggcaactgttcgggctacattttgaaaacactccttccttgtaaaactttctgaagttgaatggaaggtgcaagagctttagaacagccagacctgagtttcagatcttggactagctacgaataatttgtgactttgggtaaattacaattcttcttggaacctcaggttcttgagttaaaattaggataatgttatctcacagggtgttgctaggattaaataacataggtcaagtgtttatctatgaatgctgcctatcacagagcagacattccataatactgactttattcttactcatgcctaaggtatttataatattttttaagtagagacggggtttcaccatgttgcccaggctggtctcaaactcctcggctcaagtgatctgcctgccttggccttccaaagttctgggattgcaggtgtcagccaccgcgcccagcctacatttattatttatttatttagttagttagttagttagttattttgagatggagtcttgctctgtcgttcaggctgtagtgcagaaccgctctcttggttcactgcaacctccaccttccgggttcaagcgataatcctgcctcagcctcccaagtagctggaattacagacgtgcactaccacgcccaactaatttttgtatttttagtagagatggggtttcgccatattggccaggcaggtctcaaactcctgacttcaaatgatccgcccacctcggcttccctaagtgctggtattacaggtgtgagccaccgcgcccggccgcctatatttattattaaacttagcccatacccattccctcagaaacctaattttagtgactaagactatcagataaatgaaatgacattcaggttgataattatgtggagtgtccctcctatattattgagattataacatctctgtttaacaagaccttcaacgtctcaaataaaagtaagcagcggtggggcacagtggctcacgcctgtaatcccagcactttgggaggacgaggtgggcagatcatgaggtccagagatcgagaccatcctggccaacatggtgaaaccccttctctactaaaaacacaaaaattagctgggcgtggtggtgcgtgcctgtagtcccagctactcggaaggctgaggaaggagaatcgcttgaacccgggagtcggaggttgcagtgagccgagacctcgcccctgcactccagcctagcgacagagcgagactgcgtctcaaaaaaaaaaaaaaaaaaaaaaagagagagaaaaaagaaaggaagcggctatattaacctcttctatgtaaatccagatttgttctagaggtttaggaaacttccaattccgtgtttgtgacatcacaagtccttgaaacactcaagggttgtggtacgctgctcattctattctccttcaaaggcatgcaatggaggaactattttaccctataaactctgggccatcattcagggaaaagcctgtagaagaccacagtcagatattggtgagtgccaaggtaacgctagattatggtttctcaactttgggattactgacattttggaacatatacttttttgtcaggggtatcctgtgcattataagatgtttagcagcagactgggagcagtggctcacacatgtaatcctataactttgggaggtcaagggaggcagatcgcttgagtccaggagtttgagaccagcctgggtgacatggtgaaaccgtgtctctacaaaaaatgcagaaattagccggcagtggtggtgcacacctgtagtcccagctactcaggaggctgaggtgggaggatttgagctgcaaaggtagaggttgcagtgagctgacatcacaccattgcactccagcctgagcaacagagcaagaccttctctctctctctctctctctctatatatatatacatatatgtgtgtgcgtgtgtgtgtatgtatgtttagcagcactgttggacacgatgctagtagtacccacccccgtttccctgtcatcacaataaagcatctccagacattgccaaatatcccccggaggacaaaatcgtccctggttgagaaccacggaattatatcaatgaccatcacaaccctaaatgaactaatgaactcaaccatacattttctccacctctgccctcaacaagtgactgctgcttgagaaatttacacaggagggcagaaaatggtgagttcatttttgcccatattaaaaaggccctcaatattgcttaccagtcctacaacattcttctgtcaacttgttgtattactttctacaatattccaaatcttctcagctttcctttaaactcccaataccacctccttttctatcagaagatgaccccatcttcaacttcacagagaaaacaagtcagcaaatgagaactttaacttcctgttactaaacatacagaaacatacttcctctcataattggggaaatatctcctctctctctctttctccctccctgccctcttccaaaaccattattcttaccagtgtttcgaactgcctctaaactgcctctattcttaccctttcaagatctttgcctactgactatcccttctcttcctttattcaaccatttttttctcagttgaatcttccctaccatgctcaagtttctcctgtcttaattctaacaaaaatcaaaaaaacaaaaacaaaaaatcttgatccttcatcattctccctccttcctccctgtcaaggccaaactttccaaaagcattctacaacttgtccccatctctacatctcccccacctccaaactactaagttgtttttttcaaccccagcattccaacaaacagctttcactgagataatcagtgacctctgtgttatgaaattaaaaaaaacatttctcaggcttcatcttccttgatcccttaggaatagactacttactccttgaagcactttttttttttttttttgagatggagtctggcactgtcgccagtgatagacattatgatagtaatgtagctgggattacagacacccgccaccacacccagctattttttctttcttttttttttttttttgtaggggggacggaatttcactctcgttgcccagcctggagtgcaatggcatgatcttggcccactgcaacctccgcctcccaggttcaagcgattctcctgcctcagcctcccgactagctgggattacaggcgcctgccaccatgcccggctaattttttgtatttttagtagagatggggtttctctatgttggccaggctggtctggaactcctgacctcgtgatctgcccgcttcagcctcccaaagtgctgggattgattacaggcgtgagccactgtgcctggtgaagcactttcttttcttgatttccagcagtttattttattcttagaggtgcatggaggggttcctgcagcaaatagtttacaataatcctccatctgcttaaaactcttcaatagctttcagtgcccctagtacaaagtggtctaaaattccaaggccttccaagatctagcgattgttggccttctaaagctttctttcctctacactcggggatgtacgattagcactaagcctctaacaaggatgaactactagaaatttccagaaggcgttatgctgttctcgacataagctgttccccagagcctggaaaactctagctctttctctgccggatttccgggggaactcctacttatccttcatgactcaagtcacttcctccgggaacccttccagacacccctaagaataaaacgctttgttcattatcagccaaaggcgcctcaaattttctatgtgctatgcactgtattctatccactataatttgtttacatatctatatcttagtctagacatattgaaaggcgatgaagagcagggaaagcactgtattcgctttcttttcttcagcgttcatccagcacagtgcctggcatacggtttgccctcagtaaatgtttattgcatgaacacctcccagcttcgggcaggactgaaatctatccggttaactagtgaattcccagactctccgtctgcgtggcagggacatttaaacccccagcaccgtgattggctccagctgcaggggtgtgtctgtgtccgcggcgaacgggaagtgagcaggcgcgcgggctcggcgcgcgcaggcgcgactagggtgcagcgccaggtccggtgttggggtgtccgagttgccgccggagaggagtggcctcgcccgcttggtgagtctccaggagtgggacggagggagctggccgggatgaagtctgagactatgtcctgagaagaaagagtgtatcgtattggttgaaaagttggtggggtcgggcttaagcggaggagggggctctctggcccttactcggcagatgggcccggagagaggacgggaggtgccgggagaacatcgagggaccagtggaggaagggtagctggatggtaattctctggacccttcctcgaaattaaacagagatcactttccgcccctcacccttactgtgttgctgtagttgacattaatagactgcctgtatggtgaccacagtgatcagatagctctgagataatggcttgaggaaggactctgaggttcctggtattggatagcccttgctctctagaaaggttcagccttacctcgcggcattactgcacaaattagaggatcaggaaaagaatgaatttcacaattcgggattggagtggtggggggaaaaagtactgtaaagtgtagtttcatctcgtcctttttttcttctttaatcagtcaccacaatgttaggaaaggcagttgatggtaggaggaaacgtaaagacataaaagtgggagaggaaaaaaaagtcaagaagggagtatcattttgccttttgctatttgtcatctcctggaatggggtctgtattagtgcgttctcacactgctataaagaagtacccaaggccgggcttggtggctaacgcctgtaatcccagcactttgggaggtcgaggagagaggatcatatgagatcaggagttcgagaccagcctggccaacatgatgaaatcccatctctactaaaaatacaaaaattagccaggcgtggtggtatatgcttgtaatcccagctactccggaggctgaggcaggagaatcacttgaacctgggaaacagaggttgcagtgaaccgagatcgtgccactgag

SEQ ID NO: 6656 - DNA, 6000 bp, Homo sapiens
atgccctagctcccagccttcctctctccttctaagctggccaccttcttgtgttgtctgtgagagtagcatggtgtcaggcaaagagacagaaagacagacagttttaacttctaatcctgtattttgggcaagtcacttaatccctgagtgtcagttttaacatgaacttttttgctttttcttaactactcaactctcccatccctgaggaataggcgtctctcttctctcctattctgcgaatccatcctcctgggctctagccattcatgcctgccttctccaccacctttatcatcagttgtcccccttcccatcatagcgtcccagcttctttttctctgctggctccttctctcaagggtatactgaaatttttcccaccttaagaacacacaaaaaaagaaccttctcccttgatcttcttggtcccctccagctaccatcctattttactctattcctgtcacagccaggcttttgaaaaaacagtgtatattggcatttccattgccttatctcttcaacctaccacaatctgacttttcctcatccctgccttctccattaggtcactaagtgttaaatccaaagggcagttttcacttttcatgcttcttgacctctctgtggtatttaacactgcagaccatgccccctttcctcaaactttacctccttacacttccatcacaccatgttctccaggggctcctgcttttggccatctctttgtggctcctctactagttctttttcctccctgttaaatgttgatgctccccaggaatctgtggtggctctcttcttttagcagtattccagattccctgggcaatctcatccattcccatggctgatggttctcaaatgtcttcaggtagtcctcctacctgagctccaaactcaaaagggccaaccaccctgtggacattttcacttggatgttcccttgatgcctgaaattttaacaacccctcaaatggaattcattgtctctgccctgctttttattctattgtctttgtatgtttggcaacatcaccactggtcaatcaaataagccagacacctggaccatcttacctcctaaatatttcttgaaactatccatgcatttccttctgtactgcctctgccctaacccaagctcatcctctcttacctggttccaaaataattttttttctagtaagccaatataatcatttcacttctctgctctggctaaaatctcatcttcttactttcccacataaagtgctttataacccggttccacctatactgtctccatcttttgcccagcctagtctatagccatactgaatgactgacctctccctgaatctgacacgctctttcaagccttcaatacctttggatatgctatttcctctgcctggaatgcactcactctcttggcaaatgccttttcacccttcaagtctcagtttgtgttccctcctctgtgaagtttcctctgatgccactgggccaatgtagaggttcccactttgaacattctgattgcattttgaacataccttcatgataacaatgattacattgtactctaattgtctgaacatctgtctcccaattagactgtaatctccttgagggcagagatttcatctttccatctttgcatcccctggatgtagagtatactaatcaggctctggatcaaatgaataaatatgaatgagttcctctccccacaggtggcttctgattttgcacacaagggggagctatgctcccttattgccctgtgctaataattcaatattaactgagtgtcaccaatacagagctaaggactgggcacaaagggatttgactaaccctgtcaacttttagtaatttctcaaaattttcagaaagcctcttccaatagttagagtctccaagactaacaaagacccaaacatgaattttcatgtttaattgaatcagaaacatacatctcaatcttagctgaaatgagtaactaagaattcgtgtattaaattattttataaaatatgtgatagtggtatttattttaaagcagatgtttactgacgtaagaattctttatttatgacatgtagactgaagctattatatttttaaataaaagttcataggaggaaggtctataaaatgtaaaatatcttggctaataagatagaagataaagcgaggctaacagcaagaacacatgtgatacgctggagttcaaaaaggagtatttttaatatatgtgaataagagataatataatgtattttggtcagggttaaatattattcctgcatttattttaaagggaggttataaaaaaatttacaagaatgtttcatttctattaacatgtgcttaaaagaaacactaacaaaaggcttttcgtattttaagtatagaacaatgttaacttatttccagttctccaaaatgtcatatttattaaagatgacagaagcaaaaaaacagttggtaaatgaaatttgcctttcttaatttcttcttgttccatttcataacttaggtcttcctttatttgcattgcctaatttaaagttaatttttcatgaccctgaccctaattttgttttcattattaagctaacagggctcatgcatgaagaggtgggacagaaatgagaagaccccacaccccacagtcctgcttttcctacaacgcttgtgtttccctggggaacatctttctttctggctcgtcaagtaacatctgacagtaaaattagttttaatgtgagaaaatctcatatcaatattaacttgacccactcctcccctacctcatcaccatgactaggatgtatgcacagtgtacattgatataaataagcagacacaagatacagtcaaatatgcacctacaaatttagataaacagagacacagacgcaagaaccacccagactgtcattctcagtaatatagacttcatcccaggcccctgtgacaaaattgggatgctttctcatggggtggggggagtttcccacactttagggtcctcctttctcacctggcctagggaggaggaggcagcatcctccctttccaggctcccttatgtactgaagactttccttatgctcaatcttattatagacacaattacccaatccttacctaccacaggttgaagtggagttcctatgtgtgtatgagaggtgggtaaaacataaagttacaatctttaagaaaattcagcctagaacaacctccagccttcttcattcaaagttatgtgctaacgtcttgtggcctctcttgtagcctgacaggacttttttcctgaagtcttcccccttgcccacctcccccatctgctggaaactatagagtaagggccactaattctccacaagtggggagtgggtgacatggctggagttgccaagacctctgattggtaatgcacagctactgcaatgtgatgcttttttctctgattggggtagaccccattaaacgtttacagctgtggctagctaaggggaccctgtcaggaactcctgtgctagactttcctcttcaaggaaggggtctgtgtgtacgtgtgtatctgtgtatgaatgtatatgtgtgttgttgcacaaaaataggagttaagtggagaaattgaacaagatctgaaaagtggattggaggcaggattccccagtaagggctgatgtggataaggaattcaagggtgcagaatcatgcaagccaaagtatccagactcgagttaaactgggatggcgattcgatgtctataaaccttgtggcatttatggccttaagaggttttccttgcctccccagtttcttaccaaactctctctttgaagaactcccacttgatccgaacttggtctggatgaaagcaggaagtgcagccctaggtgccagggcgggagcaagcacttcaagaccccctccaaaatcacctggaccgcacagatctaagcagccgcatcccccaccacccacacccggaccactattccctaccttcccctcttccaaacagtgcgtgtgtggcagcctgcgcctctcgccttcccccgtggaacctcacacgaagcgcccccgggggtgtgattaaagagggaaccaggtcccgacgttctgtgaacaaacgcgcgcccttactctcagtggggctcccgtccgacccccactcctctcctaactcacgtaaggacccggctgtgaccggacaaaccgggtctggggtgcttccagtcactcttcaagtcactcccaaacttctcagactgcacccgaggctctgcggcgccgcctccctctcccggcctggtacagagaagggctgggtgcgccaggacagtagtaccggggtctgccagctccgcagaggtccctccaatcccccctcctcctctgcgcccccccacccatgcccagcaatcccagcagctccagcgcaaacctagcgacgcagttccgggtctggcggggcgcgggcgcggctcgcagggcggtgggacccccaagacctcacgaggatccccggagggagacgtgactccggggtcttagaggggtttaggtcggatgggtgacttgctttgacgcctggcctggtctgtgggtggcaggtgatcgatggccttggacttggagcccagacccgacggtgtcgagaggatctgaggagagtctcccctccccataccctctccgcctcccaccctctccccagccccatgggacttgtgaaggcggacttgcttttttcgccgtccacacaaccgcactagccgggccttcggcaccgacggaacatctctacctgcgccccgggagccctcgccgtctcacctcgcgcgctgccgtccgctggaagcacctccgcgcctccccaggcgccagactccatcccgccccactgcgccccgccccgtggctgagccgagccgggccgtgccttcccctcctcacccccagccccgcccgtcccggcgcagagctgcagaggcaccggacgagagagggctccgcgggcccagctggcagccaggccggagacaagttgcagtcccgggctctggtgacgccgtggccgcaggtcagatttgggagggcttttcccggcccgcgggcctgggcgctccgggggagggagctccaagggcagggtggcgggggagccgcagctcctccacgttatggaagaaaggggaatgctagccccctgcgcctccgatcttatcctaaggctaaaaccggtcctgttagggcctgtcctctgcccaatcaaggttttgagagactgggttctttgggacctgggaatgttgggtggcctagtttgcctgggcctgcgggttcttctcctggcaccagcacaacataccagggagggagctttgggctttaggatccaagctttccccctcagccctcccttaggaccaagatggccttgacccatcttcctcccacctcagggccaccagggtcaccactctagggcttcaggctggaaaagcagccatgtggggcaagaacaggcaggcctgtgttctctctctggttctgccgctggctctgcctggggcttcactgccctgtcctgggcaaccttcctgtcaaggttgttgagaagttactgccccatcgttgtgtaaatcattaagggcaacccacccacaaggagtggttattaagcatgtccaccttcctcttcaggtcatccccacacagcctggtctgaaagcccatttcatgcccttaggggctgagtggtacattagcgttgaggcccaggatcctgaagacatggtggtggcgggggaggggaatgacatcttgggatcagggaaggaccgctgtggctacttccgtatatccagctttacagcttcaaccatccagagcccagctcttcatgcactattaaaggccagcacctggacagactctgtgaaatgcagcaggtgatactgagctttccagttatggca

SEQ ID NO: 6657 - DNA, 6000 bp, Homo sapiens
aaaaaaaaaaaaaaaaaaaaaaaaactaaaaaattagccaggcatggtggctcacacctgtagcctcagctacttgagaggctgaggtgggaggattgcttgagcccagaagatcgaggctgcagtgagccaagattgtgcaccgtactccagcctgggcaacagagtgagaccctgtctcaaaaaaaaaaaaaaaaaaaagaacaaggtagagggatttgagaggtgtgtatttctgtattctggcttttttttttgagacagggtctcactctgtcacccaggctggcgtgcagtggcacagtttcggctcactgcaacctccacctcctgggttcaagtgattctcctgcctcagcctcccgagtagctgggattacaagcatgcaccactgcgcccagcttattttgtatttttagtagagacaaggttttgccatgttggccaggctggtctttaacccctgacctcaggtgatccacctgcctcaccctcccaaagtgctgggattacaggcgtgagccactgtgcccggcccgtctttttttggtgttgttttttaattcttttttttttttggagacagagtctcgctctgttgctcaggctggagtgcagtggcatgatctcagctcactgcaacctctgcctcccaggttcaagtgatcctcccaccccagcctcccaagtagttgggactacaggtgtgcatcaccacagctggctaattttttgaatttttagtagaggtggggtttcaccatgttggctaggctggtctcaaactcctgacctcaggtgattcacccacctcggcctctcaaagttctgggagtacaggcatgagccaccacacccggcccgtggttcttttctttttattattctcccaaaaagtgcagccattttggctgtcccaaatattgtttgtctgcattctgatttgaaaaataaagtgtcctcaaaataggagctaggatgaatgtggagctggagcacaaatcctttttttttttgaccgggtctccctctgttgccaaggttggagtgcagtggcatgatcacaactcactgcagccttgaactcctgggctcaagcgagcctcctgcctcagcctcctgagtagctgggactacaggcatgcaccgccacccccagccatgtttcccaggctggtctcaaattcctggactcaagagatccttgtgcctcggcctcccaaaatgctggggttacaggcctgagccagccctgccagagctcaactctcttgggcttctctcaaggattgtagacttctcaagtcctgctgctactggttgctctgcaatgccttcaaacttattttatatattttgtccagtctttttagttgttttcaacaggagggtgagttaaatgccagctactctattaagaccaaaattttaagtccctatactctccctagttctgcctgcttctacagtaattgaaggagatataaaagcagaaaggataaaaccatctattacttacatcgtatttatttcccagatgggttttggcaggccacctcattttccaggagtaacctctaggctttaggagagttaacaacctttaggacagttgtaagtttcaacttccacagaaatgaccagagctagcctctcatcctggctctcccctaactaactgtatgactttaggcaaattcctcatcttctttgagtctatttttttttcttttgatctaaaataggattagtagctaacttgcttaccttacaggaatattacaaggatagtgaaagtatagaaaaatcttttgaaagactataaaatgctgtagaaacagaggatctcttatttatgtttaaccttgcagcccagaaatagcttagaactgggagtaagggactcaggatatagaattggcttagtcactaactaaggttttgactctgggtaaatcactttattcttcctgatctgtaatatgagaaagttcatccatcaaactatatgtgataaggcaaaaaacaaacaatggggcccaagtcagttaatcaaggggaggtacctgctaggttaaatcttttcctcttggcagttgggttatgtcaatatttgtgtttaaaaaaaatctggatcccttgggaaagtgagaggagtactatggcctgcacttagaagatgaagatatgggtttttacatcttctataaggaaagaaaaagggaagtgggagggtgagagaagacagaggtgtgatcactggcatcatttcacctgaacagaatactaggatctgtgcctatcattatgcttggacttagccccggaagtggcaattatttaaggtaaaaactgttggggcgtggtgactggagcctgtatcccaacactttgggaggcctaggtgggaagattgcttgaggccaggagttcgaaaccagcctgggcaatatagtgagaatcctgggtctaccgaataaaaatttaaaaattagctggatgtggtggcacacacctatagtcctagctcctcaggaggctgaggcaggaggaccacttgagcccaggagtttcaggctgcagtaagctatgatctcaccactgaactccagcttggatgacaaagcaagaccctgtctctaaaataaatacatacatatgtacacaaataaggtaaaaataaaaaaaagatataagatatatatccttttgtaatcttatatatttttgtatacattctatcttatacatatatcttatatatatataagatttacaggtatatatgtatttaaaaatatacaaaaagatataagatacatgtataagatagaatgagcaagagacacttcacagtcatattgacatataggacaacagcttgaaaatatctgtaagcaggttcactttcaacactggtgtcttattttcctgaattaatataagatcttacaacagtgctccacaattgcaaagtcatgtaatatttttccaagttctttcttctgtattaaattacttaattttcatgataatcttatgagataggattaggcagggtgggaaagatggaagaggcccagaaaggtaaagtgagttgctctcgatccagaatacaacacacatctactctgtgagggattctgtgtacgtctgcgcacatacacatgcagaactggggaaacagaaatatgtccttactttggtgtttggaatccgcatctacataccaaataatctaagccagaatctgtggtggtgatgttgttttcacatattttacaaatatttattgattgcctaataatattgtggtgggccttgagcctagggatacagtgaagaacaagatagagaacctggccaggagcagtggctcacacccataatcccagtactttgagaggccaaggcaggaggatggcttgagcccaggagtttgagaccagactgggcaacatattgagacccctatccccacagaaaattaaaaaaagacttagccaggtgtggtggtacacgcctgtggtcccagctactccagaggctgagatgggaggatcacctgagcccagaagttagaggctgcaatgagccatgatagtgccattgcactctagtctgggtgacagagcaagaccttgtctaaggaaaaaaaaaaaaaaaagacagagagcttgtgcttgaggagatcactgtctagtaggcgatggtatgtgctctatagggttcagcaacaacatggtgcaatcagagtgcagggaggggtcctaagttttatccagagggcgtcataggaagctttctttctttctttccaggccaggataagtgttaccagctctgtaaagtctttctctccctcttttttttttttttttttttttttgagatggagtctcgctcacccaggctggagtgcagtggcatgatcatggctcactgcaacctctgcctcctgggttcaaatgattctcctgcctcagcctcctgagtagctgagattacaagcctgcaccaccatgcccggataatttttgtatttttagtagagatggagtttcgccatgttggccagggtggtctcgagcgcctgacctcaaatgatccgcctgcctctgcctcccagtgtgctgggattacaagcgtgattcaccgcgctcgacctgcaaagcctttcttgacacatccgtctttcctcactgatctgttcgttttttgatggcagagaccttgtctcactcatttttatgtcctcacacggaaaacggtggctggctaatagtggttactcaataagtatttgttgaatggattaataaaataattcctagcagtcatttggcatggaatcatgtacagtcgtgctgtttattgttttctagggcatgtctttccagcacaaaatgatggtaaattttctgggtgcagagacggctcttactgtattttacaggctacccagtgcctagtccagtggtgggtaatgcttacaggaatgtacctgttagaagttcttacagaattcttttgttttgttttgttttctgacagggtctcactctgtcgcccaggctggagtgcagtggcgcaatcacagctcactgcaacctccacctccagaggctcaagggatccttccacctccgcctgccgagtaactggaaccacagtcgtgtgccaccgcgcccagctaatttttgtatttgttgtagagatgtggtttcgccatgttatcctggctggtctcaagcgatccgcccgtctcggcctcccgaagtgctgggattacgggcgggcgccacctctgcataagtcttaggcctgcaaaacagtcttaaaaacatataatatttaacttgagaggtgcagtcctcctctacattgagggcaggctcagcgaaggagggcccaagacataaaactaaccaatggcaggaaagcccccatgccccacccaagctgcccctcctccctcgcagctgagcttttctttcagtccttcactgaggagccagagggaatcaattccacaagctggggtaagtaaaggtgtttgggggagggcaggtgcctaatttacaaatttttaaagagatcatatttaaactaaatgcaggtagttttgtgcctagtcaggaaggccctaatttacacaatataagttggttatgtgtgtttaatgaaattatacttcaaatgcttgaagagatcacattttcaaaagcaattccatggggaagggaattttctgcaaagtaaataaatatctcagaatgaacttatattctaattgtgaatgtccatgtattaaatttgcttattctgaggcccaaatgtttgcttattttgtttaaaaactttacttgggatcattaacattcatactaattattttaaatgtaagttttgttaatttcactgatgagttctctctggggcataaaaaaccaattcttatgctacattatagtcaggaatttgaaggcctgtaaattgttatctgttcagcaatactttagggtccgggtcttcccaactgccttcctccctgtttccttcttactcagcaagctcagtggggcctccctggggctaaaaggagtagttaccctgtgactctttctttgagggtccaagtaggaacctttatagcccagatcctggggccctgggcggcccactgattcatttcaattccactgcctttcatttctcttctcctatcttactgcctcttctttagctattcacaagaggaaataggattttatttttcattatttattatataaaaattacacatccaatcttctcaattctcagttcttaaagaaatcaactaagccttcaaagacttttagttttgcgttttccatgggtaactggtcctaaaaattctccccatccccacagaacagaatgaccaatctttcaggcttggccctgaatttgtttttcagttgaggagaacaggagatggagaaagcaagtggaag

SEQ ID NO: 6658 - DNA, 6000 bp, Homo sapiens
taggacatggcttcattctaaatggctttactatctagttaggagataatgctaacaaccaactaaggttgccaggcagtttatcaaatgtcatattgtgtgacgcagactttacagattatagatatctggaaatggggctagagaatcaatacttacttcattcattgaatattggttgagaacctattatgattctctgtgaataagagcgtatgttcggagtttgcaatctaatagagggagacaagggaaataactaatacagaataatttaagtggacaggcatggtggctcatgccagtaatcccagcactttgggaggttgaggctggcagatcgcttgagttcaggagtttgagaccagcctgggcaacacagcaaaacccgtttctaccaagggggaaaaaaaaagaacggattaagtgctaaaatagcaggatgctttgtagttgataaagggttattaccgtaacttctgaatgaaaggagtagtgggattgtgaatgattttaaagtaaaggctttaagactgagccttggaagagaagtaggatttttttttttttttgagacagagtcttgctctgtcacccaggctggagtgcagtggtgctatctcggcttactgcaacctccacctcccgggttcaagtgattctctgcctcagcctcctgaatatctaggattacaggcgtgtgccaccacgctcagctgttttgtgtttttggtagagacagggtttcaccatgttggccaggctggtcttgaactcctgacctcagctgatctgcctcccaaagtgctagggattacaggtgtgagccaccgcacccagctgaaaagtaggactttgaaaatgttgattaagtcaaactctgtaaaatatttgaagacatttattttgagccaaatgtgagtgaccaatggcccatgacacagccccaggagatcctgagaacatatgcccaaggtggtcaggcagttagcagaaaggggtactgattcagaccccaggagagacttcttggatttcgcaaaataaagaattcgggtgagtccatagagtaaagtgaaagcaagtttattaagaaagtaaaggaataaagaatggctactcatgggcagagcagcggcttaggctgctcactgattacacttatagttatttcctgattatatgcgaaataaggggtggattattcatgagtgttccgggaaaggggtgggcaattcctggaactgagggttcttcccctttttagaccatatagggtaacttcctgatgttgccatggcatttgtaaactgtcacggtgctggtgggtgtgtcttttagcatgctaatgcattataattagcaaataatgagcagtgaggatgaccagaggtcacttttggcaccatcttggttttgttgggatttggctggcttctttaccacatgctgttttatcagcaaggtctttgtgacctgtatcttgtgccgatctcctatctcatcctgtgactaagaatgcctaacctcctggggatgcagcccaataggtctcagcctcattttacccagtcctattcaagatggagttgctctggctcaaatgcctctgacaaggctacagtgtagttttatatactttaggaagacctaagacattcatcaaaacatgtaagatgtacattggcttggtcttgaaaggcgggacacctggaagcggagacttcagggtcacaggcaattcaaagattatcaggctggcgtggtggctcacgcctgtaatcctagtgctttggaaggctgaggtgagaggatcgccttaggccaagagttccagagcagcctgggcaacatacggagactctacctctatattaggaaataaacaaacaaaaaagacttaagttattatctaaagacctggagtcaatagaatgtctgggttaagatatggggttgtggacaccaaggttgtttttttgagacagagttttgctcttgtcgcccaggctggagtgcaatagtgtgatctcgactcactggaacctccacctcccaggttcaagtgatcctcctgcctcagcctcccgagaagctgggattacaggcacccgccaccatgcctggctttttttttttttttttgtaattttagtagagacaaggttttagtcaccatgttgtccaggctggtcacgaactcttgacctcaggtgatctgcctgcctcggcctcccaaagtgctaggattacaggcgtgagccaccacacctggcccaagacctaggttttttttttttttgagacagagtttcattcttgttgcccaggctggagtgcagtggtatgatcttggctcaccgcaacctctgcctcctgggttgaagcaattctcctgccccagcctcccaagtagctaggattacaggcatggaccaccacgtctggctaattttgtatttttagtagagacgggggtttctccaggttggtcaggttagtctcgaactcctgacctcaggtgatccacctgccttggtctcccaaagtgctgtggttacaggcgtgagccactgtccctggcagagatcaaggttttattatgcagatgaagcctctggtagagctcttatcagacctaaaaaggtgccagacttggttaattccctcctgggtaagggaaaacacctggaaaggaacagggcttttctacagactgtaggttttcccccacaagatacagctttgcagggccatttaaaaatatgtcaaaggaatatattttggggttaaataattcaatttccttcagggcctgctatctgtcgtgatgctatactagagtcaggctggcttggtgtcaaaaataaagttctagaaaagctagaaaaagtctggcagtcttaagatctgttttcatgtgaatgctgttcagctcagcctgaattccaaagggaggagggtataatgagccatgtccgacccacccccgggactaacccccccatccccacttccatctagatgatggaataactagattttcaggtttactttggaatgcccttggccaagaggtgaggggcagggggtccatcagtcagttgtggggtttataattttatttttggtttacaaaaggatagaatatttcaggttgaagcataggcaagagcactgcagacatgaaagggcataattttaggagaatgctcacatggaataaagaatgtcttgaagggtataccgtacattattattggtgttataacaagttatcacaaacttaagacacagattatttcacagttctgttggtcagaagtccaacattgatcacatgaggataaaatcaaggtgtcatcagagcattagagaggcttcaggggaatgtttccttaccagttccagcttctggaggtcacccacaatgctggaggctcccttcctctatattcaaagccaacaatgttgtatctctctaatcattcttcatagttacttgtcactcttgactctcttttgcagttttggaggccctatgattacaatcagcccactggaacaatccaggataatgttttttttttaagatggaatctcgccctgtcgcccaggctggagtgcagtggagctgctcagctcactgcaacctctgcctccctggttaaagcgattccaggataatctatttcaacaccaggtaattaacaaccttaattcccatttgctatgcaagctaacatattcacagcttctggtgttcaggctgtggacatctttgaggggctagtattctgcctaccagagttaataagaaggagctaatactaagaggaaaagaggcccaaagaggaaagtgtgtgaatgcactgataaaggcaatggggaaccagtgcaagtttctgagtcttgcaaattcttatttttttgaaataagctttggttgcagctgagaaaactgaacaggcataattggggagcaacattaggaggccaccattacagttgagatgagagggtataagctagagatggcagagctaaatcgttttctttggtccaaagctgcctatgcccttttctaagtgttttccaacagaattcatgagatcattccacaggatctcagcaagtgcagtttctgataacttggccgaatttgttcagtagctgctgcaacggagggcttaaatctttcatctacacttaacaaggggagcccggaaaagtggcaaaaccctagttagcaaggctgaggctcgcagagacctaggcatcgaattttttaatggtccaaatcgcagggaaagcgagcactccctgttctgaaggttttccctaaacacggagacaacactaaaaagctgtgccgcgtgagggctgaaagtcctgttttctccctagcttcagtgaagaaagcctgacggctcccccgcgtccaacaaagacaacgctcttccggtcttcgtgacccaccccgtgagcagcccaaaccgaccaccgtcctcccccagctcccaccaatcggatcgcagggactcgagccccacactgctgagtccgctgacactgcgtccggggccagacgacgatatcagcgcggggtccccacaacgccatggggcagagccaactctcgagcgcgtgatcgaagcccgcagttttttcgcccccgtcacttccgggtgcgacaatctcttctgtccggccagccgctggagtcgttaggtgccgccttgcttctgacgagccacacgtttgcttcttccctgtgttcccagctggagggacatgagtgtccctgggccgtcgtctccggacggggccctgacacggccaccctactgcctggaggccggggagccgacgcctggtacgtactatcgggtgggaagcgcggcccgggctgggtgtgaggggcggggacctgagtgagtagaactccggagaaaccctgggggagtaagcggtttttggcggctgcggcccccgggccctgccccgagtgcagaaatggggaaccgcgccggcccctctgcccagcgcaatgggcggaactgaagtcccgaggggaagctttgtattgggggtgcaattgaaggcggttgatggtgaagccattctgagtttatgtgttgactccggtacgtcattggttatttgtcatacggcagtggtgggggatggatttaccagaaagatgatcagcttataattcagagaggtgacgtatcctataatattgaccactcatgaaatgcttggtcagctcggtgatattacttcatccctattcctgcagcagtcttctcgaccgagttccaggagggatttaagctctaatgccctaaggcatccattgaatggaatgaattaacttgctgtgcacccaaaatggtactatttatgtaccatccttgggagaactgagaaaatggtcactcagagcattttctgtgttctgtggtttagatgaggccttagatgagaaaggctgcagggctccttggatatgctttttcttttacctcctgtttcagaaatataggggttacccccaaatagtgctctcagcactttcctgttcatgcttttcctcaaggatctcttcacactttcattaagtcgcttctataaatatgacttctttgtatgtatttgaaacttgggcccctctcttaactcttgtttacttctccatctgctagctggatactttgacgtggctgttttgcactaatctcacgtaaggcatgtacataaatgaaaacatgtctcatcctgttaatggtggtaggtcactctgacttgaaactttgaaattgctctggactttttcctctctctctccttccacctctaggggattctcctatacaattccatctccttgtaatttcacctttaaaacagctgttgaaaggctggttcacctccagtcttactctttcaacgcatctgtcccgctgctgtcacatcactgtcccaagataaagc

SEQ ID NO: 6659 - DNA, 6000 bp, Homo sapiens
tatcatgtcatggagagcttagattagttttgaaagcaatcccttgccacaaaagcactttctataatgtgcgaacgcaaggaatactatatgtgcattccaaatcaaagtaatcacagaagctgcagcaacctttgaaatttcaatacctctttttattttgaaacatgaaattctacgtcctaaattttattattcattaaaattcatacaaaatgttatttcatatcaactggatagtgagtggtgtgtgtatcagaattaatagacatatacacatagataagaaaatgaaggagatggaatggaacaaacatttattgcaaacctattgtgtagcatggacttttgcccttaatctcacatttaatgtgaggttggattaagtttcaaattcaattctgcaggattcccagattctgctgcctttggagaatctataaaagcattgtttaatatttattcagtgcttgctttgttccaggtcagatgctaaacactttacatgcattaccacattctgtttttataaaatcaatttgaatattattatcatcatccctgttttccagatgagaagactgaagcatgtgtggctaaataaattatcccaagtcacaagtctagtgagaggaggagcctgggtttcaatccagactaatattccaaagacttcattatcatctattgctattaactatgacctcactattattaactactattacaactaagtaaggggtagaattcaactcctacttgcttactactctgtgacattaggcaattcacttaaactctctaagcttcagttttctcatctataaaaatgataataataataatagtacttaccttgtagcattgttgcaagttaatatttgtaaaatgcttagaacagagtttgggtgcatattaagtactgatgttttgtttaataacagttaagaagttgtactttctgatgactgatgaacttttattaacaattacacacacagattttctgtaattttcagatgaccgttatgcttcaaactggactgtaaacaaaatgactactttccactgatgggaaatgtatgtagataatgtttaagcataatcactaaccatgtaaagcattgagccctttacaatttcttctggtgaaaacactcaattatctccattcatccataccttccttcttttactcatttaacaaacattctcatgccagtactttgctgagtcctggggacgcaggatgaataaatggagaaggatccaatctagagctgactgtattctctggtttagcacataagggagtgtgagaaagtcgtaggttccattgttagatctgtttaacaagtatttattgggcgtccattaaatgccaggcactgtggtgggcactgggactgtctaggtaaatagagattgctgctgttaaggagtgtcgagtggggaagacatgctaaatcggtaatttgccttcaatttacttaattacgtaagtgaactggttaggggagcacagaagaaaagcacttatgcccatggtaggggctagtgggatgaggcaagttttgacatttaaacaaattgttggctagaagtcaggaaaagcagaaattaaactacataccaatatggggatggagtacccagaaagcagagacaccatgaaacagtgtggcacagtggtgaaccgcaagtttctgggtaatgctagcatctaaagcataaggtagggagaggggggagttagactggagaagtagcaaagttaaaaggttaaaagtgtgtaaaatcaactgatgagaccaaatgctaataaaccacaacaatggtagctgcataaagagttagcagttttccttagacttctttccactaaaatccaaataaaaggagcgttgttttcctatcaagattcttggaaccagggaaatgataaatgcttaaaagtaatattttggtcttgaccaaaaggtaaaggataccattcgtaccatgccacagtgaagagcctacttcctacctctcatccccagcaagccaaatatagggatcgactccgaagtcttcactgataatgtagactgaaaacacggctaatccatggcttgaaacgacctaccagcatatccttctgcaatctaaaagtttattttttcctggatttaggaactcagtctagggcaaattgcactcttcaggtggcactctggaaagctgacgattgtggaattttagcaaggaatttaggaatctccagaatttaattttttttccctctttgctgctactgcagatgcaggacaactcaagagctttctgtctccaggtgggtggcgatttgactcctcatcaagccaatggccacccccttgcaatctttatgcaatgcacagtatcctctgcctgcaacgggggcttgctcccttgatggagaaaatacagaataactggacgccaggaaacaggcacagctttctgggtcagaagttggctggggaagggccctgactgccaagtaacttgcaatgatgtcagagcccagcacaaccagaaaacaccaactagccggccaacaaaagacctaataacaacaggaaaaaaatcacagagctgtgttgccaaagctgttctttccgccccctactcttttcttctaattggaagaacagcaggaaagagtctatattttaaaagactcctcatccttctctccccttctttccttgggttacacagtgttaactagggaggaaatagttctccggatgagtcctgcagcagttgcttggggtgtcttttttgagttccttttcaaggctgtccttggaagtttcagaaacaacgaggaccagggtatttttcctaaatgtaaacatgtaactgtgtttgggagaaagcaggaaccattgaggaaaggaagtcctttctgcgcccctctcttctctctttcacggtaattaaccatactcaaatgaaaattaagtttggcggaaaaagctctcttctttttctttaaacaggggcatcatggttcattctagccatttagagccctcagtgatccataattcaactggaaattaataaaacacagcccgttcttggaaatgaagtttgaattaaaatcctcttgttttggaatatgtgactttttttttcctttcatttgtgacagtcaattttaaatgatgtcacttcaaggacattttcatttctcccacaacatattacatgaaacacttgcctgtaaaaccgggtcattagcctgcaaaattatactgtacagaatggctttcattcaaagtagaaatgggatttttagtaggcaatttctgtattttataaagataaagcaatgtttgattgctttcttcccagctgttttgcttagtggttataaagagaaatggggggcgggggggtaatgtgggggcgggtttgtaaagatgtgcttaaaaaataaatcttacactggaaaactaaggcagaacttcacggaacaactgcgcccgcagctctcctgggctgcagtgatttgtcctctgggttctggaggaaagctctgaaagaagtgagcgagagggaaagagggagggaatcgaaaaggttgcttcgcaggctgcagcacccactgcgagctggatgactgaggcactgggagttgctagaaggagcagctactcagaggtggggagagggagggtgcgcagcagagcgccggagaggagggacgcggaggccaccgaggggtcagcagggccgcggcgccagggtgggggcctccaggcggcgctggccacggttcacccgcgagggcgagcgcgcccggccggccgcgcctcctgccgtccgtgcccgggggtgggacccgcgccgggagctgccgagtgcgtggagggagccaggctccggctcgcctgatggattgacttggagatggatcgaattacaccatttgccgtgcatcggtttgttttgctcctgctctgtcccgctgctgctgctgctgctgcaaggggtggtggcgagtttcaggattctatcaaggaagccaagacctaaggagacagagggatatctatttttacaatatttttctttattttctttcttccttgcgcgtggcaagcttttttttttctttttcttttttcttaccagcctccccccaatgaggtaagaccgttttcaacaatttgctaatgctcttgtggcgcccggtgggggtcggaacctgagatcccgaatcgctgtgtgtgtgtgtgtgtgtgtgtgtgtgcgcgcggtgggggtcggaacctgagatcccgaatcgctgtgtgtgtgtgtgtgtgtgtgtgtgtgtgtgtgtgtgtgtgtgtgttgccactggacagttgatttattttccaagctgctctctctgcctgccgtgcaagggacgcgcaaagggctagagaggtttggcggacgcgtcaaaactggcaaagctggcggcttagggggaggggcaagtggacttggaggccctcctccactgtgcacccccttggaaaaaaagcggagggggcatcaagtaaaagtttcttgccaggcagagccagctcggcgtcccccgcacatagctggggttagcaggggttgcttctctgccgggcacagcgtctccaggagccagccggggagagctgagccaaggccgaaggagccgcctgcgggcttagccgccccctcccgcccgttggccccagagcggacgctgggacgcccggggtctggcagctctgcgcccggctaggagcgggcgggcgagcattagcctgcgtcctggagaaggggcgcagcgccgcagttgaggccggagcagcccctcgcgggcgtaggatacctgtcagtgagcgcccggattgcacggcccccgggtagtgcctgccggcgaggggcgggagctcgggtgacttggccatccccatccccggcccaggcccggagggcggccgcttcccaccgtccctctccccttactggcagagcgcgctgcgggcggactcccgggcccggagcagcccaccggccaccccaccgcccacccggctcccggtgtctcctcccggccgctctacccagcaactttccgtgctttgttccccgactggaaatgctttacggaagcgtcttggacagggtctccgccaggcgacaagagctcggtgctgagatgtgttacgttctcatctccccatcaattatggatggaaacaaataaggaagagtcaattttgctgagccccttctccggcaacgagaggcgttctgcagccgggagggagccgccgctcgcgccggcagccgctggcaggggcatggtgaggaggaaggtagggaaacttttatttcccgtcttgacagcggcggtgtttgtccctggtctgcagaaactgatacagtagcctccttccttgggtaatttaggagggcttgaagcttcttctgtcatgtgtaattcttggattgaaatgaaaggtcataaaggacttggaagtgtgcacgagaattgggtttgaaaaatttgtgctccatccactcttgggaccattgctgtcaggtgattgtttaaatcctgaacttgttaaaaggcgaaatgtcagggagctggcgggggtgggggtgtggagggggattgaagtcccggtatgaatcgcagcgtttgaggaacttagggcagtactccctgttctggggtgaccattcggtaactgatgttccagcatcccgagccctcagcgccgtcagctggatgatctcacagggaaggcgcagcacatcgttactatagatatatagacttcgtcaacagtcattggaccttatgtctgccactacagcgggggctttcctttaaaaataactgtagtgtttcctgttacttggggtgaaagggcaatgagtaggacgatttttccccaaaacttctggcggtaagaattttaagtctgtaataaaaattatggg

SEQ ID NO: 6660 - DNA, 6000 bp, Homo sapiens
ttgacctacaatgacccacactatgatatattctagtaaaattattgaagtttaagagaaaaaaaggtcctttgggtatctagaaaaaaaagagcaagtggcttgtaaaagaatacaaattagataattattgacttgtcaataacaatgttttatggtagaagaaaacagagtaacatatttaagatatccaaaggaaaaaatgcaagccaatgattttacatccagcagagctgactttcaagtatagagatcattgacaaattgttaccaacatgatagaattcaagcaatattgttcccaaaggtccttcccagcaatctactgaaaataagttgcaggtatcaaaatatctagagaaacaacagcctaaggactgatggcaagcattaaacacatagttacttgtagaaccaggcaaaatgtgggttaaaagggagaaacagtagatttaatgactgtaagctgtggcaatgtagacagactatagttcttaaaagaatagagggagaatggaagagcatatgcacaaatgtttaactcttctcagtatttatattgggggtagtagtaacaatattgttattttgcactggtatacaggtaaagtggtaccattacctataattataggtaaatgattttataattataaaatcataaattataaaattttgggtattcctattttgtcatctcctgtgttcttgggaaccataacctgtggtatgaaagaaaggggacacagagttagtatagaaaaagttcagattaaaataaaaagttgtcatcatgaatttgaatgctaagtatcagtattaactcatgatgtattttgaggtaggaatgtgtgtgtgtgtgtgtgcctgtgtgtgtgtgtgtctgtgtgtccgtgtgtgtgtcagagagagagagactgagatttagaaacgatgaccaacccagttgcagtgagcccctctaacaacccagattcttagatcacagtcttgaaatagaatccactttaaaaaaataaggattttggagaaatgggtgatttcatatataagatgagcctggtacatctttttatactaggtagtgaggaagctatcaaagatgattaagatcatgtcaaagatgctcagaaatcgtgctgaaggggctcccactggttaacgatgagacaatttgagcttcaacatgggtaataattgcaattgattggaactcatcaaatatatttaaatagattaattcataataacttaatctaattggttatttatggaggaaaatagggaaccaatttattgttttgaaaacctataaataaagagaaagaatcagaaactgggtacccctgggtattcaaagagtagatgatcaaaatcatctctttgtaagatattccgactgatgaatgaagaataaattagaattagaatgccatctgtgatggttaatactgagtgtcaatttgattgaattgaaggatacaaagtattgatcctgggcgtgtctgtgagggtgttgccaaaggagaataatatttatttgagtcagtgggctgggaaaggaagacctacccttaatctgggtgggcaccatctaatcagctgccagtgaatataaagcaggcagaaaagcatgaaaaggctagactggcttagcctcccagactacatctttctcaggtgctcgctgctttctgccctcaaacattggactccaagttcttcagctttgggacttggactggcttccttgctcctcagcttgcagatggcctgttgtgggaccttgcgatcatgtgagttaatactacttaataaactacatacatatatatatatatatatatatatgttatagatatagatatatagatatatatcctactagttctgtccctctagagaaccctgagtaatacaccaccctttcccaactcccaaagaattaatgggagttaattaatgggagtgatgagcatgagtggctgctgctcacattacaaaagagagatgagcagacacagtgtgcttcctgtaaacaaacacgccaccacctatagccttgccagagggataggactgagtctgatcaagcctctgcatccagctgccactttacaaaaatgcagaaaacaggaacatattgaactatatcacaaggacacgtcatcaaaatcaaaactgtaggaaactctacagatcaaatgccctgggcttttcccagagacaagttataagaaacagaagagaaaaaaaaggtaggactatagactaaaagaaagttaaaagatacctttttaaggcaaaattaagttatagcatcataaagatgcactggattacatcacggactattaaaactacacacatgaggaaatgattacaagtcaggagagtggttactttcagagaaagggaggagaggagactgaggctcacaaaggggcttctaggggggctggcaaacttatttatttacttatttttattatactttaagttctagggtacatgtgcacaacacgcaggtttgttacatatgtatacatgtgccatgttggtgtgctgcacccattaactcgtcatttacattaggtatatctcctaatgctatccctcccccctccccccaccccacaacagtccccagtgtgtgatgttccccttcctgtgtccatgtgttctcattgttcagttcccacctatgagggagaacatgcggtgtttggttttttgtccttgcgatagtttgctgagaatgatggtttccagcttcatccatgtctctacaaaggacatgaactcatccttttttatggctgcatagtattccatggtgtatatgtgggtggctggcaaatttctatttcttgaccttggatgtttacaagggtgttcatcttatgaaaataataataatatagtaaactattcatgtatgtagttttatctgggtgttattttacaagaaaaagatctttaagatgcttttgcaaaatgaagaatgtgtgtgaagcaaatctaattcatctcctaaaatctcttttcgtggtaaatccatatttagatggtaatttgtttagaccaagcatatgcatgttctggcaatgtgttttcaagaccattcattgcaaagtaatcgatctgcaaatgttgatggagtactaactatgtgcaaggcacttctgctgttccatagcaattggctcgtaccttcagacacttgctctctctcttgaattagctgacaatgtgcattggaagctttcactttgggtttgagctttttatattattggtattttatttgtttatgatgttttatgaattgattgaagtactgtgtgttgaagaggagaggctcgcaagacacttccactcagcataaaactaaacgacctcttcccttagtcttagctagctggcatgtaggccactccccagtgatcagggtgctgcttcctgcgagtgtagacagctggaactctgcttgttgagaatctgctctatactgggctatgctttggtgactcatcatcacagcctcacaatcacaccatacatctgaatatctagttcctagaaatgacagttttggagaggtttataatggataccaattcccacaaaaaaaagtagtttttgagactttcttccgacccaagatcacaaacatcaggaagcaacttactccgttccatcagataaagctagtttctaaatagaaaacttactaggcatatcaatttttgtgttttttctgcaaagcaaaggaaccatgaaagttgcaaaactacaaaaatttttatgaacaaaaacgcttctatttcaattgaaagaaagaaagagaaagaaaaagaaagaaagaaagaaagaaagaaagaaagaaagaaagaaaaagaaaagaaaagaaaggaagaaagaaagaaggaacgaaggaaaggaaggaaggagggaaggaaggaaggagagaaagaggaggaggagaagaaaggaaggaaggaaggaaggaaggaagggaggaaggaaggaaaacaaacaaaacaaagaaaaagaaaggaaggaatgaagacgtcagccagaggtcgttctgagcaaattatttgcgttcatttttgtaattcttaccacaacccaaatacaggtgatccctgttttacagatagcagaactgtgtagcagaaaggttaaataacatgccaaaagtcacataactagtaagtagcagtgctagggctcaaatcatgtggtctggttccatagcctgtgctattagctataggttactacactgccaaaagttctaaatatcttggcaagcctcataaatgttagcatagggaagatagtagtctatatttaaacactaccttgtacgtcaaatttgcattttagatagctccctctggcagaaagcacagcctatcaatgatcaaatagcatccactccatctcaataattcttgaaactgtcagctactctccatccccgttgccacagccttggttcaagccactatcatttctcagctagacgattgcaatgatgccctaactggcctttctccctttggccctaactgaagatgaagatgagaggctaaaacagaaatatgaaaggatgccgagctagccaaagcatgtacatatattaatatcaacccaaacaacttctaggggaaagggctggagagagatgggaagcagttgcaaacccaactttttacaaatctagagaaagtcaaaagcagagccagtatgaagacattaaataaaaccacacattttcataaagtacaagctgccttaatctgcccttagagactgtaggccatggaaatagctatagacaatggttgtcagctctcctccgtctcctccggcctccctggagattgggtctcctgatcagagaagcttgactggctacactcgccctttctcctgtgctggccttgctgagatgtgccctgggcagggtattgggcaggaaggagactcctcacatgatccagtttaatcctcctcttctcccttcctgaagctgcacgctgcagtaagagcacagcagaaatgcagacaaaagggggccaaacatgggcgagaagggctctgttgctcggcatcctgtgggccactgcacatctgcctctctcagggacctccctgccccaacgtctcccaagggccacaggtaggtggacattggggtcagttagctctgcagcagcagctgctgctgctgctaccacatacagatgaagggacaaaaagaggaaaattctcaatgggctcacttttacttacgcttctgaattttagcatttaaaaagatatcaaacacttttgatccttcaaataagttcttaaatatactccaaagtaattcacagagatcatagtaggccaagtctccagtttttgttcttggagactttttggtgaaaacaaaaaatctttcatcttagaaattctctctgcaacagtggatggattctttgcaggcctgtgaacaatttaggctctgcaatgagaaaacgaaattgtataaacaatagaaatcttcatgtatcagagatacagtttctacttggggaagagagattcagaaataaaaacaaggaggagtgatttcatgatttcctctttttaattcttcaccatcatcaacatatttcattaagatatctcttttcagtcccccaaaaaaattttttgaaaactctacaactgtgttatattcagaagcgctttatacattttcagtgggtccttaaaattccacccggttaccccacacttacagatttcttaaggaagctctctgtgggcttggaatgtgtgactccaaactcttcaaactttcacctccttttccttaacaggaaatagcacccaatgtgttatttctccatcatcggagtttcccgaagggtttttcacgagacaggagcgcagagatggaggcatcataatctatttcctaattatcgtttacat

SEQ ID NO: 6661 - DNA, 6000 bp, Homo sapiens
gagtagtacctactgtggcaactcttcagctaagatgagtgtcaacgaagtatcagctttctcattgactctggagcaaaaaactggctttgcttttgttgggattttgtgtatcttcttgggacttcttattatccgatgcttcaaaatcctgctagacccatatagtagcatgccttcctctacatgggaagatgaagttgaagagtttgataaagggacatttgaatatgcactcgcgtgagagttccagctatatggtttttatggttgtgccatcgggacacattctggatacaattgtaactaccttgagggtgtgggagagaggctcattttgttcagtgaattcaataaacatctgtgactaatttcttcaccatgctgtgtaaatgataaactattgttgggattcctcactttcctctgttcccacttagaggtttccaatgaatagagcataaggatggctgccgccatgtttaccatctttattcttatcttgaacaactgccttgaatttctgcttcctttcttgtgctaataaactgtgccaaaggcatcttgctctctcccctctgaaaagcccaggcatcccctccacattcctgactcagacccctttagctttagtgagtcaggtcttaaacagagaatttagtccaaagaataatcaaaatattatttgtctaataataaccataggcccaaaaggttcacaggtgaaaaaatatctcaaaaatctaacacccaaagcctacaagtagtcacaggccctaaagctccccaaatttcacagagccctgaccctcctatctcttctgtttgtcgaatctcttgcagtaaaatcccatagcttggaatccaaaccagatctgcctcatactgatgctccctcccctaccccttgcataaatagaatttaaaagggagtttccagcatgacctagtggaaagagtactctaagcagaaacaaagacagtctcagctgtgccaccagtagagctatgctctaatgggtaagtcatctaatctctgtgagcttcagtgaagagtagtgttaacatccttttcaattctagtgccctatgaatgctacaaatgtatctgaaaacccagagatctgaaatgaatgaggatttaagatatcatgaaaagtttttcagattaggagcctaaactcagagatttgaattctaatgttagcttagccaagaactagctttatgacctagaaagttacctaaagggaacctatattgcacaacaagaattaagaaacccatcctgcatgtcttcagcaatattgagagggccaattagatataatgaatgtgaaagcattttgtaaaccataaaacagtatctaaacataccttgctatcaatatttattgtcctcatcagtagcagtaatagagattctcaaaccctaagaagcaatggcttagtgtaaattattcaatctctctagtatttcattctcttcaattgagaaataaaaagataaaattatatagttctaaattctttccaactacaaacttctgactctctatgagtcagaatggaggaacatagcaggagataaatacaaaaatatttatgtcctttgaaaacacagaactgcaaaacataccatgaaggaacaagactaatattaccaagaggtagcactaagttagttactttcaatttatttgatactcttataaattctttgagttggagactactatttccattttatttttaatcttaattttgcagaagagaaactgaagctaagagaaattaactagcttcccaaggtcaccatagctagggaatggttatgttagggattgaacttgggcagtttgatttctgctgtatccctagacactgtcctcaacacttctacatagcttataggcatggttactgctcaggtctatggaattccaaaaccagctgtctctgtgagattccttgatgctttccatctcataatagatttagaacatatctgttattagctatggatcttctggaccaaatcctcacctcaaggaggctctctgtaccccagttggttcaagagtgtaggcctggtacacctcatagccagttagtaacttggcccaagaacaggccactgggccaagttcaactgaacatactgaaaattgtgtgtgccaggaaactaggtctctttgttgaccaaggcttttaaagtaccagatgtttcatttgtctcccagagaagacacccaccaagaccctccattttgatgactagaacaaaccaaggccagatctttatttcaaaggaagaaagacctctacaaccaagaaaactttatgaaatatgagcattgtttctggaagttcaactcccataagcttttcaagtatattaactctaccataatattatttccaaatccactaaagaaaaattctattaaccaaaagtgtcttcatctgtggtttttatttgtggtctattgggtgccttagtttttttggggggtggggtggtttgggggatagaaaagtcagtatctgtattttcagaaacagaaagaatataaaaaatataaaaggctggttacaacatgaaaacaacatggaaatttcatgaaatgttaattcttctaggaatagatgttcagtgtcacagttggatcagcctctagcttccccttcccaaaagccttgtcagagaggacagaggaaagatagaggagcatacctcaagatagcttgctcctgttacctttcccgcttgtctgaaaggcctaaatcggattcacctttcaaggttggctttatggatggtgttatttcatccatatcccccaaaactgtctcccatttgttccaggatgcctgaatccccttaaaagagaacaaagactttcatttcacagtgagagataaaaggcttagaatgaaaatgtctggttgatataagaccaagactaaaacaaattcataccactctgaagtcaggcagtcagtcagcaagaaaaaggaaattgactggtatcagaggtattcacagtcattggtagaggaaaaaggttgtagagtaaataagtggctccaaaaagggttggaggatgccagcttatggctcctgtcctggtctggtgaatagaacttattttgggtgccagccccatcctagctgttctttgtcttgatctaaacaaccagccccacccagctgaatttgaaatcggacactcctatgccaaaacactttctatatgaggaatcagaaccctttgttgaacagataaatgccttgtactggtgacctttaagagtggaatgagttataggtatatacttgtaattctgtctctatttctgatatagcctcacgacattagcctgactgattagcatgacatttacttaacgaagaggatctaaagggttttacttaggtgtctctagacacttctataatcctgtatcagttcactaacttacctttacacttattttttatagacaaaatatctatcccaatctctaatgattcacctcacaatcttgtatgtgctaagtaaaaatccccagctaattgtaaatagcgctaaaatagtgaaagcaagcactaggtacaaattgttgctgttctaaaccccatacacaaactaactcatttattcctcaaaataactctacaacaaggtaggtacaattataatccacaactgcatttgcagatgagaaaattaaggcacagaaagattgagtaacttgactgagttcacacagacagcaagtggcagggccacgacataagttgggccttctgacttgagtcttgctcctagccactatattacaccacaaccgagctactcagacaactggaaatcacttaaatcgtttcttataagaaacaaagaggactcattcaatcatcctgattgataatcagtgacagacttgagggaggaattgtttgcagtgttaataatcacctacttgcagatctgaaaaagaaaaaccttttcctcaacaaaactcaaaaactgagttggacaaaaaaatgtttttctagttggagacagaaaggtcatttagtagtgccactgagatgcttacccacagtttggttcctgcttaaaacagttttccctgctgggcgcggtggctcacacctgtaatcttgacactttgggaggctgtgccgggcagattacctgaggtctggagttcaagatcagcctggtcaacctggtgaaaccccatctctactaaaattacaaaaaaatttagccaggcgtggtggtgggcgcctgtaatcccagctactcaggtggccgaggcaggagaatcacttgaacctgggagacagaagttgcagtgagctgagattgcaccagtgcactgcaacctgggcaacagagcgagactccatctcaaaaaaaaaaaattttcccatatttcccaaaatagaaatattttcaataaatcattgattccactcttaatctgcttacttcccatgcaaaagagtcaaggtaatgtctactacaagcaagataaaatcatttcagacactactttctagttacagagtatagaaattgtctctggagaactatattttgatacacatgctaaacaataggaggtcactaggactcatctgtaagacggtggaactcaatttatctattcccaaatgactaatggcaatgctcatattttttggacaattgctgttaagggatccaattctccttatgaattaaagaaactctatgttacttcctgtctaaaaggattaatggtttactactagttaccagttgatgtggtacttaagtttcctcagggctaatgacctggtggggcttacagtactattccaggccaatcattgcacagtcatctctttcaagaaagtttctaaccaataagcagaagcctaactttctggctgaaagctaagtgtcccatatattcctgggtgacgctgaagcaggttacatttcctcagaagaaggctccttggtggtaagttgaacatttctgggcagggtaaaaatcatacttaatattatgtcataaagtagattctgaggagtaggtgagggtgtcaaggactatgaagagaagtgttttgtaaaaactaaaacgataatagcttcatttataatttccccaggaaaggttacttgagaaatgaagttgagggtttttttaattcaaatacacagctttaataactgcatgagagagacaagtttttatttatatttatctcatttttctagaacttcccttgaaaagccaaattttaaggtatcaataaggaaatataattctaaagcaagtgttttaagacaggccagtactatgaaattgcgaaaattattgtgaagtctattcacctcacagtcaaatataaacctctcaattattgaagacatttcattaaaatgagtcagtagagcatgattattttacctaaacatagcagaggacttttttaaggtatatgacttatttcttatagatatatgacttatttctatattcatatttttttaaggtttcatgttagtatttgcaaaacaaacaaatgtatgagcaaatgaaacatttggatcttgtaaaagatctaagaattcacagagacatcatcttgatgggatgtattttttaaatgcatattctaaaacataattttttacttgttgcataggtaacaaaatttggaatttataagttgaacatgtacagatttttataaactagcaagaatatattttttagaagttttgtttttcattttatatgttgtatagtatatattcctaacaatcaaaatactttgcagtttcagcatttagtactgtcagtgaactgtgtcttaggctgagaatattctcatcagctcttactgtattcaataagtaaagttacatcttttctaaagtcacagtgaactccagtgcactgaattcaagcaaatactacaaacac

SEQ ID NO: 6662 - DNA, 6000 bp, Homo sapiens
tccaggaaattgaattctagttacgaaggcaaaactaacaggtaagaaacaatcaaaagcccacctatgcgatgggtttataagttcagtacaagggctggatcagcatgggctggaagatttaaaggaaaatgtttgggaatactttttttcacatgaactctacatggaagtgtaaaacaagtatatgagctgttttgattggagctagggtaggatcctcccagagcccctttcccactctatgcaatgaactctcctcagtaacttctcagccactagggctctaccgagtagtttggaagccaatggactaaatcagtagttctcaaagtatagtccctggactagcagtgtcagcaatacctggtaacttcttagagatgtgaattctttgaatcagaaattttggagatggggcttaataaactatattttagcatgttccccaggtgattctcagacttgtaaagtttgagaaatagtgaactacttcatctccataaagtaggaagggacgccacctgctttaaaagaacatttgagattgggattggaaactttgaagggggtagggaaggtctgggactgccaataggaagccttctctcaaatagcagagatagatgatagggatgaacgtcctgaccaaggctagaaggtgtcagtatgcacacccagtaatcctgtcttgcccctaaacttctcctgcaatacctagaataggacagaagacagtgggcatttgaggtcatctatacctggatagaaagtttaaggaaaagaggggtctaggaggccacgttgaagtgactggccaggaagggaccgaaatcttgatagaggaaatgaataggctcagtaatgtcagagaatgggagaagtggaatgaggaggcttaactaagcctatggggacggagaatctccatgtctgagatctcagtgctgacaaaatcctaaattacatcaaagtccaagatctggctctatttcatatttccctgtggaatttatgttactgaatagacaaacttgtataaaaacaatttctatatggtataaaaacccagacaaaagttgcagttttctacattcaaaaatatttttaatgtttttatttttatctgtttgtgagaatttgtaagattattttgttttgtttttcatatgagatggggtctcactgtgttgcccagtccagtcttgaactcctggcctcaagtgatcctcctgcctcagtctcccgagtagctggaattacaggtgcatgcccccacacttggataatttctgtactttttatgtgttggtgtaacattgtcttcgtcttttcttggaaagggctatatgtttattgttactgtctttaaaattgtggtaaaatatgcataacataaaaattaactattttaaccatttttaagtgtacagttcaggtatacttttttagtgccaaaaatgtcattcttctataaaataacaaatatactgtgatgggggagggggttgttcttactagaaaaattaagaagtcgttacttattttgagtccctaacttggtttcgaaatataacacgggactaagaaattcaggaatcaaacaactactgccctaaaggagagttgagatttacagggttaggatggtcaggggtggaaagtggtaagaacaagccagtagaaagaggaaggtgcagggcatttttaggagtgtgcagaccagacttgctaaaaacaaagtgcgcttgaaaaggaacagttagaattaagttttggtccattttaaaatatttaatacctaataatgtttggttcatagcagaaactcaataaatatttgtcaattgagtgtagtgaaagcttgagtgagattcagaagagccagaaaataaagtttaaatttcattttatagaccagaggttcccaagagatgtaccaagaatgggcagccaacgtgctaagctatcgatcacctttcaaaggagtcaggcagaagccagggcatctggtcaactctaggccaggtatgttctagtatgctgtacaagtacaactgtctatagatgtcattggtggaagacaataggaagcaatggggaaccactaaagataattgagcagtggagatataagatggcagcaatatttccaggaagactattgctgtggttttaatgttcatgtcccctacaaaattcatatattgaaatcctaaccctcaatgtgatggtattaggaggtagagcctttggggagtaatttgatcatagggcagagccctcatgaatgggattagtgccctcataaaacaggccccagagaggtaatttgtcccttctaccaaacagtacacagtgagaaggcaccatctgtgagaaagtagcccttcaccaaacaccacatctgctggcaccttgatcttagacttgcctccagaagtctgagaaataaatttctgttgtttataaactacccagcttacagtattttgttatagcagcccaaacagactaagacatctattaacctcgtgataaagcaagagctggatcccaggctcaaagctggaatcactgggactcccaaggtatatattatagacatttgaaaattacttccccaaatttactctccctaaccccactttttaataataccgtaaaacgttccacaaaatggcctaggtgaaattgattatactctcacccccatgggtgagcgctgattggcttaaaacaactagcacctttttccccaggacccacagacattggttcagaaatgggcgcataatccagtcagggatttttttttttatgagaactcctaagaaaaagattcctgtacttctctctgaagttgagccagaaagcatgtacccctaagggctgttggcagccatctttggacaaaaaccagagagcctgaatgagaacagaggaggtgcagaggagaaatagtgaaagcaaaactagatccaggtgtcagcatttaaaatccttgatgtcttagccccggactctccagttactacttaaattcctgtttctgcttcagctagcttgggtcttgttttcttttacttgtaactgaggttaaagtgatcctcagaataagaggggaaaaagtggacccttgtggtaatctagcactctgggtagacagtagctgttcaaggaaaagagaagaggggtgcaggtggctacacagaagcgattagccatcaagggacgagggtggcattgggatgaaaaaggaagggctggctctgagcttcaccatgaaagaagtgcacatgagaatggtttctgtcgggccctcactttggttaattctactgctttctcctcagggatgatgaaggcccccagctcatccccagggaaatgatgcaaccaggtagctggatcagaaatgaaaaagtcaggaaaagggaaaggttgcttgcgcagttactagggatacgaaaaggaggctaaaaaacggcagggggtggcctggagggaatgtgaaacatttttgtgtgttttacacacaccgaaaaaaaaagaggacatggacagaaacctagagaataggaggacagcatagtatagttactaagaataagctaagagttggttccccgggaccaaacagataccatttccaaaacccacgaattacttaccggctgtctcaattcacctaagcttccctttcttgtctgtaaatgagcatgaaagtgccacctgtataaaataactcaggctcccaaaatgtaacatagggaagctcctagcagcgtgtctgggaggaataagcattatctgtatttatcgtatcaaattaagatagaggaacacaggaggacagtagaggatgaaaataaaacactacttagatcctgaccctcctcagtggcaagtagtgagcattcacttcgtacagaagtagcactaaggcaaattaaaagaaaggttcacatttcctctaaaagaaatggtttttgagtcatgccaataccacttactcaatgtcctctgtactatactattctctgacagagccacttattaaatgtgtgaactgtgctgacaacacttgacaactttcaacatgagggaacagcaggatcacttaacagaacaaaatcgtaaaataatgtcaaagcttgatttcaggtggtgcggtgtagcactgctcttcacgaaatcaggactcccccgaccaggcagggccgactaggttagagtgtcctgccctcactcacctggcagggcttgggatgagctggacgtgactgccacaggcatttctgttcaaccttgaagccttcgctacaggagaccgcctggcagtcgggctgggaagcaaatctgagaaacaaagagagaccaggcggaaagcccttgggaccaggaaggagagatgagattctggtttggcagtggcacctggtacccgctattaataaataataggactgtctgacatttataaggcactttatcggtaataacagtgtcatctccataagccattctattagtggtaacaaataatagccccacgcctgcaatatctcctttaatattcccaacgtccgctaagcgcgtctcatcaccatttaaagaaaccgtggctcctagaggtaaagtacttcggtcacaacgcgaggaggtccagacttgaccccagacctccagactcgagctgggaagtggccgaggctcctggtgagccgcagggcagcctgcccagccccgggaggaccgcgtgggagggccgggagagcaggtggctgccccccacaagggggcgggctcagccggccagtcctgcccggaacccccggcaacgcgcatacgactacacctgctccggagcccgcggcggtacctgcagcggaggagctctgtcttccccttcatctcacgcgagcccggcgtcccgccgcgtgcgccccggcgcagcccgccagtccgcccggagcccgcccagtcgccgcgctgcacgcccggggtgaaccctctgccctcgctgggacagagggccccgcagccgtcatgctttccgccatctacacagtcctggcgggactgctgttcctgccgctcctggtgaacctctgctgcccatacttcttccaggacataggctacttcttgaaggtggccgccgtgggccggagggtgcgcagctacgggaagcggcggccggcgcgcaccatcctgcgggcgttcctggagaaagcgcgccagacgccacacaagccttttctgctcttccgcgacgagactctcacctacgcgcaggtggaccggcgcagcaatcaagtggcccgggcgctgcacgaccacctcggcctgcgccagggagactgcgtggcgctccttatgggtaacgagccggcctacgtgtggctgtggctggggctggtgaagctgggctgtgccatggcgtgcctcaattacaacatccgcgcgaagtccctgctgcactgcttccagtgctgcggggcgaaggtgctgctggtgtcgccaggtgagccccgaggatcgccctgccctggcaccagggcttctcggcgccttgactgacgagccacagcgtggcataaggggttcgcagagggaggttcagatcggaactgtaggtatagaaaaaggttggcagtgtttccttgaatcgcaaataatgatcttttaggaccacctgttgtggaagctgataatgtgctaggttctgtgttaagcactctacaggcagtgtggtttttaatcctcacaatgggtaggctttgttataggacttttatagatgagaccactgaggtcctgagaggtgaagcctcatgcccagccatctatctccaaattccaagctcttaatcaatacttataacatctgcattaaaatgcagaggatcttgagtgcgaactctagtggatccagaggggctcttctcacctctgctgcttgactggctgtgtgatcatgggaaagtcacttct

SEQ ID NO: 6663 - DNA, 6000 bp, Homo sapiens; identical to SEQ ID NO: 3259

SEQ ID NO: 6664 - DNA, 6000 bp, Homo sapiens
tggaaacaaccaattgcctatcaaaaggagtttgtttaatttatggcacatttgtacaagggaatattacacagtcattagaaagatgaagtttacattggcatagaaggctaaacagcaaattttaagtgggaaaaatatccagtaaatgtagtataaccctatttttcgagtgaagaaaagaatagatacttatatattattagatctactgaaacaaactcttcttcttttttcttttttttttttctttttgagacagtctcgctgtgacacccaggctggagtgcaatggtgcgatcgcgatctcggctcactgcaacctccgcctcctgggttcaagtgattctcctgcctcagcctcctgagtatctgggattacaggcatgcgccatcatgcccggctaatctttgtattttctgtagagacagggttccaccatgttggccatgctggtctcgaatgcctgaccttgggtgatccacccgccttggtctcccaaagtgctgggattacaggcgtaagtcaccatgcccagcctactgaaacaaattctgccgatattccaaccttttaataatggttatctctgacgacagggattataagaaattttaacattttaatttaaatacttctaatttttttcagtgtaatatgattttacactcatgggaaaaaggttatttcttcctcaggtggaaaagaaaaaagtgaaggagatattaacagacaaaatggtaatttggagtgaaacaactttgaggaatgtttttcagtattagagagacctgtgtttgttttggtcctggggtggtgggagaaagccagtgttggaaagagactgagagtgaagggaatgttgattggcctgggttccagaggggctggaatagaacattaacatgggccaaacggtaggaataaggaaaggaaaagaggataacatatataaaactaaggcaatttttttaggagtaagggcataaaaggacttacagtcaatgaaacctatgctttcccagtggatttggagaaaaaagtaatcatctgagtgggagggttgggactgtgagctggaggcatagaagagtatgtggttgctgctgggcaaagaatcggctctgaattatcaagtatgcttgtgagattcctgggctccatcccagatctacagaatcagtctctgagggaagctgattttagtgcatgctaaaatctggaaacttggaaataaaaggttaactaagaacatggggccactgctgatgctatatcacaattatctgcaatagcgttaatcaatacatttatgattttcttcagcaacatttagcagccagggaagagaaagtctgagaaaaaaaaaatggatggttaggcatacccagagttgggctttggcaacatgggtgtagaagaaaatcactgggtcaatggaacctgagatgctgggaagcgcttcattaacgtgggtaatcatgaggtaataattaggtggaaaggaaggctttgagggactggaatttagaattaggaggtgtaggggaagtgaggtcagggtgtgagaggcggttatacttataaacaccaggcttctatcttgggattgcgtgagtgtaggcaaagatggttacccaaggcaaaagtagataaacacagaatagaatgttggggagaagagaagataggaaggggcagagccaagggaactattaataaaagaacagcatatgccagccctggagaatcagtatggcagtgcatccaggaaagctcatcagctttagaaccattgacagcagtcaccatactcattctttcctctgcatgttggcaaatgcagagttagctctcagatgttcctatggtgacagcagaaattttggttcagtatcttgcttacaactctattctactctatggtgtattcattcagacatcttagtcacttagactattaattccttaataatagagatctggttttgttttttcatttttaaattcccactgcttaatgctgtgcctgacacatggtacatattcaatgaaaactttttctgagtgaatgaaatttaaaagcttcctcatgcttccagttagaactttggagtcagggtattttgacaaaggctccctcccagatggaataaaggaggaatactattcattgcttaccttcttaagatgcttttgaacattttgttaggtggctggaacattttgttcagtgaatattttgtatgagtaagctatgtttgatgatgagctgttcgtggtgatggaggtgagaagtgtgactgtcaattgaaggtagtaaaacagaaataataaagattccatcctcctctacctaagcatgaaatgttccatatcaaactctcagttctcttcaaactctctccctagggagcctctttactccaggctccagttatcaccactatgagcacacagacattccttcctcatctggacccatatcacttcctaacttacatcgctcagaagcctctgaggctcagttttgcacaagcagaattaatgatcttccactgcacttctggtcctcttccaggatttcctctcccagggctcagcagcaccttccccagcaagttaggaactcaggaaccaacttttctcagtctcttttcctcatctcccacatctaatccatgaaattcttccaattttaagatataaagaactcttggatccctccatttctccactgtcaaactaccacccaattctggaattctgtaatacccccaaatgtatctgcctatgaccattccaagccccctccaatcccctctccacctcacagctcggaggatcttttcaaaactctaatctgatcatgtcgtatttctgcttaaaccaccttaatgacttacacttttagccctaactaccacttacaaggcctagtaaggtctgacccttgcccacacctcagggctcattttgcatgctgtactccttcactctctctggggccaaccacagtaaatttctctcattctttgagaggcatcatgctgtcccctaccccttacccccaaagccaccaaggactttgtacatgcactttcttccccacttcatgtagttaatcccatgcttctttctgatctcagtccacacatgacttccttggagaagccatcagagatctctccaacaaagtcaaatccttttgctatatttgcttatggaaatatggcccccatctttgcagcatacatctcagttgtgattttgtatttatgtgtgtgggattatttcacttacatctgtctgcttcactagactctaggctctgtgaaggacaagaaccctatgtgctcttgttaagtgcagtgcttggcacataatgagtgtgcagtaaatagttgttagatgagtgaatgggaagaccagagaacgctcttgcatgttattagctgtagtcacagtaagaaagtcctgtttctctggtccatccactgggacttggtaatggtgtggtcataggtaactcttctagacaatggtatttatgataacttcatcaggaattaaagccaaagtgctgaggttttgtcctggttctgcagtagtgtggcctcaggcaggttataactttttaaagtctaaattctaaatgtcacctacagatgagaagtctccttctgcctttggcctctcaccagctgctttctccatgtcctctcctccctccctttttgcaaagctaggggagggcctgatgcagagctggcttccctgtgggaggactggaaggaaccacacagcatggatactaattccatgagtccacattggtaatcagaaactaggcctgccttgctatttagaaactaatgctatattctatttcttcagataagccagttttgaaaaacaaggcttgaatatttggcaggacaaggagctactcccaaacacagtttcttgccagcaaggatgtcaatttatcaaattgaaagggtataacctaggagcctcggttaggtgtactggctccctttctcgtttgattagaatgacatacacgctaattgatctctttccggctcagtcatctccatgcagtaaagaatttcaagctgctattgtttatttcctatgtattatgtctaaatatttcatggtgaatgaagaagagtgactattttcaaactggaatgcttcttcagaagaaacccaaactggaatgtttcttcagaagaaacttcagaagtcaccaaaaaggtgactcctccatctttctgattcttggatcctaaagtatcttcagcaagtgaagcccagtttcataaccgaagaggtgactccatctgtcctacagacttgcagtgtgaagcttgcaatggtttctctgtatgttaatttctccatctctaggatggcctatgtggttcttactaacctcagagtggtatcatgaagccactgaaatgataccagaagaaaacaagagtgattaatcttctaggatgataaatctatattttcttcaaattcttcattttgcataaaaacctttttcagaaaagaatgttaacattggatatatctacacctgatttgacagttccaaactacaccccaaccacccacttctgaatgagaagaaaaaaaaatcagaagcctgcaattgtgtaacatgaaaatcttttctggaccagggcccgtcactgtgatttggcaacacaactggcacatctcttttctcatctcttgaaaaaaaccaacagagaaaaaagtaccttgagaataaaggtaatgattaatctgtcaggcacaaaagggattgttttggggatttcgggttctaagtcgcagattcaaacaaatagcagcgaacagggaatgacagttccaccagaagacgattaagccacagcctctaattggaacggcatttgtacagtcagagactcttaccagacatctccaggaatctgtgagccattgtcaaaacgtccattttcatctggctgtgaaagtgaggaccacaacaggtaggtattggtagaaacaggagtcctcagagaagccccaagatgcagcctgagggagcagaaaagggaaaaagcttcaagcagagactggtcttgaagagcagcttagcgaaagaaaccctctctgagttcttgggcacgttcatcttgattgtaagtatttcctgatttcctacattcagacccaataatgcctccctagctgccaggctggtagtggagagttttgtttggtttgttttatttaagttaattgggatcagattcatcttttccaggaagaaacaagttactagaggctgtttgactatttaggggttgtgatattaagttttcaattacctattgcatttacccacaaaagttgatgggaatggaagagaaggagtgagtgaagtgccttctttatttcaggtatttacttatactctaaaatggctttgtgatttaaaagtcagtcgttagtgttttcattgatcaattgatttgtaccctgcttgcttcctccaagcattggggtgactcagccacctggaataagcatcaatagtcaataaatatagttggcaaaaatatacatatggatggcaagaaacatctcagtatgacaagtacttgacaagtattgtgctgtcagatcacttgatttttaagaaattaaaaattgcactaggtagaaatagtgtaccaggcaatagtccagctttagttttgtgtcatttttggtctctatttaaagcaaagtaatctctaaatatctttggagatttacaagacaattacaagaaccttctagatataaacgagggacgacttctaagaacctcttgaggattgcccagagatttactcagctattaacaagagactggaaagtttacttaagtggtctgggctttcattttgctgcacgttctagcattctctgtatcctgaagttttacctggaaccaggccatt

SEQ ID NO: 6665 - DNA, 6000 bp, Homo sapiens
atggaatttataaattaataaaacatggccatatcttacatacccttcgttactggttccatttagaagttgattcctaatgacacaataggaggcatctttttttaaaaaaagttgttttattttaaaagataggggtcttgctatgttgccctggctggtgtgaaactcctggcctcaagtaatcctcccaactcagcctcccaaagtgctgggattacaggggtgggcctccacacccagtcattatgaggcatcttaatctcattagcctgtctccaaatcccatctcaaactgagaatgtttcctaaacaaagttaatccctttaaaaatgttgtctgggggctgggcgccgtagctcacgcctgtaatcccagcacttagggagtccgaggcgggcagatcacctgaagtcgggagtttgaaagcagcctgaccagcatggagaaaccccgtctctactaaaaatacaaaattagctgggcatggtggtgcatgcctgtaatcccagctactaggcaggctgaggcaggacagtcacttgaacccgggaggctgaggttgccgtgagccgagatcgtgccattgcactccagcctgggcgacaagagtgaaagtccatctcaaaaaaaaaaaaaaatgttgtttgggtttctattagcttcagccctgtagcatcacatttttgcatatagtttactttagggagcttctatccattaattctagtagctactatgaaggccaagggaaagttccctatcctttgaaggttcactgaaaagtcaactcacaactcacaaaaggcaggttaattggggcatgcaagttgtattaattcacacctggggagaatcacagatggggttagccgccctgcaaggaggttctgaagattatatgccaccctggcaacataggttatgggaggagagaggagaagaggaattctgttgaggggtttactagggggaatgaatggatcagggaacagagattaatttgagcattatcttgtgaacatgtctgtccaggtgtggttacactcttggtcttcagggaggggaagaaaaaacaattgttcttggtgggtctggatttttggcagataatagaaattaagcttcagagacagtgggtgggagggttagaacttgaggcttcttcagtaggtcaaggtgtcatttttggaacatcagctactgacccccaacaccaccaacaagctgtatttccacgattccagcacagtagtccccccttattctatttcacttaccatggtttcagttatctgcagtcaacaatggtccaacaatatttgcgttttgagagaagagagagagagaccacatacacacaactttaactacaatatactgttacaatggttttattagttgttgttaatctcttgctgtgcataatttgcaaaactttatgacaagtatgtgtgtgtgtcaggctgttcttgcattgctataaagaaataccagagactgggtcatttgtaaagaaaagaggtttaattggctcgtggttctgcaggttgtacaaggatggagcccgcatctgctcagcttctgaggaggtcttagggagcttttacttatggcattctaacatggcgagaacaggagcttgcacatcacttggcaaaagcaggagtgagtgagacagagaggtagagaggtggggtaggtgccctgcactttttaacaaccagatccaatgagaactcactctttattgagaggacagcgccaagccatcaaggattcacccccctgacccaaacatctcccatcaggccccaacttcaatgctggggattgcaattcaacaagaatttggcagaaacatgtgttcaaactatatcagtatgtgtaggaaaaaatcagtatacgtagggtttggtactacctgctgttccaggtatccaactgggcatcttgcaatgtacccccatggataagggggacttctgacttagacgaccttcccagggacagtgaggtagctgttcattcgggaaatattcacagcaagtctactgaggactaaactctgattttttatcttgcccaaattcctatctaaggggactggggagtcatgccctacaaatccagttctcatcagatgggctttatttaactgtatatatcatgatttactttccaacctgactctggcatcacattatgagacaaggaagaaaaacaaagtattttaccccaaaaacatgtttctttgccattattttgaaatggccctgcaaagctgtccttcatgggggaaaatttacatctgtaaagactctctgttaacatagctggatctttttcttccagaccctcccaatcttaaagtgattaagagtctagaaccttttaaagatacgaataggaaatatttttctattgtctctaatggcagccactataagatttcaaaagaaccttggtcttcacaatcttttatcttaacctgaacattccctttctgtggatcccaggtctttagacaaactcaaccaattgtcaaccagaaaatattttaattcacctatagcctggaaatacccccctaccatcccccaccccctttgagttgtcccgtctttctggaccaaaccaattatttcttaaatgtatttgattgatgtctcatgcctctctaaaatgtataaaatcaagctgtgccccaaccaccttgggtacatgttctctggacctcctgagggctgtgtcacgggccatggttgctcatatttggctcagaataaatctcttcaaatattttacagagtttgactctttgcttcgacactaccgtctgcaagttcttgtgctagccgctgtgggaaagacacagctgagtcagacatgatccctgccctcaaggagcttgtgacaccacagtgaagacaagtctattttggtgagtttgtggagacaggagatagaacaagcatggccgtggctgccctttgcttccgtggtgctgagcagcagcaggggcagctgtgagcaggcagctggtcttggcaggaagcagagcaccacccaaagactggagtgaggaaataaggccgcctttacaatttggcaaatgactggccttgggaatgtgagtagagagagagtagcaaattaagattatctcacctgagaagattcagaagtttcctctgcattttgtgaataagcagtgtgggcctgcctgcctgcctgcctgcctgcctgcctgcctgcctgcctgcctgcctgccttccttccttccttccttccttccttccttccttccttccttccttccttccttccttccctccctccctccctccttccttcactccttccttccttcctgtgaataagcagtgtggggcttgcttgcttgctttgagtaagtagtgtgggctttctttctttccttctttctctttctttttctctttctctctccctcctccctccctcctccctccctcctccctccctccttcattccctccatccatccctccctccttccttccctccctccttccttccctccctccttccttctctccctccctccttccgtccctccttccttccctccttccttccctccttccttccctccttccttccctccctccttccctccctccttccctccctccttccttccctccctccatccctccctccttccctctctccatccctccctccttccttccttccctccctctttccttccctccttccctctttccctccttccttccttccctctctccctccttctttccttccctctctccctccttccctccttacctccctccttccttcctttcctcctttcttttcttccttttctcttcttctctttctctctccccctccctccttccctccccctccctccttccctcccccttcctccttccctccccttctctccctccccctcccctctgcctccccctcccctctgcctccccctcccctctgcctccccctccccctccccctcccctcccctccccctcccctccccctcccctcccctccccctcccctccccctcccctccccctcccctccccctccccctcccctcaccctccccctcccctcgccctccccctcccctcgccctccccctccccttctcctccccctccccttctcctccccctccccttctcctccccctccccttctcctccccctccccttctcctcccctccccctcccctcccctccccctttcttctttccctcccctccccctttcttctttccctccccttcccctttcctctttccctccccttcccctttcctctttccttcctttcttttctctcctctctctttctctttctctctctctctctttcttttcctctttaatctcttttctcttttcttctttaatctcttttctcttccactccaggccatgtgaagtgcatccaggagggctgtctagagcaagggggaactttgagtgcagagaggatgtggagctctaaggaggaacctacaggctgtccctgtctttcagcaaattgcatccagtctgagcttcactttgcaaccctgattagaaaccagtttgatcacactgggtctttcaaccgtttgtctgtggctagagttcataacttcatctttgttaagagcccactacctagaacatttatttaatgttagagctcaaaacaccctacctcccctctcctcatcttctttagtgccttcagtctttttcaaaccctagctccagcctaataagtaacacattaactgggttttcctatttatctatcctctcgcattacttctctgagtcagagcctcttctctctaagtcacgggaactgcccttgctacttgtgacctgccctttactcagcagtttttgttctgggaagccctgggattctgctaatacctatcactgtaggtgctgaagggaaacagatgaagaacatgacctcaaggagcttcctgtcaatgagaagaccaagctgacgcctggcaaaggtaaatgccaccataacaaattaagtaaaagtgtgcattagctaatttgtaaattcagcttaagatgaatcctgcttcttgggcccttctctgacgctggtgttgggactgtaggattcctcgagcctccgtcaaggttaacatcaaatcccactggcttctctcagcaccaccttgatgaccctagcttagtttctctgtttcccatgactggaactcttagacctttccacaaacatacaaggatttataattcaaagctcaagcgatgaagttgaagcttttggcccataggaagcctgaactagtgattaggagaaaaagattgaggagtctgagtgggaagagttagctatttgaaagacagcattatagtagtagtcattgtaggaaaactcaggactgggttggacttacttatattatgttgctttatattttggttactgagggaggtgaaggtcatcctttcagttcttgggatgtctaaatagcttcatgactcctgggctgttggataaatttgctttcagcatcatctggctgtaccttttgtccttagcaggggtaaaaggaaccctgtgaaaagcatcataccccaggtttcagtttttgccttgaaatgtgcccgggatcccaggcagtctgggactgcgccctttctccctcttgccaagtgtcctgtatgttcttcagggctagcatggaattaaggtgaggaagctgctggccatctttctgaatgcttgcctgatctctgcaggttgcctcacccccgatcttcctgtgcccttccgcagccattctgtcccctctcctgtacctccctggggtcagttgcagctcatccctggtcttattctgcctgaggtgctgagggtgacaacttacaatagagtctctccacagaacacagagatggagggcaattcttagtccttt

SEQ ID NO: 6666 - DNA, 6000 bp, Homo sapiens
gctggagttcagaggcatgatcacagctcactgcagcctcgacctcccagggtcagcagtccttccacctcagcctcccaagtagctggtagtcacaggccaccatgcccggctaattttttaaaattttctgtagagaacgggtctcactatgttgccagggctggtctcaaactcctgggctcaagcaatcctcccaccttggcctcctagattgctgggtgtgagccaccgtgcccagcctatagtttaactttaaagcaaggatgattagtccctccccaaaactaacccccaaggagataagatgggtatacacataagtaacaatgttatgttaaaaatttgtaagagcactgtgacctgacaaagacaaagaagcttacccttgctgccacccagatgtctgtggtcactggtcaccttttgacctaagcctcttcccgttttccccctcccctaacataaaaggagcccaacattcacatttacttaagatgcttctttaggacagtagtctgccatcttggtttgctggctccacagaataaagtcatcttccctgctccaacgcctgtctcttgactgattggctgttgtgtggtgagcagtacaagctttggacgcagttacagcagtccatcaaaactgtagctccagcttcagaagagatgatattaaagttctctcatgatcttttatttccccaatttctgataagtgcattttcatatttatatggttttgcttcatttattcctattttgttttgtaattccttttttgttgtgtagatattatacatttatttatcttttatatatattttcaacaaatatataaaatatataaatacacaaatatataaaaaatattttatatatacttgttttatatatttcaatatataaaaatatatatttaaaaatatatatttgttttaaaatatatatatttgttttattttctatcacccatctttttcttagccagggaaaggcctctctttttcctcttttcctgtatatccttctactgattttattttgtttggggtgatttcacaatttggtggttgattttattgtcagtgttttttagaaaacttttaaaaatatgttttggaaacttggtttgcagatttatttttagtggaaagtttctttccttccccttttcctcactttttttctctcttcccattcttctccatgtgtagtcatttaccttttttatttatttttttttttgagacaaagtctcgctctgtcatctaggctgcagtgcagtggcgtgatttcagctcactgcaacctccgcctcccgggttccagtgattctcctgcctcggcctcccgagtagctgggactacaagtatgtgccaccatgcccagctaatttttgtatttttagtagagacggggtttcaccatgttggccaggctggtcttgatctcttaacctcgtgatccacctgcctcagcctccaaaagtgctgggattacaggagtgagccaccgcgcctggcctgtttacctttcttctatctggtctctgcggctcccaccccaaagccagctcaaatgctggggctctgggctcctgccctagagttgtagtaaagatcctgccaacaagtctgcaggctgcttggtcaggttgcctcctgggcactcagcttgctggagaacaatttattttctgttaccttctgagaaaagaaaataacttttatgtgaagaatgcaagtcctttcaaattatcaggcccagggagacattaaaatgagatggtggctgagtattgtggctcacacctgtaatcccagcactttgggaggtcgaggtgggaggatcgcttaagcccaggtgtttgagatcaacctgggcaacatggcgaaagcccatctctaaaaaaaatacaaaaattagccaggtgtggtggtgcatgcctgtggtcctagctactcaagaggctaaggtgggaggatcacctgagcctgggaggttggggctgcaatgagccatgatcacgccactgcactccagccagggcaacagagtgagaccttatcttaaaaaaaaaaaaaaaaaaaaagagatggcattcatgtcctacccccacaataagctatgtattcatctcttgaaactgcttgctgttgccacgagtagttataaattaacctaataatggggcaccagacgctagaacccataccctgttgcttaacaatgtatatagccaatcattgttatttctgtaaaccaatggggatccctgacaaacaactttgtatcagcccattccctgtccccctttttttgcctttaaaggcaaaggaggacaggggagctccccttaatggggagctcattccaagtttccttgggtctgagtcttcagggcagctgtcctcactttggctaaagtaaagtctttaaattatattttgtgcctcagcctcttccttttaggttaacacttcccagaagccatacttcaaatggcctctctgtacctgcttctagactggaagtccaccaggacattggcttttgccctgtacatggcaaacacagggctctgtttctttttttattttttatccaaggagaggtacagaagagtgcaaaaaacacatatgtgaaaccagcccaattgtccaatagaatatgtttatggtttattttgaataaagagagaaaattgacctgcccagtcttaaaacttgagaaacttacatttgtcttatctgagttccttttggaggaaaccaaccatcaggtctcccagatagtatcaagaaactgaaacttaccagatcaccacatttggacaatgagacaccagatccttcacctgtcatgattgcctaacccagcggttcccagcttttttggcaccagggacaggtttcatggaagaaagtttttccatggggtgtggggttggggctgatgggtatggtttcaggatgaaactgttccacctcagatcatcaggcattagttagattatcataaggagcaagcaacctagatccctcacatgcgcagttcacaatagggttcgagctcctatgagcatctaaggtcatgactgatctgacaggaggtggagctcaggcaataatgctccctcacctgccactcacctcctgctgtgtggcccagttcctaactagtccatggcccaggggttgggacccccggcctaaccaaccacctgcttcctgttgaacaattcttcttccttatccctccctatttcctgtttccccacacatagttacatttcttccttgctatataaacccctaattttagttagctgaggaaatggacttgagactgaactcccgtttccctggctgcagcacctgaaaaagctttgttttcccccggcgatactcattgtcttggtgactggctttctgtgtggcgagcaatgggatctaggctaaacccttggtgtttcagtaacatatgtacagtttaaagaaaaattatgtacagtttaaataaaagtgggcactcataaccaccactgactgcgtcttttacatttttctctttatattttttctctcatgttcttggagtagtggtgacccccaccgtgggaacctccagtactatcttaatagagtacatctgtccactataactgcagtttcagtgtcaaacgctctgggtcctaggatattctggtctcttggagtcttgggttttgtgagtagccccagaagctttacttatttagccccactattttcttgctaggtatggataccattattgccttttcctcctattaaataattattacctcaatatatttattttgaggtatgtatatgtttactcagtaagtttattacctcaatatgtttgtcctgatggcttgtcagttcaagtctgtgagctctcttctttattccacctgcaagaaaagacagggccattttgtatatggggcatattgccccagtgctgaaggtataaagcctacaagctttcaaagattgtgtgtgtgtgtgtgtgtgtgtgtgtgtgtatgtatgtatcccaaaatataaaaattacaaaactgataaatgtttaagtaacttcaaattaacatatcaatttcattacacgttaaactaggattttatacacattttacattttgtagcaatttgagattaggtttcttatttcacaagaatgtctgatcatttacagatgctgagaaatcataggtaattgtaaattataatagttacttttggattaaaatttttcaagcacgaaatttttaaaaaacactttatcttttatagcaaaagaaaggtaatataaggtctggatgtaacttcatgtctttggtacggtgtggagctagaattccagaagcaatagattttaaaacatctttagggaaatgggtgaattgaaatgagacataagggagatggcaagagagtgaaaagaagcgcgttctaaagggggaaaggagaaagggaaaggaaaggagaaaggcatctctaaagggaaaggagatgcctgctgagcgtctactgtgtgccctgcgctgttccagaagttgaggatccaaaactaagtctaggctccccaaagaagtcccactctggtaaggaatctgacaagtagttaaatgatacaaagtgttaactgttgttaaagaagtgtgcacactgaggggcaagatggtaagggcgagaactcccatgggacgggaactaggaaggcttctgggaggtgacgcttgatctgagggtaagcaaaggaaaaaaaggaaagagagacagaaaggaaaaacaaggaagagacaagaaaagggagaggaagaagggctcgatgcgatcggcgctcgggtagtcaggcgtcgactgctagggtctgaccgcggtccccacccccgtcccgccccctgcccttccctccgccccgcgccgcggctggcagggtgtgcgtgagtttggtggcggccggctgtgcagagacgccatgtaccggctcatgtcagcagtgactgcccgggctgccgcccccgggggcttggcctcaagctgcggacgacgcggggtccatcagcgcgccgggctgccgcctctcggccacggctgggtcgggggcctcgggctggggctggggctggcgctcggggtgaagctggcaggtgggctgaggggcgcggccccggcgcagtcccccgcggcccccgaccctgaggcgtcgcctctggccgagccgccacaggagcagtccctcgccccgtggtctccgcagaccccggcgccgccctgctccaggtgcttcgccagagccatcgagagcagccgcgacctgctgcacaggatcaaggtgcggccactggagcggggggcgtagggggccggggatccacccctgtcggcggtgctgtcgggggctgagtggaccccacccggggcggcggggtgcccgcgatcggcttccgagaaagacttcccatttccccaccgccgagccgtggtcagacgctcttgggggttccccaaatctgggtggaggtcaccgcctgtctcggggaccgccccttccccctagggggcggacaggcacatcccttgctgttagtgagtgaccatggcctgggacgaggtgggcggggcccaggtggagggggcggggcccaggctcagggggcggggccttggaaggtccccgaggagagcgctgggctttttcagcaggcccgtaactgtcggttctttccccttcggtcttaggatgaggtgggcgcaccgggcatagtggttggagtttctgtagatggaaaagaagtctggtcagaaggtgggttcagaaaattgttgttttgttctgtgccagttggtaaataaaatattgttttactggttagagtggatcccatgaaatgctattgcatttacataaaacgatgcatattgtagagaaaacatctaacataataaagagtcaggtgtt

SEQ ID NO: 6667 - DNA, 6000 bp, Homo sapiens; identical to SEQ ID NO: 3261

SEQ ID NO: 6668 - DNA, 6000 bp, Homo sapiens
ccatgttggccaggctggtctcaaactcctgacctcaggtgatctgcctgccttagcctcccaaagtgctgggattacaggtatgagtcactgcgcctggcctgatttttgtattttttgtagaaatggggtttcaccatgttgcctaggctggtcttgaagtcctgggctcaagcaatcctcccaccttggccttatatgctctttattctggttcttatcttttaatctttgttaaataccttacaggggtccccagttctggggacatggataggtactgggccacacagcaggaggtgagcggcaggccagtaagcattactgcctgaactctgcctcctgccagatcaatggcggcattagattctcataggagtgtgaaacctatcatgaattgtgcatgtgagggatctaggttttgtgctccttatgagaatctaatgcctgatgatctgaggtggaacagtttcatcctgaaaccatccccatcaccccaacccacagtccatggaaaaattgtcttccacgaaaccagtccctgctaccaaaaaggttggggaccactgccttatactatcttaatctgtgttgtatcttacactatattaatctttattaagtatagaaggatttgcttttaataagatcacccagaatgttgtttaggtattgataaattcagtaaaccttctctcccacttcatgattccaaccctcaagattggtgttccgttattagttccagggatatatgagaatgcaccatagcaaataaaataaataaataataaattaaaataaataaatatacattcgcctaaggtgaaagtagttgggtgatgacatgaaagaaaaacagaaattgctgtggttaagaatagcaactgctaaatacatgaaatgagtttttgttccttatgagtaaatattgcaatgaaattttagggaaatatttcaaataggtagtcacattagtcaataaattatcaaaatgtctcaggcttcaactgaggcagctggatctagcaaaaagaggcctgaactagaaatcaagacttccaggttccaagtgggttctgctgctcagtaatggagtattttctaggcttgttgtatcctctgtttgcttttaaaaaaaattatattggataatctctatgtcctttcctagctctaaaattctaagaaaacactggtaatttctctaacatagatcatttgatactctaccatcattgcaattttctctctgatatctcaatgaaggtatttagttttatggtttataaatttggaatataaattaaatcaacttggcattataaacatggacacttagtataaactaggtagtaattctttatctgatttcttatgaccaatatttgccctcgtttttgtttcttaaggtttcttcctcttgcattgcccttatttatttacttatttacttttgagttggagtctcgctctgtcacccaggctggagtgcagtggcatgatcttggctcactgcaacctctgcctcccgggttcaagcaattctagtgccttcgcctcctgagtagctgggactacaggtgtatgccaccacgcccagttaatttttgcatttttagtagagatggggtttcaccatattggctagactggtctcaaactcctgacctcaagtgatctgcccacctcagcctcccaaagtgctgggattacaggcgtgagccactgtacccagccacttcctcttgcattgcctttaaaaaaatttacttgtgaatattgtgtgcaagctgaagttgaaaaaactctaagagaatgtagttaagactctcatcttgtaccatcaacaaaaccagtgctgcttgaaagctgggtcctagggttgactcttatagggctggtaacttcactccgaccttcagcatcacagcaggatcgaaattgcatcactcgttaccaaggaaactgggtgggtactctgaggatccctccatttcctgtcttccttcagctggtgtcctgtctcctctcctctaaagctaaatttctccattttttcctctttccttttttttcttaccacacattaatgtgagaagattttacagactgccttttacccctatgtctgggtcactgatgacctctgtatggctaaatccagtggacataattcactggtagcttttgttgttgttgttgttgttttgttttttgtttgttttgagatggaggagtctcactctgtggcccaggctggagtacagtggcgcagtcttggctcactgcaacctctgcctcccaggttcaagtgattcttctgtctcagcctcctgagtagctgggattacaggtgtctgccaccacgcccagctaatttttgtatttttagtagaggcagggtttcaccatgttggccaggctggtctcaaactcctgacctcaagtgatccgcctgcctcagcctcccaaagtgctgggattacaggcgtgagccactgtgcatggctacttaacctctcgacagcccttctttctgaaatgttttccccttggcttccacagcaccacattcccccagttttcttgttaccctcttggccactccttttcagtttcttatgaggttcctcttctcctcatacctttaatgttggtgttctgacataggccttgttctggctttactagctatctaggtaattctattctatatactctcacggcttcaggtattctggtctcagctctgatgttcagtccatttctctcctgatcctgtatatgtagttgcctactgaacacctccatttggagtgctacaagtatctcagtctcaaggcatccaaaatgaaggccaggcacggtggctcatgcctgtaatcccagcactttgggaggccgaggtgggcaagtcacttgaggccaggagttcgagactggcctggccaacattgttcacactgtctctactaaaatacgaaaataacccaggcatggtggcgcgtgcctatagtcccagctactctggaggctgaggcaggataattgcttgaactcgggaggcagaggttgcagtgagctgagatcacaccactgcactccagcctgggcgacagagtgagactatgtctccaaaacagtaacaacaaaataacaaaatggtactcattatcgtgtctactttgccatattctctcctcctcctgtctccacagcatccacttaagcccgaaccctctagaagccctcatccttgactcttcccccatctcactctatgtagctcattagtcactaaattctgtttgtacaattcctaaacttctattaaatttgtctgcttccctccagagtcctgctaattccctgaatcaggccactgccatctcatgcctgcgttgcactgaggacctccagtctggaagctcattttccatatctttacaaagcagatctatcactctgaactgttgtctcgacccgagttttgataggtattgtgctgggatctgaccattcaaaatacaatcactggaatctgaagaagtattctgtgggagtgaatggaaatatatatgacttttaaatgggcaaaggtaatgtttttctgtaagaattaaatacctgcagttgtattatttgaaggtgcattttcaggggcgagctgcaaaacatctgtcaggtcccaacatttgtctactggtgtttttttaaatgtggattgccaaaatctttattcatgatggacattatgtaggagtggttaatacttacatagcacttacctgtgtcaggcacactgatcaaaataaccgacgaagtattattcaacataaagaaaaatctaacttggatgtgaatgatcagagaacttaagttttaatttttaaacctttcagaaattgttaatatagatgtttataacttccaccttttaaattatttcacttattgaacagatattagtgaacttctaggtgctgaggaaacaacaaagagcaaagcaaagtccctgtcccccaggagttcgcgttttaacggggaagaaaaataagcaagtgaaatggacgactgtgagaagacggagcagggagatgttactattgcttgtagggtggtcacagaatgcctgcaaaaacaacccttttgaagaattgggaaaaaaataaaaaccatttggctgaaacagccctgagaagggcagcttcttccaccactctttcatcattttaccatctgtgggttatccccggggtcactgctatcccagcctaggttttatacaggatggagtacgaagttcccgcaactatccaaacggtaaaatgtgcttaaaaaaaaaaaaaaacctatttaaaaaggaatcctgcttgttcctgcgctacatttttgtttagtctctttggttgacttggaatctctgcctgttctcggtgcatgcggctcgaaggtgggctagggagcttcccttctcttaaccacctcgcggccggcactggaacccgatcggagtgtatctgtggggctgcggcgatggctggggccctaacgtcgccgaggacgcccgcctcgggagcaggagctgcggcgtggccctggcgcttccggacacccggtagggcggagggcccaacggtggggtccgcgctcaccgccttgagcccgcccctgcgcccggcgccctcagcccacgccccgcccagtcccccaggccctagcgtttacccccacgccccgcctcgccccgcgacccacgtaccccgcctccgagccccgcccccgcccccacgtgccccgcccccgagccccgcccccgtccccgtgcctgcccatgagccgcgccccgccccccgcgtcccgcttagccccccaccccgagccccacccaccgaaccccgcccgcgccgggagcatctcgcgtccccaacgggcccccgggtcggtttccgcggtggccatgactgcggccgtgttcttcggctgcgccttcattgccttcgggcctgcgctcgccctttatgtcttcaccatcgccaccgagccgttgcgtatcatcttcctcatcgccgggtgaggcggtcgcgtcgggaaacccggacgccggggctcccctcccccgctggggttacccgcgaccctcggcgcccccaccgcgcggctcgaccttgttgcgtttcagacgggaggagggttgagagggggagagcggagatccggctccccaaaggcgcctcgccctcttaggaagaagcgcacactgggggtcagggccttttgcctggggctcatgggtggggtttagtgatccgtgaagctactaaagttgtataaaaaaattatggataagttcatatatgcatccttcattttctggagggggagtccctaatttccctcagattctcaaaggcatgtgtaatccccaaagggttaaaaaccattggcgtttaggatagtagtgcgcgacttccgcctattagaatcacctgtggccaggtgctttaaaacatgccgatgcccacccccaccccgatccattgaatcagaatgtctaggggatgggattcgggcttcagaaaaaaaaaaaaaaatttaagctccttttggatggttccgttgtgcagccgaagggtggaaacctgtaaaaacaccgaagcacctgactgtgcgtctccttctgggagcttggtaaataccggactctggtgtcccatcgcagtcatcacctgcctcttacttgcacataccacatcccccctcctctgatgagtctctcttggcaccagactaggccaatgattcccgcttttctgcgtttcttcacctcccacaaacgtattgaaagtgcttcgctgcatgtcattttaaaaataatagagatttgggaagggtctgtaaagcttgctataatcattagaatccccaggggtgctgtaagacctggagggcttggatactgatccagatcagaacacaggttttcaagttgaattt

SEQ ID NO: 6669 - DNA, 6000 bp, Homo sapiens
ccacctccaaaggtcatattttacagctccttgtgaggaattcacatcatgccatgaccttcactatgagaaagcacaggctgtaaaaggccagcctggctccctgctccgtggttaaatattgatgatattgggcaatagagacctggagtgggcacactacatatccccctgcagtgatggaacccacagaccgcaggtcctctgcagtccattctcctgcctgtccagaggatccggatgttttctctttacttgaggccaacacataacaatgaaagcactgggctactggtgctttcggattgtgaaagtcaggtggagcctgtttgcactctgagtgcactcattcaagaggtcagtcaccctggagtgatacagaaggctccaggcctgggcgtgtgctaaggccagagctaccagatgggtccagctgccgcaggctctccaggcactgtcccctaagtgacagctgttactgcctgggagagctcaagtgcaaagactatcctgttctcccataaagaggaggaaaaggaagatacagaaatcggtgctgctcccaacagcagatcaaggcagtcgtcaggaactcaggatccggggtgagtgtcctcatcttgccttggggatgggtggcccaggtctttggcagaagtcacagtccaatggcacgatggttaagccctgtttaaaatgcagagatctcccagaggggcttaaggagacaagacaactaaatgcagtatgacatcctaaatgggatcctggaacaagaaaagaacattaaaggcaaaactaacaaaatgcaaataaggcataaagtttaatttaatcatgcaaatgacaatatgatgctcactttagaagcaaactggatacgtgctttgatagaaatatgtctttggccgggcgcagtggctcacgcctgtaattccagcacttttggaggccgaggcaggccgatcacctgaggtcaggagttcgagaccaccccggctaacgtggtgaaaccccatctctactaaaaatacaaaattggccgggtgcggtggctcatgcctgtaatcccagcactttgggaggccgaggcagatggatcacctcaggtcaggagttccgagaccagcctggccaatgtggtgaaatgctgtctctactaataatacaaaaattagctggatgtggtggcgggcacctataatcccagctactcaggaagctgaggcaggaggatcacttgaactcgggaggcggaggttgcagtgagctgagatggtgccactacactccagcctgggcaacaagagtgaaactctgtctctaaataaataaatacaaaattagctgggcatggtggtggatgcctataatcacagctacttgggaggctgaggcaggagaatcacttgaacctgggaggtggaggttgcagtgagctgagatcatgccattgcactccagcctgggcaaaaagagtgaaactctgtctcaaaaaaaagaaagaaatatgtcgcttgtttctgtggcatctaacatagctgaggagggctgactctcggttctggatttgtatccaatttgtcattttggttttttgttggttggtatgtgtttactgtaacaatattaaacatattttaaacatattttggccaggcgcggtggctcatgcctgtaatcccagcattttgggaggacaaggtgggcaggtcgcttgaactcagaagttcaaggctggcctgggcaagatgatgaaaccccatcgctacaaaaaatacaaaaattagccgggcgtggtggcacatgcctgttgtaccagctgctcaggaggctgaggtgagaggatcgcctgtgcccgggagatggaggttgcagtgagccaagatggtgccattgcactccagcctgggtgacagagccagactctgtctcaaaaaacaaaaaacaaaaaaacaccactccactgtggacaatagcttacctgcgtctttgtacactgatctgattagttccattaattaaatatcaaaaattggaattgttgtctcaaaaggtataagtacaataatacctacatttaaaaatgcatacaaaggctgggtgcagtggctcacacctgtaatcccagcactttgggaggctgaggtaggcggatcaccaacctggcaaacatggtgaaatcccatctctactaaaaatacaaaaattagccaggtgtggtggcacatgcctgtagtcccagctactcaggaggctgaggcaagagaatttcttgaacctgggaggcggtggttgcagtgagccgagatcacaccattgcactccagcctgggcagcaaaaacaaaactccatctcaaaaaaaaaaaaacatacatacaaatagacaaaatatacatagaaatatatacacacattaaaaatggaattacatgtattgttctcatgaaagcagtgtatacgcataagaaaccacacaatacaggagtggtcaacatgaatatcccatgtgtctaaatctcatcccacaccctagaagaagactgtgtttggtttctcaacttcaatacttttctttgtgagttcaggggtttgcatatggcacaggggcctgtggctgatgttactaatcaatccaggcactcttacatctgagactggatggaatgtcacaatccttcttggacagtgctctggacagtcagttggagctagaacacaagatcacatctgttggccattcttgtaactttgtctttccatgattttagatgggtaggtaggcagatagatagatagacagatagatcgatagatgatagatagatagatagatagatagatagatagatagatagaatctccctcaaatgagtaagtaggcagtgtgcatgtgagtccttgaaagtctaagaaagggccaggcacggtggctcaggcctgtattcctagcattttgggaggccgaggcgagtggattacctgatgtcacgagttcaagaccagcctgggaaacatgaggaaaccccatcattactaaaaatacaaaaattagcctggcgtggtggcatgccctgtagtcccactacttgggaggcagaggcacaaacgagaaccgcttggacccaggaggcataggttgcagtgagctgagatcacgtcactgcactccagcctgggcgacagagcaagactccgtctcaaaagaaaaaaaaagaaaaaaaaaaaagtctaagaaaggtctttttttctccctgacttccatctccaccttggcatatgaatgatcattcacatatgaaaagcttaagtcagtattgtatttgtgtcaaaatattttcccttgcaatttgtagatatgcctttttagttttctcagagcatttagtgctagaggaaactctgatgtaaagctagtccttttgttgatactccaattttctgtctggctgtttgccatctagctgtttttgaatgcccctggctaagtgtccaaaggctatttggggctgagattgttgagcacctaaggcagtgacagagtgtgaggggacctgagaatgcttcgatcctccctgtacactttttttcttggtgccctatggcatgttttataattgatctgttcaaaacacttctcttgttttattttagttacgtttatctccattcctactcccttcctcctcctccccaagacacagcttaatgtgtttaatgcgtgtccttttaaaaaaatgtgttattgggtcaggcgcggtggctcactcctgtaatcccagtactttgggaggccaaggcgggtggatcacctgaggtcaagagttcgagaccagcctggccaacatggtgaaaccccatctctactaaaaatacaaaaattagtggggcggtagtgacatgcgcctgtaattccagctacttaggaggctgagacaggagaatcgcttgaacctgggaggcggaggttgcagtgagcagagatcgtgccactgcactccagcctgggcgacagagtgagactccgtctcaaaaaaaaaaaaaaaaaagcgaaataacttaacaattttaatattggcctgaataatatatgttgtcaaaattaattttacctatttctttttgttttgtaaagtatggatgctagaaaattttatattaagtagtaataatgcagttagtacaagaagacgtcaaaatgtctgactgttttgagattgactgaggttcagtttattattaatagttgggatggaaataggcctacacgaagtaagggatttatccagagagcatggattcaagttcttcccttgcaaataacagaaaccaattctgctaacttgtccaaaaaaaaaagaaaaagaaaaaaaaagctctcggggtcggggcagggggtgccctctcagcatcaggagccggcagctgcctttccctccggcacttttcccttttctcctctctgtgtcgtaggcgtgccaatccccaggagagaggcgtgataggcccagcctttgacatgtggggaaacacaggcctgtgattggctaccgcatgacacccaagggacaagttgctatggcaacgcgtgggcgcgctgtgggctcgtagaagccaggtgcggacgctgaacaggcaggcgaagacccgagatgtcctttgcaagggtcccagaactcgccagtggctcagtcctcctcactcccagaacagtgctcctccacacatgcgatggcttttaataaatatttgagtcactcccacttccagtctctgcccctccaggctccacgtgctcctgggttcgttcgggtcgtttttgtcccataactttgggccagaggagatctggatttgggcacagagggagatcaaactcgggtgggatatccagtcatgctgtctgctttgtttccaggggtcttcacggcttctctgcccaggggccagaaccgaggaggccaggagggctgctggggctaaggggtctaaggacctcgttgcacacgctaccaggagcaggggcatggagcacagtgagggggctcccggagacccagccggtactgtggtaccccaggagctgctggaagagatgctttggttttttcgtgtggaagatggtaagtggtgagagattgacggcaggggtgggggtgtgcccctcaacacagagcagagtttggctgaaggtcctgacactgtcgtcccctccaggtcaggcggtacatttcctccaagacagggaatcagtcggggtgtctcagtacccagaggggtctggctggaccgccccttccttttctcagggtgtggtcgcttatttatgcagccctccaatcatcacatttattaagctcctactctgtaccagacactgttctcagcactggggcgacaatagtgaataaaacacaaaaatctctgccttcatggaatgtacattctagtggggattaaaaataaacaactaaaacgcatagtgcgttggtgatgagtaataaaaagaaaaattaaacagagaaagagaataggaagtatgcagcaagggcagtaatgtggtcaaggaaggcctcactaaaaaggtgacatttttatcatcaggaaggtgacttgcaggaaactaaggaaataattaggtatgcaaattatttgggggaggaacattcctggagggaggacagcaaatgcaagagctctgaggctggaccctgcttcatttgggtacagcatggacaaatcttgagtagccacattcagtttagtcacttcatgtattatctgtgggcagttgccattccttccacccttctccctgccttctttctttcctttttttttctttcttcttcttcttctttttttttttttttttgccttttttttgaggcagggtcactctgttgcccaggctggagtgcagtggtgcaatcttggctcactgcaagctctgcctcctggattcaagtgattctcatgcctcagtctcctgagtagct

SEQ ID NO: 6670 - DNA, 6000 bp, Homo sapiens
tccacaaatgcttcttctttttttttttccttctttttattaaaaatagagacgggatcttgccatgttgtccaggctggtctcaaactcctgggctcaagtgatcctctcgccttggcttcccaaagtgctgggattacaggcgtgagccaccacacctggcccacaaacacttcttgactgctcactatgggtaagacactgtgttaggcactgctggaaatattatgaatattatgatttagagatgttgtcagaaagtaaattctaacataacacagaaaacacctttgaaagataatatctaccaactgagatttaaaaattataatttattggtatcaaaatcaaagctatttgttggaaaggaaatatcattttgaattactctagaataagaaagggctattttttcatttcctcaagttttatgggagagtagaaaaaaattaagtgttgagcctaaagatcctaaattttagggaatggaacactacatcctgagatgctcacttttccacagagaattccagaaaaccaagagaggaaaataagggaacaactcacagctgtaactcatagctgtaccgaagaaacagtaggcataagacctactggttgtgaattcttgctgtttagttacacatattaagtactcatagacttattaaataatgccaaagttctaaatattcaacgcattataacactgttttcctcccaataaatttaggccctgtacatacaataacttactacattttgtacctgtagggtattataatctctcgtgaaggggaccatcaactcccaaagtgatgaaaaaaccacaagtgctgtaaattcaagcttgtaatttgtggccatgtgctcaaacagcatcgttaaaccatgggctgctaggtgcttacgctggtattcctcggacccctcaatagacacaggtcgggtcatggaaagggatacatccattaccaccactgtcggcatgatgaaaatgatcccagtgttcccaatcagaatgcaaacagacagctataaacgaagaaatgctgcagaaaataaatacgttcttacatgtcatggagagaaaataatatttttcaccataactttaactaacttctcagaaattagcagaggcaaacaccatttaagttgaggtgaggaataatctgtagagaactcagtgagagggaagtgagcagcttagttcattgtaaggaccactcttagaatcacccattaagtgaccataaatcaaggaccatctaaatatatctactggaaaaaaaaaagccctgctaaattcaggtagcccttaactttcacacattcgacttttatgcaacttaataaactcccacatctcctaacacttaatttactgaagaacatttctagttgtcatatgttggtgctatttgacaaacaaccattgttttttggcactgtcacaacctttttgcagtattactgcatgtgtttaattattttgttggttggtgctcttgttttagtaaaatgaatgccaaatataaaaatgaaaggactagtaaagtcataaaccaaattagacaaattggaaatcattacacataacaaaagtaataaactgtcagcctcagtagtattcattgtacataaactggccaatggtgcttcaactgtgaaggaaaagaacaaaattaaagaatatgtaaggtcgggcacagtggctcatgcctgtaatcccaacactttgagaggcccaggtgggcggatctcttgaggtcaggagttcgagaccagcctggccaatatggtgaaaccctgtctctactaaaaatacaaaaatcagccaggcatggtggctacttgggaggctgaggcacgaagatcccttgaacacaggaggtggaagttgtagtgagccgagatcgtgccactgcactccagccttccagcctgggtgacagacgaaggctccatctcaaaaaaaaaaaaaaaaaaaaaaaaatttatacagctggaattatctcatgaaattgggtagaaaagtcaaaatgtacaaatggagttattcaaaattatggattgagaattagcataaagaaaacattttggtgctcaaaaataaaaaagtttacagatacacagacctgctcatgggtatatagcctgctgctactctattattaagcaaactgtaggctactgacatgatgaaatatcataaaactataaataaatgacatatgtactacagatatcagaaatacttatagaaagcattagtaactgagaaaagcaggccccagaactgtattatacactgcttacaacttcataaaaatcataatgcaaatatacaattagagagattaggtggatataaacaggttagaaatttaatgttcacaactttcttttttgggattaacttcaaaacatttaacagtagccagattacttgtttaaggatggtgcccagctgcaaatgtgtcatattctaaaattccatttgttcttttttgtttttgagacggagtcttgcgacatctgtcgcccaggctggagtgcagtggcgcgatctccgctcactgcaagcaccgcctcccgggttcacgccattctcctgcctcagcctcccgagtagccgggactacaggcgcgagtagccaggactacaggcgcgtgtcaccacactcggctaatttttgtatttttagtagagatggggtttcaccacattggccaggctggtctcgaacttctgacctcgacattggccaggctggtctcgaacttctgacctcgtgatccacctgcctctgcctcccaaagtgctgggattacaggcgtgagccaccgcgcccagccaaaattccatttgtaagtaggctgtttcgaactcagaatacactggttcatggaaacaatgtttacaactcaggttgtaagcataggcgtaaaagaagaaactgaaagttcctgaaggatggttcactcaagcagtataggcccgactgaaaaaaaaaaagtgaggtcctgcacaatattggttcaactacactatattagaccataacatacgctcactaagggcagggaccatgccacattttgcccatgatgtctcctcaaaacttatcacagtaactggcacatagtaggtgcccaacaatttgataacaactgatgaactacccctaaatcaccagatataccatatattatttagcaaaatacattataaatgttaactctggacaccagaaacacatttcctcttctcctcattcaagcagacatatgggggactccctcacgtctgcccagctcctgtggtagtcccattcatgcagggaggcctttttacaagttgaggatcatgaggagtactgccctcacctcttaggagaatgggaggaaacagtttacacagacttagatcaaatacaaaaaagcactttcagcccgtgaaatctgctgttgacagtgatgacagctggcagtcttgccttctctgaagacacctctggagctggctctttctcccaagtgatgcatttgtgtcgactcccaaatgcacctcattaacagttacaaagtcgtgggagatcaatttagtactcaggttggagtaaaggagggaactgaaagttcctgaaggatagttcactcaagcagtataggcctgattaaaaaaaaaaaaggccaggcacgcctttaatcccagcactttgggaggctgaggcgggcagatcacccgaggtcaggagttcgagaccagtctgaccaacatggtgaaaccccatctctactaaaaatacaaaaattagccagatgtggtggcgtgcgcctgtggttctagtacttgggaggctgaaataggagaattgcttgaacccaggaggcagaggttgcagtgagccgagatcgcgccactgctcttcagcctgggcgacagagcgagactccgtcttgggtgggggggaatccctgcccaccacagtctaccaattttgtgagcacaacactatgtattcctcacttgggtggattctgagcccccaagtctcccacccccacccccttcccacgtgtactgttcaaacaactagggctcttctttctcaggaacagtctgagaaataggccctagccacctatttggccttgaataccaagtgtccatcagctagacgtttgtaattcttccctgaaggtgataattagctcattcataaagaactgattctcagcagtctcgctctcaaagcaggattctacctgaatttctagtgcctcacctgctctttggctttcccgtcagcctccgggagtccctccccagttctcagatataatttcatctctaaaagtccagactgaaaatcacatctgggagatgtatttttaccttaaaaatcagtcaagaaaatgtgggatctggaagtctctcttggaaagagggggcagaggggagctgagcagagggcgaaatcgtgcagtttacgcggagctggggaccccgagcctcagagcgaggggaggccgggagcagcgccccggaactggcgcctcacagacagcgcggggcggccgccacggtggcgggaaggccaagcgctggccctgggttgttcttcacccataaccccttcacctgtaaccccaacaagcagcgaaaggcagtcccgggccctcggcctccccactcaccccgtgcccatcgccggacacagtccgtcggcataaactttccgtcggcataaactttccgtccgcgcgccacagccggaactataaggccgcgcgacagaagggaatccggcgcctgcactccgcgctgggcggggcggtccttggagagcttcagggtcgcccgggcagggttctggctcatcccggagggacgctagggggcgcggcctctcttcgcgatggccaatccgcggccacccctctcctcccacaaatccccaacttctctcgagccttggctgggtttcctgccgtgtctctctgcattgccctgaatctctccccattctcgggctctttccttccccttctgccccactgacccatgggcctcacctggcccggtgactctgtgtccgcttcacacttttgtcccctcactcccctgggccccgtcggtgcacgagcccaacccttcctgctattttcctcgtcactctttagccccctctctcgtatcctctgaaccggttgacagaatcctcttcctgttctttttaaactgcaattcctgaactacaaatcctggccgggcgtggtggttcaggcctgtaatcccagcactttgggaggccaaggtgggcggatcgcttcaggtcaggagtttgagaccagcctgggaaacatggtgaaaccccgctctctactaaaatacaaaaattagccgggcatggtaacgagtgcctgtaatcccagctacttgggaggctaacgcacgagaatcttggggggaaaaaccccaaaactgtaattcctggctgaggtatgctttgtatatccttcttagctgacctgagcccaatttacctcaagacttggcctcttggtctcctcagcccaaatgctcactttatttcccctatcccctctttgagggaagcagagggccctcgttcctctcaccctggacaaggcatgcgtgctcagatttccctgtaaggcaacatgggctcttgcctgccactctggccacctggtgtctccattgtagtctgtgcctcagtgaggtccttaagagggcaagaggtgactttctttctaaccatgtagggagccagggaatcccagctagagataggcttagatggatgccagcaggcccctgggtagttacggttcaaagaacaatgtggaaccacataggttacaaagtgagtacagaaaggcctctagaaggcctcaggcatttgcctttttcttttagctgataggatggggcgagattaggagatgggacgaggaaggaggatg

SEQ ID NO: 6671 - DNA, 6000 bp, Homo sapiens; identical to SEQ ID NO: 3262

SEQ ID NO: 6672 - DNA, 6000 bp, Homo sapiens
tcaagacctactgttaactatctccaaatggctctgcggttattgttatctctaattgctgtgatgctttggagagtctgaaggcactggaatcgttgtttccaccaagaaatggtttcttctacttacttttggtgcagttccagttgagtttccgatgtaaagagttatggctacagagccattgtcctttgctctttacataatgttagggcctgatgattagaaggatgtaagtttttacctcttttgtccaggaataagagtagactgaactacactcaacacttgtattagctatctattgctatgtaaaaagtgatcccaacatgaagtagcttcataataaacgtgttcaacaataaacatgtattatctcacacattttctgtgtggaatctgggagaggtttagctgggtggttctggctcaggatgtctcatgaagttatgtcaaggtgttggcctggggcagtagtcatctgaaggctttgctggggctggactggggttttcaaggtggctcattcacatgggtattggctgcaagcctaagtttcttgcttatggagacccctgcttgaaggcatggcagctggcttcctccagaatgagtgatcaaagagagacaccaaggaagaagctgcaatgcctcttatggccttgtctcaaaagcagtcactttgtccatattctactcgctagaagtgagtcactaggtgtagcccatactcagggtgaggggaattgaggcctactttttgagagatggtatatcaaataatttggggacatatttttaaactgccactgttcttttatttccctcctttatgattggctaggtgcaaaacacatacagatgaacaaaccaatcaaggtcaggggtttagtctggagtcagcaaatggacagataagtactgttccctcagtcttggggtaatttacagagaatttcatgcttccaacctaacaaaataggtggtccccaaagctctaaaaagatgaagtggaaattcggtctgagagagccagattttcaaacaatactggcttctgtgcccttgtgaatatgcagtggccaggaggtagctttactcggggagtgctcagagaatgggacaccaggaaggcttctgaacagggatagaactgcttggctgtgctcacttagactaataggtcagaatgcaggcagcagatggtaagacctgagtaagaagctagctagttctgttctgcaggttggcaaaggccagtcacagatggtgacagtgaggctacaagtagatcccagttctgggatcaagcaagtgccaaagcctcacactaaaattatctgcagcactgctgagagacgtgcaggatccacaggcagaattctaggcttggatagctaaaacagagaccatagtggttctggccccttggtggctctaagtgcaaaacatgaggaagggagcacttggtaccagatggagaggttgcgggaacagagcatgactgtcagaccacagagtgaaacatcgcaccataaagacagatggcgagaggggtgcccccctccgtggcagctcactgccttttgagtactcttactgcctgtgtacccttcaaatgggcctctccaaaagcttctacttccaaagcatttttatctagaagtcaaatgtaagtgtttcaagcttgattccaggctgagagcacttcatagcttttctattttctcacatttagagactaccaggtttctgatgcactaattaacaagggaatcatagaatggtgtaatttatgaaattgagcattggagaaaaggatagagtctttccagtacattcttgctattaagatactcgtgcaaaggcagagggtgtgggaaacagaaaatgcacatatttatacttcaaggtatagatcaactctacatgtcattaccctaccaagaaattcagtggctctgctgctaccacctttagatgcagacaggcagggcttccctttaaaggctctgctctggctcttccccagctgtgctcctacatctgaggagtccattaagccaagaaatgtgtccacctggaggtgactgtaccccttcagacctcacatcaggtacccaggagccagtattccctgcccaaatggctctgagccacttccagagcctgcataggcttctcccctagatcctgagatatgcacccctggacctgtggaatagccaagaaatgactgttttggaggggagaaagtgaagacagagcttggacatgtgggctagtgcgttcatggagtggagggtacctggcactgtagggctgaaggggccatgggaagcaaagggtaaaggctgctccatgtggggagcagttctctctgacctgccttgttccagcaaggagctctgagaagtctcagaattctcaattcaaactgggtcttccaagttgttatgaaagtacatttgtcaaggtgaaaggatataatgcttttagtactccatttgttagctttttaactttcacatatttagacatttggtatgtgggtctccatgtgtagccttctcatggtccctacaaatattaaaattggtcccggctccccatttaatatggaatccaagtcaaatcggcttggcctgatttttaaggccttttactatttgatttttctctaatcttacctcccgctactctctgcaggaatcttctatctgtcaaacctgtcgacctacagcccaggctcagcccacatccttttctctgtgctcaggttcacattatttttctcctctgaaaggcctccgtttctgccttggatttatatggccaacgtagtgtttcattatgacccagctcaagcctcacagccatgtctcctcctctggactcttctaacagcttttgtctcagccacttattggcactcaaagtgtgcaactgtgtgtggccatttttcatattatgcacaaggtgtggctataagataaggagacataaatatgcaagttttcaaaccaggacaagggacagggaaaaaaaaaaaaaaaagaagagttgccaaagaatcaggagaatgtagttaggcagctactaagggaagagatgtcagcattgtcaataagctgagagaggtcatgagaaagataccccaaaatagaccattattctagaaggtaagaggtcttttgtaaccattgaaagaatagcagattgtgtgagcaaaagcaacgctgtagtgggaaaaataagagatgagaaagtggagacaacaagtatacttttatttatttatttagagacagggcctcaatctgtggcccaggctggagtgcagtggcttggtcacagtacactgcagcctcaacctcccacactcaagcgatcatcccatctcagcaccccgcctcccccaccgcgaatagctgggactataggtgtgtgccaccacacccggctagttttttattttttgcatataggggagccttattatgttcccagactggtttcaaactcctggcctcaagcaatcctcccaccttggcatcccaaggtgctgggattacaggcatgagccacagtgctcagcagcaaatataatgtttcccaagaagtgtgattcctaggagaaaggagaaggtagtttgggtggaagagattgggtggctttgttctgttcaaaggatgggcgagactatgtttgtgggagaaagatttaggttagaggaagaaattaataatggggaaagaaagaatagctgaataaaatctgggaatggctgggatccagggcacaggtgcaagatttaaccttgaggagaaagggcacttcttgctgtgggtgagggagtgaagagggtaagatgaatgaaggtacaggataggcataataatgaagagcctggatttaagggtgaagccactggctcacattatagaggaaaggctaggaaagccgaattttctggggccaggtccagatttaatatatttaagtataacagtcttaattcattcctttcaccttattcagtgccctgggtgtgccaaatactactgggcactggggtctacaaaggtacgacttttcatgtaatgttggaatttgttatgttggtaactcgagatttgcatatatttaacagtcttaattcattcctttcacattattcagtgccctgggtgtgccaaatactactgggcactggggtctataaaggtacgacttttcattaattttggaatttgttatgttggtaactcgagatttgcttttcattcttctggaaggctgtatgtagaaataaatacagtcatcagacgagttctttgtcagaccagatgtcctgggttggggtttggaaaacatgggcatcttaacaatggtgccctgtttgaggtggagagggaggagaggcccaaatcggggaaaggaattaaatggaggtttagacgcgggtaaccggagtgggtgggccttcaacctggaagatgggaatccccagcgcacttcgggcagcgctgtaaccaagggtaaccgcacctcggtttacaccggtgtgaagaccagcctcttccccaaaccaggtgtatctacggcggcctagcaggaccacacacaagccaagcacgtcacgtcattcgagctaccttaccgcgaaagtccactgcctcctactacttctggtcactactacctttgctcacagtttattaaggaggagcggagaagaagaggggcggagaaggggcggggagaatcacctttccttttttacaattggtcgtagtagactccgagtcctgccgcccgtcctgcagccgacaggctgccaggactgtcactcgaggagctgccgctaccgccccccgccgtggccccgccccttgccgtggctgggatctcgcgggaagagctgcgggcacggcggtggctcggtctcccggctgcgcgcggagcgggagggctctcctcacacaagcgcttccttgccgagaggctggagctgcggcaccgcaggcctgagccaccccttctctgctgtctccttctcttcctcagggctcccgtgtctgctcgccctccgacgctgctcaggttagaaagcccggagcgcgtctccgctgaggagcggtcggggagcggggacacggagcagccggagcaggcgggctcctgacgggggcggctctgggggctgcgcggcgctgcctggtgggcgcgaggcttggcggggtttgggagtccggggggcgaggaggcggtgcagtgggatccgggcgcgggcgcccaagggcggtgtagcgggtgccggagctcccgaggtgagggggcaatgtattagggatcctgggggctcttccggcttggggtaggggtgggtggcggcacacggggtcctaggtctttgacgtcgagggagatttatcagggtcttgagcttcttggaggtggtgtagcggggttccgggacaaggggtctttttacccgggtcccgagctctttggggcagagaatgcagtttagcaaggtttacaccggtgtaaaccttgtctctggaggcagatcatcggggtcttgggggttctttgagcgggcgtgggcgtccgtttcgcattgctgggatgaagaagcagtgtgtccgggttctggggagaggggtctgttcatcggtgtctccgggtgagagagcgatgtatccgttccgctggggccggggccgccttggggggttgttgggggctgagggtgtgtagcggcgaccagcgtctggccggggtttctgctttgcccggagcggggcggtaacttggcatggtctccagtcttttgggggcgacggggcgagttagctggcccccgggcagtctctcggggtgggcgcggctccgcaggcgctgggtccgctgagggcgggagagggctttggtgctaccgcgcaggctgggcagcatcctgaaacgtttttgttcaggtctccttctctctg

SEQ ID NO: 6673 - DNA, 6000 bp, Homo sapiens
attttaggtttgggggtacaagtgaaggtttgtcacacaggtactcatgtcacaggagtttgctgtatggattatttcatcaccctggaattaaacccagtacccaaaagttattttttctgctccagtctctcctcccaccctctaccctaaagtagacccgtgtctgctgtttccttctttgtgttcgtaagttcttgtcatttagctcccacttataagcgagaacatgcgatatttggttttctgttcctgtgctagtttgctgaggataatggcctgcagctccatccatgctcccgcaaaaggcatgatctcattcttttttatagctgcagagccctgattatttcatctatatctctaaaagtttatctgttcaagttggccacaaagttttacggggggggattgtttttgtttttattttttgaggcatggtcttgctctgttactcaggctggagtgcagtggcaaaataatgtatcactgcagccttgacctccaggctcaagtgatcctcccgagtagctgggactacaggcacacgccaccacacctagctaatttttttttttttttaatgtagagaccgggttttgccctgttgcctactctggtcttgaattcctgggctcaagctatctgcctgcctcggcctcccaaagtgccgggattacaggtgtgagccgccgaggggcctgggggagtggggtggattctaattggaaaaatggaggctcaccttattttcagaagcaccttatactcaggcatatgtagtgtatgctgatgactcacttctccagtcctatctccctgctaaactccagatccaagtaatgaacggcttactgatatttctactcagatgtatttaaagtacctatgtatgcataggtactttaaatttccttgtccaaagttaaactaacattgtctcccatctgctcatctttctcattcccccctcagtgaatgccaccaccttcattcagcttcccaagttgaaatctgagttacccacatctcctatctctcccacacacccctgctgtttctatctatctcctaaatctctctcttatctgttcacttttcttaatcccctttgctttactccaggccaccatcatctcctccctagactattgtaacaaaatctgaactgtttttttttttttttggtctcgacttcttccaaactacactccaagaagcagcctcagtgttccctctaaaacgcaaatctgaggtcaaatcccacctgtaggcgtggctgactcctatctaccttcaggtctctgtttagaggccaaagcttctctaattctccttctcccacccccacacacaatttagtcaagttagatgctcttactaagttttcccacactccttatctttccttaccataacagtctttacacttctttgttataattgtttaccctttctgctagactgggaactttgtttatctggctcatcactgtcttcccttaacataagccaggaccagagacacaggatgtactttataaatattaaatgaatgaaccaataattttgttatcccagcatccagcacaatacttggtgaaaacaggtcctcaataatttttgctgaattaatagattgttgttgaactaaagatatgtgatcaactaagcaacatgtgacaagcaaaattaatattgagcatgcttgtacttaaaaaggagcacacatcctttttaattacgcttaatcagagatggctccctagagcaggtggcttctgaaggagaacgggagaaaataaaaattcttacctagtggaatgtaaagggcaaatataaaaataacaatctctgtgcagaagaaaatcactttcttaagactggggcaacttctagttgaagtctgctgtgactaggaagtgttctatcctgagatctgctagtcaggggactagctttcttcttctcaacctcggacactgggattcagccagggaatcagctgcagaatctcattactgccagcagttaaacactgaattgtacgtcctttctaatgttgaaaaaaaaatccttttactatagagaataagattcctaccaagttttatattcataggctttaatatttcatgtaatttttatatcaaaatacattagcataaatttcacaagatatcagtctagttatttttggcctgcatttcgataacttttacagacacacaatggccactctgttttctttgctctaaagtttctttgtgcacttattccttgaacatgggcctcatgttctaactttacttagatgaaaaaactgttaatttcaccagtggtttaatatctcttcatagattgatagtttagacaacataaaagtgttgattagcagtatacgtgcaggctgaagtatttgttgaaaatcttgttgggagaataagaatgataaaagagatgcctaagaaaatcttttctcagatatgctttactaaacaaagaacaggttaattactcaatgatgatttttaaagggcatgtcgacagtgtcagtgactttgaaacaaagtaaaggagctgaattcaagtgtgtgcctgagttacttaactatcttgaactgatttaggatctgtagctttaatctggggctccatctactagtggtttaatagagtgggttttattaaaattgtgatttaatcagaagccagaaatatacaactgttttaaactttttgatattaacctgatatacacagtgggctgataaattagtgagacagttcatataagtcatatatgaaaatcagtctgttattagccacaactcatgtatttttcaaaacttggagataaatgtaagcttcatctcagaagtcatattacacgttataggtttaatataatgaaatttttccagacttagaaaagatatcaggaaattaacatttgcaaggcaatttacagttttcaaagagcttttctcattaattatctcagaaaactgaataatgatgtgattattaaaggttaattaagcaaatacttgtgaagtaattgggaggtaatctatttctaatttaacaggtcaatcacgggtatttaggaaatatttttgctggttaacaactctaaccaaaacaaaaaggtatttaaatggtttccctagtgaaaaaccataagcatgtgtttcctctattaagtcaattgtttcaaagaactagcatgagaattcctaatttcaccgttttgatgatttaaggttttatgaagattctgagctcttccctcccgacgttaatccatgtcttacattgttcattttggcgctttagaataaaatatctttggaaagtaactatgagaaagcacagagggatatgttagtgaaatagccattttcttgtgggaagcaagacatttcggttatcgactacacagaagagtgaataaaacccaacgcctatcaaccaccaaacgtgactctgcttgcataatcatacaaataaattttctttaaaaatttttcatgggtgcagtatataaaatgatcaatagtctcatcagcagtggaactacaaactgctttctcctaactttgtgtagcctgggtgctgcctcacgattactaagtggtttaaaatcatatcccacttgctccttggtttatcagcgaaagacgtgattcccaggtaggaaaacgccaagtgtcccgcaaaggtacaggtaaaacgtagcagttactgcgagaagactggccccggggagtcccagggctcggtcggggcccccgcacgagctgaggaagtggacagcgggcacctttgtctgtgcctagttccctggacccgggccgagcgatgcgggtgggggcgcggttcgggcgggtcccggcgctgcccgggggaagcgcgcggcgacggcggcccggcttgggagccggaggtcagcggctgcgcggccggccccctcccacgggagccgcgccagggcccagcaagagtcgggcgggatcgctattgtttttggcgagcacataaatccccgggccgacccactgcgcacccaggtttcctcccggaggcctttcggtttcctctgaggccctatatagaggctccaggcccggactgtgcagaggtgcgcgcccacgccggcctcccggaccagcctgagctcggagcgcctctcgccctcaggtctctgcagccagaggcatctggggaggtgaggggggaatttgtccccgaggcgaggaggaggaggcgggggcgcgcggagccgaggggctgcggcgagcgggcgggaggagcaggaggatccgcttctccggggtttccctgacgccagcagcagcgcccggcgcgcgcgccccgcacccgtcagcggctccggggagaagggggaggggagcgggcccgccacggcccgagaggcggcagccgggattggagcgggggcgggccgcgcgcggagccgagggggtgcgggcgaggcgcgcgcgtgcgcgtgtgcgcgcccgggactcccgccccccgcccccgcccccgcccccgccgtccgcggtctccgcccccctcgcgctggtgtgtggagccggagtcggcggcgggtggcggcgcctggaacctggagaccgacccaccgcccccccccccccgccccggaatgtactgactccccttcttcgctctcctcccctccccgcccccttgcaggagggaggcgccctggagtctcccctccagcgagaggggctgcgcgggccgggccgggccgggctgggctggagcagcggcggccgcgggagccgagcttgcagcgagggaccggctgaggcgcgcgggagggaaggaggcaagggctccgcggcgctgtcgccgccgctgccgctcactctcggggaagagatggcggcggagcggggagcccggcgactcctcagcaccccctccttctggctctactgcctgctgctgctcgggcgccgggcgccgggcgccgcggccgccaggagcggctccgcgccgcagtccccaggtaagcggcgggcgcgggcccgggggttcgcgggggcgcggcaccggctcaggcggccgcggctgcggtgtttttgtttaggatccaggaggaaacgtgcaggaacttctctgcctcggctccggttgccgaagagaaaggggatcgcgcgtggtggggaggagaagggcgagagggggcgccaccggggaaggggcggctgccggggggcaggtcgggggcgcaggggtctagttcccagctttgtacctggaggcaggttcacccctcgcctctctcccctcccccaggctcatcccacttgtaagagtgggacattcttgtgctcacactagcaccagtagaggccactacacacctcattaaataaacaatcagacggccaattcattaattttcaggaaaggaaaggggagggggcttgagctcctggttccctggccagggatttcccagcttccgaagtctcgaggaagagctggctagtctcgagggactcctcgcgcggggattggagcccgagtctgcggaagagcgggggtgtcagaggggcacaattgcccgctcacaacccctggtgttgatttaacgatgaggacgccttggagagcggctcggagtgatcgtatctgttagtgtttccgttatgaaatgcctcttctttcctggggattacaactatatttacagcctattaaccactcttaaccaagggaattgtctaagcatcagattttaggtacttgtacaatgttttcagatggcattgtataaacattgaacctcaaaagccattttcagttcttttttggaatattatagattactgaaaccacctgcattcctattaaggggaccaacgaacaaaaatgccaagccttccgggaaggaccttacggtattgttgagcaggatacactcagcagttgaaaggcaaattagcatgtaatctgtta

SEQ ID NO: 6674 - DNA, 6000 bp, Homo sapiens
actcccaatgagatagaagagttcccctggtagcatggtgctgtttttagtttgttctgttgttttgttgttttgttttttaaactctgtacaaccctcctatttggaggacctgccaccttccttccgactcaccagcagcaggacacaaactctgaaatggcttcccggtattgggagtgttgtcagccaagattatagtaaagaaattggaaagggaaaggggattgaatggttcagtttcaccggggatggggaggaagacagataatggaaagggtgaacagggaagaagagcagaggctggtgagtcagatagaagcagctagttagaaaagactgcttagaagctctttcgttatgttgttgtgtgtgtattagggccttagggttacggagtgttcccaggcgatcctccctggaggacctgctcctctttcattaggctgctcctgttattttgcttgccagatgcttccagctggcagtagttggttctagacatttgaagcctattccaagactcaattcccaggactaagaaactaggaagccggaacctgcagtggttgctatgcaccatattcagttttacaccggattcagtcatttgagagaaatgtggttgccttaagtctaggctggatggaatggttcctgatggcaccctatgagtcctaagtgagtgggcagagtggagtgcgggtgggtggcttttgccaagacatcaaggatttgaggcctaaaaatgcaaacaacttgggaagtaatatgcaccaaccagcctgagggaagggaggccagtgccaaggtattggcttagtgtcgcagggatcctcgataaaatccccaatcgccacttgggccttaaatccctgacactgccaagaattgatttttgtttcttatggaagcagtcaaaatgaatacattttcagtatcattcttaggagaggcatctcaatgtttctgagccgctttctatgagatggactgcttagctgctctaaaaagacagaaatatctccatagcttacactgtacagtttgcattatctaagtgtatttaaatagatgagagagacactttcccttttgcatgtcaaaggaggcaaaaggaagttttctcctaatttcagtcataatttctgccctgaggaaagttataatgttctactgtatggatacaccacattttgcctatccattcatctggagatgtagacacttgcgttgcttccacattttgcctattgtgagtaatgccactaagaatatgagtgtacaaatatctctctgagaccctgctttcaattctttggaggtatgcccataagtggaattgctgaatcatatagtagttctatttttatttctattttttgagacagagtctcactttgtcacccatgctgaagtgcagtggcatgatctcagttcactgcaacctccgcctcctgggttcaagtgattcttctacctcagcctcccaagtagctgggactacaggtgagcgccaccatgcctggctaatttttgtattattattatttttttagtaaagatggggtttcaccatattggccaggctggtcttgaactcctgacttcaggtgatcctcccgccttggcctcccagagtgttgggattagaggtgtgagccaccttgcctggcctatttttaattttttgaggaactaccagactggtttccatagctcaaggctgctcctttaacaagctttccccaaagcctcaatcagtgagtttcatttccatctcatttgccacactgggtcacgtgactgcctctagctgcaagggggtctgagaacccacgtattttcaactaggcatagaacttcttagaacaaatgctacactctgttggtaaggaagaagtagagaattaattttagtggacaactagcagcctaagggcaaatgagaacactgaagggcttcaggtaagcaagagacattgtgggaggatttgcgctttagaaggctctctctggcagctatggactgaggagtcacagtcagcagaattagttaagaggcttcaacaacaatccagtgaggagtgatgggggttcagatgaggatggtgtggcagtagggtattcaggaaagggagggattcctaacatattctagggcaccccttcaagcctgcctggatattggcagtgggaagtggggggaagtgggagggaacgagggatgagtccaggttttgagcatagtccttcctgtatatctagaaggggaaacaggttttggggacatgtgataattcaattttgcacatgttgaatttgaggaacctgcaggatggtaggtagataaaaagtgggataaggcttgtcccaatctgggtcttttgggattggtttgtgacctccttggggaacttgaagcaaaactggagatagcacattctgagtcatctactactgtgctgacctaggaagcaggttgtggggaggtggggggtgggagggatagaggtgagaggggtagggctgctgtccagaaagaatgcatgaagacaaccttccatcctgagtttttctggttctgacgggaatctctgtgtagcacctccattcctgagttcccagggacaatcaggcaaacattctctgaaccaaggagacccctgcatgatgggatggtcattctagctatctgtgtccagatccaagtgtctgagtctcagatgagctggtcctacacatgtgctatctgtgccctgcccaagctgtttccccctcctaggggatcagagccctctcaatctgctgcttccaggaatgagagccaatacacatttccttccctcctgacctctgctcttgaatgattattttaaaatctccccccatagacacactataaactgctctgtgatgttccttcactgtccaccatggctgagtcatgccagattataaatcccttaggacaggaccagcgtcaccaccgcaaggcacaaggcacaggactgactctttgtgaagggaaggaaagtaagtttctctagatctgttcaatgccacctccagggtcctgcagcagggctcctagctccctcagcccaaggacacctctccatgtgatgctacttccccaggttgctgggccaactggaggctactcatcctgagacctgtaaggccagacccaggctggacgaggctggtcagggcctggcagggcagtggggagcagcgtggaatggtccagagttcctggaggtggtcagggacaagacagctgggcctctctgctgtcatccctaggagcagtcagcaattacacagacacagctgctgtgtgattcaaagacacatatgcacgtagactcaaatacagagttgcttgaatgtgttcacaaatatacacacccggccgggcgcggtggctcacgtttgtaatcccagcccttttggaggccaaggcgggtggatcacaaggtcaagagatcgagaccatcctggccaaaatagtggtgcgcacctgtaatcccagctactctggaggctgaggcaggagaatcgcttgaactcaggaggcggaggttgcagtgagccgagattgagccactgcactccagagccagactctgtctcaaaaaaaaaaaaaagacaaaaaccccccacaaatatacacacccatgcaccaccacccctacccatacaccacacgcacacttaaattcagagggcaaatcccggttcctcccttcatagctatgtgtccccaagttacttaatctctttgtatcttaatttccttatttccgatctgtaaaaatgagaataatggtattcacctcaatgagttgttgtgaagattaaatgagataaaatggtaaagagcttacaacagtggcaacacatgcagagagacgcacatgttttcatactcatttcccaagccctgcccagtactgccactggcactggtggtgagcctggcagcagtacaaggttggagtcccttcatccctttgagccttggttttctcatctgtgaaatgggaataataatatctagccggcggggctgtttggaggaactaaagaggcccagcatggaaagctcctaacctaactctggcccacaaaagtctccctacgttttagctgtcactgtccctgtgaggaagaacagatccaagaacaggtgcagggatgggctgcaccacagcaaaatctggacaggcccgacccccatctcctcccaggctggagcggggccctgtaaggacagagcccaaggccactaggtgtcaggcctgttggagccaagtccggccagcagtctggggtggggctgggggcagggctggtcggatggccgtgggtggaaggaaaagaggaaaaccagctcagtggaaattgtcctgcggttggctcaggcgcccacgacactgtatttatagagagctccttgcagctcttaattcctcgcagtcgagttaaccctttctgggctgtggtgccagcatggtgtggaggaagaacccaagactggggttggacagcaggattccagccctgttctgccgccagtcgatgaccagtcagtcacctatcccctctcgcagaaaggaagattcggctcttggaagtgtgggaacggggtgggggatgggcagcgccctgctccgggagccgagggttttccccgccagggtcaggcctgggggcggggcggggcgggggcgggggccaggccgtgtgctctgcccagcgggctggctcaggcctcggtcagcagccgccaccgcggggccaatccggcctcagggacgcaccggagccgcctttccgggcctcaggcggattctccggcgcggcccgccccgcccctcggactccccgggccgcccccggcccccattcgggccgggcctcgctgcggcggcgactgagccaggctgggccgcgtccctgagtcccagagtcggcgcggcgcggtgagtgctggcgtggcgcgggcggcgcggggtggggcggcctttgtctgctgcgggccgggcctggatcccgcggaggtccgcacgttcccgctcagggctgcaggagctgagcagggcgccttccctccgggctcctgctcccctgccctcccccaggtccgggcggcccccctcgcacaggagtcccgggaaccgcgggcgcccctcctgccctgggctgtggggcccgcggagagctgggggctcccggatcctaccccgcccccctttcctcgggttgagaggggcccgggcgccgtcggacctgcagaccccggaagctgcggaccgggccgggtgggtgaatgcgcttttgcaggccccgggtctggagcgggcatgggggcagatctgtcccgtgttgaagcttaacgaagccaccggccggcgctgggaggttagcggggtctcgggtcctgcagaggaaaacgcccagctccgggaggggagcggcggggagggaaggcgagtggttaggcgtgtccactctgcagggcccagcagggcgaaggtgtgggcgactggtgcacttccacaggcagccgtgggcagcatgaggggtcagattccgggaaggacaggtagagacggctggcaggggccacggggtgaataggtgttgggggtggggagggaattgggatgggcagtttgggcttgggaagcctcagggaggtggggggtgaggtgggatggagaggagatgcgggcgacggtggagggaggtggggaccccgagtgggggcacactagaagggaggggattgaattccagcgcccagggccctccctgcgaccgtttagctagcgaattggcaggtttggcagcctaaggcaggggatttatttctaagccaaacctgctctaatgagaaaagcgtgatagatgactcagatatgggatctatcactgagggaaaacattaagcaaatagtaaagcaaaaaagatttgtgtgtgtgtgtgtg

SEQ ID NO: 6675 - DNA, 6000 bp, Homo sapiens
agcctgagcagcaaacatgcattcaaaagcaggttcgagaatgctcctggatgggcacggtggctcacgccggtaatcccagcactttgggaggccaaggaggacagatcacctgagttgggagtttgagaccagcctgaccaacatggagaaaccccatctctactaaaaatacaaaattagctgggcatggtagcctgtaatctcagctactcaggaggcttaggcaagagaatcgcttgaaccgggaaggcagatgtggtgagccgagatcacgccatcgcactccagcctgggcaacaagagctaaactctgtctcaaaagaaaaaaaaaagatgctcctgacagcagggctcatcttagcccaacagaggaagcaaccgaagtatcaatcaacagttgaatgaatgaataaggtgttgggtattcatattataatggaataccgtgcagcaatgagaatgaactataactatgcccaacatcatgaatgagtctcataaaaaaagaatgttaagtaacagaaaccagaaaccagacacaagattatataccgcccactgaaatgtatacttaaaatggttaaaatggtaaattaaaattttttttaaaatagagatggggtctcactatgttgcccaggctggtcttgaactcctgggcttaagcgatcctcccacctcagcctcccaagtgctagggttacaggtgtgagccaccatgcctggccctatagtgttaaatgttatgttatgtatattatttcaccacaaccaaaaaagtgtaggtgggggaccatagaactgtacaacacaaagtgcatcttaatttaaactatggtcgtcggttaataataatgtatcagaggctgggcgtggtggctcacacctgtaatctcaacactttgggaggccgaggtgggcagatcacctgaggtcaggagtttgagaccaacctggccaacacagtgaaaccccgtctatactaaaaatacaaaaattagccgagcatggtggtgtgtgcctgtaatcctagctactcaggaggctgaggcaccagaatcgcttgaatctgggaggaagaggttgcagtgagctgagattgtaccaccgcacttcagcctgggcaacagaacaaaactttgtctctctttattttattttattattttttttgagacgagtcttgctctatggcgcaggctggagtgcagtggcgcgatcttggctcactgcaacctccacctctggggttcaaaggattctcctgcctcagcctcctgagtagctgggactacaggcatgcgccaccatggtcggctaatttttttgtatttttagtagagatggggttttatcatgttggccaggctggtccagaactcctgacctcaagtgatccgcccacatcagcctcccaaagtgctgagattacagatgtgagcctccacaccaggcctgagactctgtctcaaaacaacaacaacaacaaccagaatgtatcaatattcatccacgaattgtaacaaatatattacaccactgcaagatgttaataataggggaaactgcagagtgggggtggtaaatggccacttttacctccctcatcatactttccactcaatttttctgtgaaccaaagactgctctaaaaaaatctattagctttttaaaattccttggctcccctccaaaaagtgtacatatgacatgatctcatttatgtaaaatacaacaagcaaaacaaatccatgcaatagatgttggggtcatgggtacccttgagaaaggaacacaacgggacttcttggatgcttatgatgtctcttgattagagctggttatatgtgtgtttgttaagtttgcaaaaattcatcaagctacacatgatcgagctatacatgacatatgcacttttccatttatttatttatttttgagacagaatcttgctctgtcacccaggctggagtgcagtggtgcgatcttggctcaccgcaacctccgcctctcggattcaagcaattgtcatgccccagcttcccgagtagctggaattacaggtgtgcaccatcacgcccagctaatttttttttgtatttttagtagagatgaggtttcactatgttggccaggctggtcttgaactcctggcctcactcaagtgatcctcccacctcggcctcccaaagtgctagaattacaggtgtgagtcaccggtcccagctgacatatgcacttttctatattgtatcctgtaatttaatttttttaagttttaagaaaacattaaaaataaaaagataaatagtctgtcatacaggagaatttcaaatagtttatggagataatcccccctcaaggagaaggagcgtaatcccccactccttcggtgtgggctgtgcatagtgacttccttccaaaaggtacagtatggaaaggtgggaaaggagtaactttacagtgaagagacctgacacgcactaccttagccaggtgatcaaggtcaacatccacatctgtaagtcacattgataggatgtaaccctgatatgatgtgacgagaatggcacctaacctccaaggtcttcccaccaacaaaccataaccccaggcttaccatgagaagaaaaacatcaggcacattccaatagtgggcatcctacaaaatgtccaaccagtactcctgaaaattgtcaaggtcatcaaaaacaaggatatcctgagaaactgtcacagccaagaggaatccaaagagacgtgatgactaaatgtcatgtgatatccaatgggtcctggaacaggaaaaggacattaggtaaaacgcaaggaaatctaagtaaaccatgaactttagttaattagagagacagacagacagagagaaagaaagagtccattttctataaaaccgagcctaacctcaaaccttgacctttttcattgagtcatctgaacccaatggagatatagacaggaaacaactttcctcttctcccattcatggccttcaaacatgctctgtttctctattggattccccatccatctgccttggcatcttcacaggttgatcccacagttttctcattttcaggaataaaagcccactccagtctaaatcaaaacttccctctcacatccatgccgggcacagtggctcacacctgtaatcccagcagtttgggaggccaaggcagaaggattgcttgggcccagaagttcaagaccaacctgggcaacatggcaagacctcctctctacaaaaaaatgtttaaaaataaaaaaattagccaggcatggtgcacacacctgtgattgtggtcccagctactcaggaggctgaggcaagaggattgtttgagctcaggaggtcgaggctgcagtgagccatgattgtggcacatgaaccccaacctgggtgacagagcaagactctgtatctaaaaaaaaaaaaaaaagatagcaaacttccttttcacatccaatttaaggcttgtcctcctcctcctcttagatctgactgagatctgggtccatattaaagactcctttagtacaacaaacaccatatatcctcacgtaagtccatgaatatctgacatttctcatatctactttctctcgatttattgatagataggtatacattgttttaattttatgggtacatagtaggtgtatatatgtatggggtacatgaaatgttttgatacaggcatgcaatatgaaataagcattcatggagaatggagtatccatcccctcaagcaaggataaacctttgagttacaaacaatccaattacactctttaaaggtgtacattttttttttttttgagacggagtctcactctgtcgcccaggctggagtggagtggcacgatcttggctcactgcagcctccacctcccaagttcaagccattctcctgcctcagcctcccgagtagctgggatcacaggcacatgccaccatgcctggctaatttttgtatttttagtagagacggagtttcaccaggttggccaggctggtcttgaacacctgatctcaggtgatccgcccatctcggcctctcaaagtgctgggattacaggtgcgagccatcgcgcctggcctagaggtgtacattttttaacagaaccattcaaaaggaggttgtggggatcatgacacttccatgctacagcattaatctcctaagaataaggatacactcccacataccatgacactctgttcacacctaaaaaaatttacatttattccagaatatcatctaatctccagtccgtgcttacatgtccccaattgtccccaaaacatcttttatagatttttttaaaattttgtttaaatgccatatccaatcgatatggcaatcaaatgcaaatccatattgcatttggttatgtctcttagtctttttgcataaggggggcctctctttaggatgcaaaatctttatcatctcttcttttccacttggggacttgggctgaaaatcaggagtggctggaacacgcccatttactgtttggttttgcaggttgttggagggtactacagaagaacatccctctggagaggggccgtgagcctggttggcctagactgagtgccctggcagagctcttcctcatgtgtgcagtgggaaagaagcccagatcagtccaaaggcctaacccccactcccagaccctaccctactcttcagagaaataggctccctaccctgaaccctaaagacagctgtaccttcatccccagggacccagcaccccttctggcctatccccaaagagtcaccctgggtcttaggtagtaggtggagctgagggataatggcccaaggccaagagttgatccttccaactttgttcagtgatccagctttcatatcaggtgatcaggacaaccaggccaatctgatagggggcggtgtttataaaaaggccactcacctagagccagaagctccacaccagccattacaaccctgccaatctcaagcacctgcctctacaggtacctttcttgggaccaatttacaatctctgggatccccaactatagaacctggaagctagtggggacagaaagacggggagcctgggctaggtgtaggggtcctgagttccgggctttgctacccagctcttgacttctgtttcccgattttaaatgagcagtttggactaagccatttttaaggagagcgatggggagggcttcccccttagcacaagggcagccctggccctggctgaagcccaaccccaacctccaagactgtgagaggatggggactcatccctggaggaggtgcccctcctggtattgataaagaatgccctggggagggggcatcacaggctatttgaaccagccctgggaccttggccacctcagtgtcactgggtagggggaactcctggtcccttgggtatatggaaggtatcagcagaaagccagcactggcagggactctttggtacaatacccagcatgcatgctgtgccaggggctgacaagggtgctgtccttggcttccccattttggagtggtcacttgcctctactccagccccagaagtggaaactgagatgatgtgtggaggagagagccagcgttcatgttgggaatcttgaggctcctttccagctctcagattctgtgatgctcaaagggtgagctctgtgggcccaggacgcatggtagatggagcttagtctttctggtatccagctgggagccaagcacagaacacgcatcagtgtttatcaaatgactgaggaaatgaatgaatgaatgtctccatctcaaccctcagcctggtccctccttttttccctgcagttggtacagatggcattgtcccagtctgttcccttctcggccacagagcttctcctggcctctgccatcttctgcctggtattctgggtgctcaagggtttgaggcctcgggtccccaaaggcctgaaaagtc

SEQ ID NO: 6676 - DNA, 6000 bp, Homo sapiens
ggtctcgaactcctgacctcaagtgatccacccacctcagcctcccaaagtactgggattacaggtgtgagccactgcacccagcctctctgtttctgcttgtttttttcctctttcttttctctcatctctcccttctctgccctggcaactggctcatcacagatgagcaagacatagatcctgcccttaaggagcttgtgaactgatggggaaccttctcaggactcagtctgctgtccggaaaagtgggggaatacctgccaccagcaccccaccaatggggcagaggcggtgggaagtgcagggcggctcctcagacactcaaagaacaggcagggacagcaagggcattcctggcaaaggaagggcactgcccagccaaaggtggtgaggtgcgacagcgagctgaccagcttgctggggctcagacgccaaggggtgtggcttggaagccagtgaagctgaagcgaaagcaggggcctggacctcacctgcctctgtaggcccaatgaggagctcaatgttatgggaagatagccagaagcaattgaagggcttaggacagaggtgtggcatggccagatctgtattttattttattgtatttatttattttttttttgagaaagagtttcgctcttgtccaggctggagtgcaatgatgcaatctcgagtcactgcaacctctgcctcccgggttcaagcgattctcctacctcggcctcccgagtagctagaattacaggcatgcaccatcatgcatatttggtatttttagtagagacggggtttcatcatgttagtcagactggtctggaactcctgacctcaggtgatccaccggccttggcctccctaaatgctgggattacagacgtgagacaccgcacccagcccagatctgcattttagaaagacctttttcactgcagtctgggagacggtgaggaggctgcagtcagcaggtagtggggaagaggaggataaaggggctgctgtcctattgagctgagcactgtctgccaggccctgttctaaatacgttccatgtaacttttcaaacaactcttggaggcatataccattaatgctcccattttacagataagaaaactaaggcttggcaagattaaggaaccaggtaacacggtatgaatggcaagaacaaatgtaagaacctgcctatggctagatgtggggatgaggcagagggaaggatatgggagcagttccactctctggtgtaagggggcggtgccacctgggagacctgaggcctggaggaggatgaaggggctggagaagaggaattcagtttggaattcctgggggccttagtgacatccaagcagagatgtccgctgcagagagacacattcattcaagtcttccaggagaggctggctagaagtagatttgagagtgtgcacagggatgtgcttgaagtcatgggcatggaggagcttggtcagggagtgtggggttgaggagaagcaagccctgaggcttatgggggtagggagggagagcagctggcaagggattagtgaagggagcagccaggggcagggggagaagcaggtgggccttggggggactcagggtacaggaggggtcggggagagcaggtggatgtcagcagcatttcaagcggcagagactgggttgagaagagtctcctaggaccaaagaacaggcatagctgctcaggcctttgcgagggcgttttccatggagtggtggggacaggatcgggaagccaagggcttgaggatccagtgggcttgaggggcttgaggatccagtgaggaggcggggacagaatggacaacctgtccaccagtgtggctgtgaagggaggaggagcagatggaggcaggtgagggcttggtgttgcaaaatgcttttttttttttttttttgagacagagattcactcttgtcgcccaggctggagtgcaatggcgcgatcttggctcactgcaacctctgcctcctgggttcaagcgattctcctgcctcagcctcttgagtagctcagattacacgcctggctaattttgtatttttagtagagatggggtttcaccatgttggtcaggctggtcttgaactcccaacctcaggtgatccgcctacctcggcctcccgaagtgctgggattacaggtgtaagccactgcacctggcctgtgaaatgatttctcatagcatgttctaacatttcacatgtacaactttgattttaatccatttgtaaagcttcagtcactgactcctattgggaacctccaaagcacagtaaaatttcagctatccaggattcttggcaaatgagtcattctggaaaaccaacttttatttggatgaaaatatttgaaatataggatttctttctttctaaaaaaaatttttaatgaaaattttcaaatatataaaaataggccagtgttgtggctcacacctgtaatcccagcactttgggaagccaaggcagaaggatcacttgaagccaggggttcaagaccagcctgggcaacaaaacaagacccccatctctacaaaaataaaaattaaaaaattagctgggggctgggcgctgtggctcatgcctgtaatcccagcactttgagaggctgaggtggacggatcacctgaggtgaggagttcgagaccagcctgatccaaaatggtgaaaccctgtctctactaaaaatacaaaaattggccaggcgcggtggctcacacctgtaatcccagcactttgggtggctgaggcgggtggatcacgaggtcaggagatcaagaccaacctggcaaacactgtgaaatgctgtctctactaaaaatacaaaaaaattagctgggcgtggtggcaggcgcctagtagtcccggctactctggaggctgaggcaggagaatggcatgaacccggtgggggcagagcttgcagtgagcggagactgtgccactgcactccagcctgggcaacagagggagactccatctcaaaaaaaaaaaaaaaaaatacaaaaattagccgggcatggtggtgggttggtgggtgcctgtaatcccagctactcaggaggctgaggcaggagaatcgcttgaacctgagaggaggaggttgcagtcaaccgagatcccgccactgcactccagcctgggtgacagagtgagacttcgtctcaaaaaaaaaaaaaaaaaaaaattagctagcaaggcacggtagtgtgtgcctgtagtcccagctcctctacaatcctgccattgcacttcagtctgggtgacagtgagaccctgtttcaaaaaataataaaagtagaagatataaggaacccctgcatcccgccatccagcttcagcacttaccaactcaaggtcaattctgtctcatctctaccccacctgctcaccaacaagccctggaatattttgaagcaaatccccgatgttacagcaattcatctgtaaagcttttgtatgtttctccaaaagacactttaaaaacataaccacaagccaggcgtggtggctcatgcctttatttccagctattcaggaggcaggaggatcctttgagcccagaagtttgagtccatccttggtaacataggaagacaccacctctcaaaaaaaaaaaaaaaggccaggcgcagtggctcacgcctgtaatcccaacactttgggaggccaagtcaggcggatcacgaggtcagaagatcgagaccaccctggttaacacggtgaaatcccatctctactaaaaaatacaaaaaattagccaggcatggtggcgggcacctgtagtcccagctacttgggaggctgaggcagaagaatggtgtgaacccgggaggcagagcttgcagtgagccaagatcgcgccactgcactccagcccgggcgatagagcgagactccgtctcaaaaaataaataaataaaataaaataaaaaataaaaaacataaccacaataccatattagttctcaattttttttttcgaaatggatttttgctcttatcacccaggctggagtgcaatggtgcaatctccgctcactacaatctctgcctcccaggttcaagtgattctcctgcctcagcctcccaagtagctgggattacaggcatgcaccaccaggcctggctaattttttgtatttttttttagtagagacagagtttcacaatgttggccaggctggtctcgaactcctgacctcaggtgatccacctgccttgggctcccaaagtgctaagattacagacatgagccacagtgccctaaaatttttaacaattcctcaatatagtcaaatatccattgttcaaaaatatccattgttcaaatttccccaatatctttttttttttttgcagttgggttaaaatttggctccaaacaaggtctgcacgttgcgtttttgtgctgtctctaaagactcccttcttttttccatgtaatgcttttgttgaggaaaccaggctgcttggaaggatgagcctgggggaattcgggagagggagagagggggcagggaggagagaaggatgggtgtccagatagatgtgccatccatgctgggggacacaggcagaatgtggaggcctgtctccctaactgggaggggaggccagggctgctgaagggtgggggccaaccctgggcacccccccttcccctctgccgcatccaactgctggaagtgatgggagacagaaagatggcctgagtcaggagcaggggcagagctcaggttgtcgtggggtcccgctgcccacgtcagactggaggtgagggatgggcggggcctgacagcaggcctggaaggaacaggatgtctatgctggagatagagggagaggacagtgccaaaacccagctcctggccagtccccagctcctccctgcctggccctatcccaggatcccctccccggcctcccagctatgatctaccccggggcccagacttcaggcgccttcacgatgccggcggtcagtggtccaggtcccttattctgccttctcctcctgctcctggacccccacagccctgagacggggtgtcctcctctacgcaggtttgagtacaagctcagcttcaaaggcccaaggctggcattgcctggggctggaatacccttctggagccatcatggaggtgaggggcaggggtggggaccagctatgcccagggtccctcaaagtgctggaggggctgtgacttggtggggagtgggtctgtcacagccatcctctgtccagggtggggcaaggcctgggacagtgccaggcaccccaggaccccttccaggcttgtctcctgctccaccgcctcaacaccccccacccctgcccaagctgtttctcctctgcctctctgcttccctgccccaggacttctctcttctcctctgcctctccttggacccctgcccttcctctacctctgacctgtgaacacacagacacatgctcacacactaagtcccaggcacacagaaggcaatgtggaccagcacaaacctccactctcccggctccatcccagcgggcctgtggctggccatgagaactgggggctacctggagggaagcatcctcatcccaggtgagtgggcaccagcccttccctgtatgtgtgttgtgggtggaagcaggcatgagagcatcttagcccataggtttgtattcagggacttccaaacccagacctacaaagagtgtgtcttctaccagatcttgttcaaaaaagggtttgtgatgatggaactacacgatagagggagtgagcaagaacaatgaggattagagtggagcgtgaaatagtctaggagcatggcttccaaaacatatgctgtgaggtctgtccacctgagagttgggccatggatttaattctgagcctcttagcaggcaaagcaaagacagaaagcagatcggctgtggatttctgtctataaaatgtgagttcttggccaggt

SEQ ID NO: 6677 - DNA, 6000 bp, Homo sapiens
tcttcttgcaatctgtggattgtcttggggagcttccagtctgtttgggcgagaagggacaaacacagggacagggcagtgtggagcagtgtaaggaggagaagcactgttcagggaggtctagggtgagctctctgagcctcagggttgctcactgctggatgagctgatctgacatttctgtggctctgtagcaagtatgtgtgtccctgtatgctcggtgctgtgcaatcaagcacacatgctaagtgtcagggaggtggcatctcacaagaccaggagcatgggggagactgggggaagcaggaagttctttctcttctttctttctcttctttctttctttttttctctttctctctctttctttctttctttctttctttctttctttctttctttctttctttctttctttctttctttctttctttctttctttctttctttctttctttctttctttctttctttctttctttctttctttctttctttctttctttctttctttctttctttctttctttctttctttcttttttggcagggtctcactttgttgcccaggctggagtgcagtggttgaagaacatggtttactgtagcctcaatatctcaggcttaatgtggtccttccacctcagcctcccaactaaccaagactacaggagcatgctaccatgtcaagctaatttaaaaaactttttttttttctttgagatgaagtctcactcttgtcccccaggctggagtgcaatggcacaatctcggctcactgcaacctctgctttccgggttcaagcgatttccctgcttcagcctcccaagtagctgggattacaggcgcccgccaccacacccggctaatttttgtatctttagtagagacggggttttaccatgttggccaggctagtctcgaactcctgacctcaggtgatccacccaccttggcttcccaaagtgttgggattacaggcatgagccaccgcgccagtcaggggaggctctttgttaagaaagaagactccatattgtaaacttccacaggactaacagcatggatgataacgtgattaacaggattatcatggaggtgacataagatggctcaggagccaggctgatgggtttaggtcctggctgtggtagatgtcacaacacagtgcccttcccatacccctttagccactcctgatgtttttttactataagcccctgggattttctgcctgagggtgctctctgctcagaaggcactccggcaggctggaggtgccaggaacagctctcaactaatgaagaaatcatcagtgtcatcactccttcagtgggatgagtaccttgtcttcttcactctcccagagatgcccaatacagtcaagccccatttgtccacagtggtaatctgctgattattgcaccctatattgcttttcttcatttgtttgtttcactccccctctctcctactagtgctccacggaatcatctctcaaatggaccatttatatgaacatccttatctcagtgtctgcctctggggatacccagcctaaagatagtggttcttttatttcttagatctatccatccaatttccttgggcagatcactttacctctctgaatttcacttggctcatctatagaatatggatagtatcacttctttctttctttctttttttttttttttgagaccgagtctcgctctgtcgcccaggctggagtgcagtggcgggatctcggctcactgcaagctccgcctcctgggttcatgccattctcctgcctcagcctcccagcagctgggactacaggcacacgctctcatgctcggctaattttttgtattttcagtagagaccgggtttcaccgtattagccaggatggtctcgatctcttgaccttgtgattcacccgccttggcctcccaaagtgctgggattagaggtgtgagccactgcgcccggcccaatagcacttatttcttaggatggtcatgcagtttagcatttcactcagacattaaaagttcagtaaatacttctatttttattcgtttactggcctgtaacataaatattctcccagagactcttggatggacatgcctcattcaggcatagctaggcagggaaagataagcagcctggagctggccctgtgggacattgattgattgggttcctgttcccagttacttgctccctctgcaatgggattaaatgtccccaccatttgtcatgtgacttatctggcatcctgtatgggtagcatacctccctgacccccatgaattaattttgggcttacccatgtgacttgctttgagtaatggcatatgagcagatgtgacattctccacatctgcaaagaagcttgaaatgtgttactgcatggtttggcacaggctctctcacccctgccctccactacaacaaagacatgtctccagtgcctgccacgcagtttgagctagcacctttaaatactttatttatttatttttttgagaggaagtcttggtctgtcgcctaggctggagtgcagtggcgtcatctaggctcactgcaacctccacctcctgggttcaagggattcttgtgcctcagcctcctgagtagctgggattacaggtgcacaccaccatggctggctatttctgtatttttagcagagatgaagtttcaccatgttggccaggctggtctcgaactcctgacctcaagtgattcgcctgccttggcctcccaaagtgctgggattataggcgtgacccaccgtgcctggcttaaatactttatttttaatttttaaaaattgttttatccatctatttacagatcattaaatacttactgtgtaccaggcagtcccatatgttacatgtgtctgcatgtattaattcatttcatccttgcaggaaccctaagacacgggtcccattatcaccatccttattttacatatgtggaaaactaaggttcagtgaggattagtaccttctcaaattcacactgcagggaaggggcaaggtctgccttctaggttgatattcttaaccactgctgtatgcttcttctcatggtaggtaaccagcaaatgcctattaagtaaacgtttgtttaagtgatcattgttcccttccatttacctgaataggaaaggtacaatctactgggacaaaggtgggcttctgactttggacctgctcactcttcctacgttagttgtttatcaaataggagacccttctgattcttctgagtggagaaaaattgtccgtggtcatcagacgggaaccccaatatttcccttgtaggacctacatgaaccacaagatatctcctataaattccatgtggtttccagacatcttccttgtggatcccagtgtggacctcagatctctctcctaaaggcctatgtgaacccctatatctttcctgaggcccacatggactcccaacattttccctgtagcagccacacttgataacttcgacaggttcccagttgtcatctcattggctgctctccacagctctgtaaatcagccttggcttgcattatagcagggagagacagcatgtgggtcaaccagggacaggactgacacagaacccagttgtcctgccccgaagcccaggacccttccttcctggttggcctggtggcaggatgatgcttcctgctcagcccttcccaggcaccgaggctctctccctccttttcccctctgccacactagttcttgtctgccttttttcactgccacccccttttcatgccagctgtgggagtgaggccccactcctggcaggatggagccagacaatgggcccttattctaggcaaagaatccctgcagtgtctcccacccactgaggcccccttccaggcctaggatggtgtgggtggggggtggagggtgggtgtatggtgtaggggaaggagcaattggctggcaggacagacagtggccctggccctgcctgtagagatcccacggaggtttactatgtaaacaccaatcacaataaaatcctgtcttcactcccagcccatctctccaagtgggtctctctcaaccctccaaagctctgggtttttaaacatttacccttgcctctactctctcttggtattcatctctgcatatcactgtctctttcattcctttttctgagtctctttctttttctaagcctctcctctctctctctctctctctctgctcctttgcgtaatttgtctctatttcttgcctctttcttgcttcattatgctcccttacctatcttatctttccatgtcttttttctctccaggccttgagctctcatctcagtctctctctccgtgtgtctctgtctctgtttgcagctcttctttctcgtcctcctatgtcgtctttccgtggatctgtgtccttgcctctctgaatatcatctccgatcttccgtcctctgttctctctttccccctgcgcctgcagatctgaaggaccttccgcagtcaccacactctcctgctttcagctctttctcactcctttctggcacgtcccagaggctcctggcataggtataggaggttattctccccagtttacagatatggaagctgaggctctggctgctggtgccaggctcccatctctgggtctcttccttccacctacacgccaggctcttgtccctgaggtgcccgtcaaccacctgatccggccggggcccgggaactagcacctcggacagctcctggaagatgccggggcggccgggtcgtccttctcgcgagctcaggaggagcagccttaggagcagagcggaagtctcgcgagagtgactgctgcaggcagtggcggcgcgggcgcgcgcagagacggcctcgggcgcgcgcgcgcgcgcgcgcgctccccgcccccagccccggagcggctcgcggccggctccgcgccgcatcgctcgggtgcagcgcagctcagcgcagcgctgcggcctttcggcagccgaacggccgcggcaggtgagtctgggcatgaaggctgggaggagagctttgaagggaagctgggcgcggggcgagaggtgtgggggtcgctggctgcagctttgttcctcctacacttcacctttggatgcaggaagaaggccgaactgctggagaggtgggagtggaggtgacctttactgtttggggctgggggagagcgctcagggcgcacccaggccccccgagccccccaagcccccccattcccatctgtggctcccgcagagggaactgggcctttgggtgacgtcagaccctggatctggagcctgagctttgggccctccatcccccccgccagccccacctggcgttccctggaaaccggccttctggagatggcgtgcgcagccggggatgggggcgactggaagggggtgcccgtggcttcctttgggcctttccttccaactagcgcctgcaggtggacccgggttgacttccctcacctccctcgggcggccgacctttggatggcggacctcagccgccccagggttgcgaggcgacgggcgcgctggcccaggccaccaggcgggctccatcagggctttgggtggtgagttgggggcgccggatttggctcatttcaacgctggccggaggtcacgaggatggaggtgaggtgtttgtgaaccgatccttgtcctccgcctcggggagctcctggtctgtgggttgggggaaccaagtagagactcggactgagcattcactgtcacaggcggcttaaacaagtaatgtcccagcttcccgatggggagatcagtgagggcctggcagactttcccagggacacagagagaaagggaggcgacagctagcgaataggagacttccagaggtgatgggatttgggtgggaggagaggcaagagagggcattccaggagaatgtatgggcaaaggcacagggatgaaaacgagcacagct

SEQ ID NO: 6678 - DNA, 6000 bp, Homo sapiens
cctcccttaatttttcttattttctttatgtttttcttttaaattgaagaaaagaagcccaagctcactgtttgaaattattaaaagtcttgataattggaagaagaaaacctttggcatcaactcacccaatccccaacctcaacctctattttaaagtttcagacgtggactcccagacaaggacagaatgtcaaaacattaatgccagggttttgggtcttgaatttcattatctttccattccaccatgttacagcaaagataataagttatatgatgtttttttctttttctctttttaaaagcagaataaattatacttatttatatagaaacaaagacccaatggggtaagaagaagtttgaatttttagcactaggaaaatataattcatgcatggtgagtgggcacatggattattctcttcctatatttaagatattaatgtttctttacctcacactcaagggagaatatgagtcatttccatgaatccaacataatgtgtgaattgcaaaaagcttttcaatttttaaagatcattctgtagtcatttagtcacaatattttcctgtccaaagcttaaagattgaagcattcttcttctttttcaaatttaaatttgtttgtttaattcacataaaaattatgtatatttgaagtatacaacataatgttttaaaatatgcatacattgtagaaaggctacattgaggtaattaacatatatattactgcatatatcattttttttgtggcaagaacacttaaaaggtactctcagtgattttcaagtatagactacattattaaccatagatgccatgttgtacaatagatctcttgaatttattcctcttatctaactgaaattttgtaatcattggccatttccccaagccccccaccccctagcccctggtaaccaccattatactctctgcttctacctctctagacacccgcccccccgagtcagatacaagggcacccagttggcagagcctggatcccatgcccacataccttgggacccgggagcagagggagagggactatctgcccctcttttgctctgtgatgagagggaggctggtttctcacctagtttgggatttacccataggaaggatagttaaatgcttgacagccacagaaacagttgttctggggaagtttgtgagtctcaggagggcagtgtgtgtcacctgtctctgactggtttgttcagggaaaagctggtattggttatagctccatggcaacgttaagcggtttgcaaagtttccatttgctttagtcaatccacacagcgattgtgttgcttttttccttcaccatcaattacctgcatgaggcatggataaactttgattttgtttcaacatactaatagcatgctagggagtgctcctgttgcatgaagcaatgataaagttctgctttagggcacagatgggtccaccttatactgcccatctcatcataacacacgtaacttacgatgttttcaattcatgataggtttattcagacataaccccattgtaagccgaggagcatctgtacatacttagagaagtaaaacctaagtgttcagttaatgaaagtcagaatgtgaacattcatgagtctctcttgggtgccccttctggacttctgcattttccttccccttagatataagcactatttggatgtttatatatccaattcttgtccttttatttctttttcttgcctaacctttcctgctagaatttctgggacaatgttaaatagcagttgtgatagcaggcatttatgtcttattcccaaatttgaaggaaaagacatgtttatcattaatcatgatgtctgctctaaatttgttacattttatgacattaaggaagttgtctattatttctgttttgctaagagtttttatcatgaatggatgttgaatttgtcacatgctttttttcctgcatctgttaagatcctcatttttatttactgttttaatatttattatttactatttttatgtgtgtgtttcttttatttactgttttaaaaggactttacagaagtcaccccaggactaaagtggatagaaaacatttttggtttttctttcaagttatcctacctttagtaccatatatcacgcaatatttgccatatatcatgcaatatcaaggttggaaggaaccgtagaggtcatacaccactattatctgtcacccaggctcatgaatcatctctgttgttgctaagtggttggttgttcacctgcatctgttcgaatattttcgggtatgaaaaatgtactatccttgtccattctatttttggaaatctctggttccagaaaatcatttattgtgtgagctgaaatgtgcctcagtgtcagattcatgctttggtccaaggtttgccctatggaacatgtaggacaagtgttccctgaggtatgggtagaggcagtgtgtttagtgggaagctggtagtcttcagaattaagcagatctgggttcactttctggcttagccattgacaagctgagtgagtctggatactatagaagatggcttaacagccataattccttccatcccagtatgaccctcctttgcaatgtgactttgcaactcctcaaatccagaggtagattccatttttccacctccttgaatctgggctggcctttgaacttgctttggtcaacagaatgtggagaaagtcatactggaaaaggtctgaagcttaggtctcaggggccttgctccttctgcctagttcctcttgggatgctgccctgaacctgccatataaggaagtaatctagcctattagatgtaagaggatgcttggaggagaaccgaggtgtcccagccaacagcctgcatgctctgactagagcttcttcaatgtcagctcctcccctgaacttatgcaggtgttttcttggaacttaaatgtaagacttaacatttaatccggaggaatttattttgatttttagagatggggtctccctttgtcatccatgctggagtgcagtagtgcaatcacagttcactgtagcctcagacacctggtgtcaagcaatcctcccacctcagcatcccaagtagctgggactacagacccacaccaccatgcctggttaatttttgtttgtttgtttttgtagaaacgaggtttcactatgttgcccaggctagattcgaactcctggcttcaaacaatcctcctgcctcagcctccccaaatactgggatacaggcatgagctatggtgcccagcccgaaatttctttttgttagtcttagcagagcactccacctgtgccagggcaatcgtgttttttttttgtttgtttgttttgtttttttgagacgcagtcttgctctgtcgccaggttgcaaactccacctcccaggttcaagcaatacccctgcctccctgcctcagcctcccgagtagctgggactacaggcacgcaccaccacccccagctaatttttgtatttttagtcgagaaggggtttcaccacattggccaggatgatctcgatctcttgacctcgtgatccacccgcctcagcctcccaaagtgctgggattacaggcgtgagccaccactcccggccaattgtggttttatatctgtcatttatttctccacttagttcatctagatcagatgattattacttccatgttttctatcagttcctaaaaaaaaaaaaaacgtgaaataggaccgtgccagggaaggaagcttaagggacactactaaacacctcttccatgcctgtcactgagccagtcaatattattaactatgttatgcatgcatgttatttccaagcctacagattgctttcacacattagcgtgttcatccatagtgaatgtggccagcggaaatctatatgggcagtaacattctttcctgaagtcaagatataccacgtctagtaatgctctcctgaataagttatttattgagtatcgacatcacaatctacgtcttttctctttgtttattggatcacagtgaatataaaactatacctatagttacgattatacaaaagaatcttaagtcagtggtcatgggtaagacagtaaaccaatttatctgctttcagagcttttaagaagtcaaagtgcaaaaatgacagttttgtgcaaaaagaattttcaacgagcctgacagccaaaatatacctgaagtcgctgcgagactttacttggattttcatgagatcgtttgtgtgtgagcacgctcgtgtttttcccagagcaggtgtaatgatgggtctttacttactctccccactccccacccccttcgcacactctttcaccttgggaagggtatgggaatgaagaaaggagtgttaatcgggttcccagcgttcccttatctttcacctagctccctaactactgtggatgttaggtttgggcacacccatttcaagacaaggagactggttctcgagggaagtgtgagactgaagttacagagcctgtcaaaagcggagccttatagagggagtaaaatcccacgtgcttcgtgctgcagcagctggagggtggacctgggtcgacctggggggatgctcagccctgcgggtccgggagcgcgcagaacagcggggagggcttctccctcttctgggtaggggcgcgctaggtggagccccacctcccctccgcggagacccaccctccgagccgggagaggcgttgcgggggggtggggggggcgtgtcccctggcgcagcgcggccagcgcgcacgcgcagcgggcggaaggtgcccgggcccactttgagcgcgcggctgcgcactgagccgccggccctcccggaagcgcagagctccgctggtgccacgtctatccccttacatcctcctaggacccggtcggtagtcgtcgccccagcccgccgggggcgcagcgcccgagccgcggccctcgagacgggaccgagagcatcatgggcagcactgtcccgcgctccgcctccgtgctgcttctgctgctgctcctgcgccgggccgagcagccctgcggggccgagctcaccttcgagctgccggacaacgccaagcagtgcttccacgaggaggtggagcagggcgtgaagttctccctggattaccaggtgaggccgggcgcccggcagcgctcccttctccctccactcccaggtctcacctggacactggctagcccctgactggaggcgctcgaattagccacaggctacagggaggctgcatggggtgggagtccccggagaccagttgacttccccgtgaggaggaaggtttgggtcatcagggcccacccgagacgagcctggccagcgaggaggtagtcagcgccgcaggtgcgagcccgggatggggacgccagggcggatcccgcagcctggggagctggccaaagagatatccgcaggcccccgagacactaaccaacggcagttctgatcggctggacacaggctctctaaccccagtctcttagaccaccttgtgccttcgagtactgaaaaatggcagcaagaggaagtgggctcatagttttagtttattcctcccctctccagcgtttaaagttggagtgaggtgagggcagcagaagtgagaatgggcactttggaaaggagggatcagtgcagccattgaggcctggcggtgtttacaaggagcggtgtggctgcaagacttggctcttgccatatggcttagaaaagctcagttcctgtattcctgtctcctttgagagatcccgtggcccacaggtgacaggagcaggtcttgagtgagtagtctgccccgatatttagtgagcaggtctagggttgggggccaagtgggcatcatactcagacagctatctgcttgtggacgcatgctgataggcacttcagaaatgaggggccacgggcagcaggaatgggggcaagctatttgaccagtt

SEQ ID NO: 6679 - DNA, 6000 bp, Homo sapiens
tgttaagagctggggagtggctctatattccacttcactccaaatttgtgtctcataaacctattgttgtagctaaagtcctgccactcgtggaattcctctgggaacagatattatatcaaaaagtgtttccctaggaagtgaagtagaggttagaagctactgttctactgcctgaaaattatatcttaaatgatctctgagatttatttgtgcatgacatatatccttttaagtgcttatataagatacaggacaactgaggcttaatagaatgagatctaaaaaactctgggttcagggtgaagtcactaagtgctgtcctggcaggtgacaaccctggagtacccaggagaaatacagatacaggattcttgggcagctcagaggagaatcagagagggagctgctaagcactaatcacggggtacccatgccaatgacatgattgtaaaaatgtgtactgcttgccgttttgtcggccagcaaagcaacatcttctctcaggatccaaaaggagattacagctcagcctttcagcccagaggaggaaacagttttcccgtgcccaattccttgttcactggtacattcaagcttatgcctagatgccaagatgaaagtccttccttccttccttccttctctccctccttccttcctccctccctcccctccctctcttcttcccttctttccttcctttattccccctccctccctcctctccctccctccttccctccttcctttcttctccctctctccctccctccctccttccttcttctctcccttccttcctccctccctcctctacctcccccatccctccttgcctccttttcttctttcttccccttccctccctcctctccctctctccctccctccctccttccttcattctttccttcctttcttcccctttcctccctccctccttccctccctctttccctcctttcttccccctccctccctccttcctccttccctccttccctcccttttcttccttccttttgttttttctttcagcctgccattttcagtcacaaacttttgcggaatacctgttatgaggcttccactttccatttatctcatcttcccaaaaactctatgaaatctcttattacacttttatagatgataaaactgaagctcaagagaggttaagaaactatctcaagtttacctagatagtaggtgagctggagacaaaatctttatataatgatgctatatccagtgcccttttctaatagttcaatacatctaaaatgtaccacaggagatctgattatgatggattaaaaagtattaatgtgtcagtggtcacagtcttctcccctacctctatcactaaagagaattctgattttgcccacagttttcctttccccttccctcccctaaagacaggagagagaaaatgcatagctctacacaatgcagaaaagtagagaggaggtaggaaaggagagatgaagaaagatgtgtgttatgtatttagagagaatttggggggcactggagaaagaggagctttaaagcagctgagataagaagggcttagagagagaggaggatgttagtctctaagaagttcaaatgaaggatttgattaatgatacatttctcttggctgctggactatgtttcattgaataggacacttattgagactggatcacatggacctcatcaatttattaggtttcataatcaacctccgatcctgtaagatggaaaccgtccatgtttctgggttcaaatattaaatttaagtagaaccctccatttaaatgctagaggaccaaaaccaggtcaagtgatttgtccaagttcacataggtggtttatatcacttatcaaatgtctaaaaccatgtcttcacattccaaactcaaggctgtttcttttacaccacattgggttttcacaccattgccaatgatattatgaagtgaaatttcggatctgagtgggacaccactagaaacagaggaaaatgtggaggctggatagtttctggatgcttattctattcttgtcttcgtgatctggtgcacagtctcccatctcatcgtcagtctctttctattgcccagaccaaaacatttttttaaactacttatcctgggagggtggtgccatgaattcgcgtcatcccccagcccctgcaaactgaatgccttgggtccatagataaatggtgaatataatttagtatcactctggtgcagtgagtagtgcagacaaataaccttcacttttccccaggtggggaagatgggctgtgcacaaagatgtccactgtgcgtgtgtgcaacgggagagggagtccaagttccagcctcttcccagagaggggggcataggaggagacagcacctggctgaggtgttactgtatctgtgtccacttggggaggggtgagtggccacaagtgagaggaatacctcccaaggcttgaatgagggcttctggggcaggcttacagaaatcagtagccaggaggggaaaagggcaaccacttgaatcctttgtgtctgtaaacaccactagccaactctggctggaactgagtaactgtaggatcagaaagctctaatctgcattttccttttatgctgtttcaaattttaaaagttgttttccaaaagggttatttcagaaagaaattaaataaacctctagccgacctcagctgaactaagggagggaaaagcagatttttactgaatctgagtttcaggaagctatggtttttccttctagaatgtggtctctgtggtagtatttcatgaagaaacaggagaaaaaacaggaaagaagaactcaaagcaaaagaaaaggcagatcccacgcagcttcctgtcctaattgttccatgtggattcaactgttctcggttttgggagaaatatatacttgttcaggtctcaaataatctgcccctgaactcaaaggacaatgaggcccccaaacagtctttagctattaccaaacaggcttcttaccctggggaccccctttactccttaagcttatgctcccttttgccacaaacaatattgggacccaaagacagagccagcactacttacaaatttaaaatcactaggcaaggtacagtgaatcaaacaaacttcactcctactttacattttcaaatccgtttgcccttactagaataggtttgaacttgcctcacaataaggtaataaaggcaaatggattttaaaaacttgggcagagaggagctctgggaaaatctagttgtcaacacgtatcaccctgatagggcgttatttaaagtatccatttattagcaagttcacttttgtttgcttgttttgtttttaaaaaactttttattaggtaaaatttgaacatgcaccaaaaaatagaatcagataatgaatcttgggactagctgcaagttcacttttaaagcgttgttgccacccacatccagacagctgagggaggctgagactgagatctgcgtccccccagggcctttgctccgatcacaggtagcaaatgtcagggagaagctggccagggaaaagccgccacagcccccgagagggctctgtccctggggaggtatgctccttagcagctctgttcggtaactcggtggcagggaaggaggtggggtggtgggggtgggggtgttgctttccttttgaaatgagattccatggccccgaaactatgattccctccctcaccctttttgtttgtgttgttcttgtcttggggatgcaaagtgctgttaacgtgagcttccccagccacagggacaggatctgtctagatggggccaccagaggcagctgctgtgtttcggctccactccagcacacagggtgacacggaaggcctccatttctgatccatgtatccagtaagcttttggaaacccatcccagtttcgtggggtttgggggtgtgtgaatgagtgagtatgtgtgtgtgtgtggggggggagagaaacagggaggggtggtcacgtgacagtctttccaatctggatcccaattaagccgacaccagccaaaagaagaaatcagtgagtgaagtgaccacttggccctggccttgcaaaccactgcagagtccgaagccccgagtgctccctgggaagaggagagccgaggacactcttcgcccctgcttgccactgggggccgcagtcaccttcagcataggggagtggggagacgcgaaccccgcgggtggctccgggtggtgggctccctccagcgcgcagcttccgctcgctttcccctcggcgctgcagccgcgacctgggaccgaacggacaccgccttcccggggctccggcggcgctctgactcccactttcctccgccgcagcctctggcagggcacccccttggcgcgacgccgcgcccctccccgggaccgccccctcggtcccccagggtgcgctcagttgctgcccgtgcgccccgccagcttgagcgccccgggcgggcggcggtggagaagcccagcccagctctccccagccgcgttcccggcccgcgctgctcccagcctgcaagcccatgacgtggcgacgccgaccgagacacaaagaccgaggctgagaccgccaggggttgagggtgaggccgcgtcccggggccgctggagcgcgggcgtcatgcgagactgtcccggctgcgcgccgccccagaggagtccgagcgcccccttcagccgcggcgcgctggccctggccgggactgcagccaggtgggcgccgcgcgtgtgagcgccgcgcgtgtgagcgcagacctggactcgggcggcggaggcgaaagtcgctccatccgcggggtgcaaccctgggcgcggaatccgggctgccgggtgacagtgaccagctgactctggagcctaccggaggcgcggcatcggaggccgtgcggaccactgccgaacagccgctggagacccgcagagaagggcgggccctgcgcccggggcgcctcggaggtaagttcggagagcccgggccgggcggagggcgggagcgcacgagtgtgtgtgtgtgtgtgtgtgttcgcggtgtgcccgcggctcggtgcacacgcgcgcgggttgtaaagtcaggagctgcgggagcgcctccctgcctcggcttggccccggagcattgcgggccgcggaggtgtgggggcccttgtcgctgcgctcagggcagcggcggaaaaggtgtgtgcggatgcggggcggggccgcacctggtggacagagcagggattcgggaagagaagccacggaagatgatcatgcagtttggggcaagttttcctggttgagcatcgcttcaggaaacggtgttttgagggttaaatatgtgagctatctgtgcaaaaagcctgacacatcagaggcgcgaagtaagatggaaagctggacaagccccaggtggaccgaccggtgcatccaattcttaaattgagatttccagtcacgttgatgtggaatgggatcgttgttcttcccgagggtttgataaggatgctcaacttcacctgtcagaaagcacgggagctgggcctggcccgcggggagcgtaagctcgctcacacgcggtccaactcaggcaaatgcagcatgcccgacctgctctgccgccatccctccgaaagcgataatttccttgggctaccgaatccatcagagtagtcatttgtcccctcgccggcggtgcggggagcgtaacatttgagtagcctaactctcacagcgcgcactccagcattgttttgctggaagattgttactgtggtaagcggctggtagcctgtgttaagcagcagggaagataaggttgtgttcaggtgcgcttaattcagcgggaattaagttatgtttggtgaagatctaaggagaggaaaaatccagagtttctgctataaacaatgtacatctatcttaaaggcttctcacccatttctcttgtgg

SEQ ID NO: 6680 - DNA, 6000 bp, Homo sapiens
tacatgtctttctcatactagtctgtggtcctcttgggcaatttgtaattcatctttgtatgctcacttcttagaataatgacggaaacacagcagactgtctgaggatgtttgttgataaaatgaattgattagtgatgtaattatcatatctatttttacaatagtagcgagcacaactgaagccaggtcagtatgacaggaggggtaagtctagagctgccatgtccagtacagaagccactagccacatgtggctgttgggcacttgaaataagactagtctgagttgagatgtgctatgtcaaatacacatgggattttgaagactcagaatgaaaaagattataaactatctcattaatatatttcatgttgataacttgttgaaatgataatcttttggatatactgggctaaataaaatatattataaattaattttactgtttctttaaaactttttgatgtggctacaagaatatttaaaattatacatgtggctgggcgcggtggctcacgcctgtaatcccagcactttgggaggccgagttgggcagatcacttgaggtcaggaattcaagaccagcctgggcaacatagagaaaccccatctcactaaaaatacaaaaaattagctgggtgtggtggcgcacacctgtaatcccagttacttgggaggctgatgcacgagaattgcttgaaccagggaggcggaggctgcagtgagccgagatcgcaccactgcgctctagcctgggcagcagagtgagattaggtcttgaaaaaaaattaataaataaaaataaaataatacatgcggctcacatttgggctcacagtatatttctgttgagcaataatgatctagagcattcaatcactgaacaaatatttctttctttttcttttttttttttttttgaggcagagtcttgctctatcacccacgctggagtgcagtggcatgatctctgctcactgcaacctctgcctcctgggttcaagtgattcttgtgcctcagccttctgagtagctgggactacaggcacacatcaccatgcccgactaatttttgtatttttagtagagatagggtttcaccatgttgcctaggctggtctcaaactcctgacctcaagtgatctgtctgcctcggcctcccaacgtgctgagattacaggctgaagcactgtgcctggcttgcaaatatttcttgagcacctcctatgtactgggcattaatctagatgatgggaatggaacaatgaacgagccagagaaggttcccaacctcgaggagcttccattatcatggaggagagatccagaccagtaaacaaaggcgtaagccagataattttagatagtaaaagtactctgaatcaaataaagcagggcgcttgataggcgaaagttcaggagggtggtcaggtaaggccttctacagcagctgagtcaactgaggtcagaggcaggaatcagagggaggagactaggacatgtttagatgagaggcagtatagaccaaaactaagaggaggtgcggatggggaggagcaaacagacttgagtgatatttggaaagtcacactgggagaattgtgtaacaaaaggaattccggagaggtgggaactgatggctcccaggcttctggcttgggtgagtgggcgaattgtggtgccaccagataaaataaagcaggagtgtgtcttgaggaaatgaggaattctgttttgacattgtgaggtgccaccgggatgcccaggcagccatgctaagggaataacaggtcagggcttgttatttgggatctagcatcatagatgtggccattaaaaccaagtgtgtctgagaaagaaacaagagaagatggtaggcaaaagaggacactcagggccaggtgtggtggttcacacctgtaatcccagcactttgggagatggaggcgggtggatcacctgagttcaggagtttgagaccagcccggccaacatgatgaaaccccatctatactaaaaatacaaaaattagccgggtatggtggcgggcacctgtaatcctagttccttgggaggctgaggcagaattgcttgaacccggcggggggcagggcagaggttgcagtgagctgagattgtgccacttcactccagcctgagtgaaagagcgagactttgtctcaaaaacaaacaaacaaacaaaaaacaaacaaacaaaaaaaacccaggacactcaggttcagggagcagatttctaaattggaagctacttgagcctgtgtctaggttgagcggaaggatccagggcagccagaggggttcacttatcccaaaagccagggaaggttcctgcgaaaaactcttcccaactacaagcattctgaccactcatattttcagcattaagagagaaactggccgggcgcggtggctcacgcctgtaatcccagcactttgggaggccgaggcgggcggatcacgaggtcaggagatcgagaccatcccggctaaaacggtgaaaccccgtctctactaaaaatacaaaaaattagccgggcgtagtggcgggcgcctgtagtcccagctacttgggaggctgaggcaggagaatggcgtgaacccgggaggcggagcttgcagtgagccgagatcccgccactgcactccagcctgggtgacagagcgagactccatctcaaaaaaaaaaaaaaaaaaaaaaaaaaaaaaaaaaaaaaaagagaaactgttgtcaacaaaaaaatcatgtaattcccaatatgtatatcacaataccttgaaactttgccatgtcacttgggtcccttgtgggctctgagggagcagctctgagactgatgcaacaaggttgggtgttgatggaagggatgggctggcttgggagcctggctgggagctcagaggtataggaggaagtgtctcttgtcagggaggaagtaggagtttaaggagagtggtgaaggttaggggtggaagagggtgatgtgcaggtgacaggtgaggacacctcttggagaaactttggatatgtcacagtgtgggccaaggcttaaacgttatgcactcagagctggagaagccttcaagaagaactaggatgaaggattaggagaactggcatttgaaaagtggagtggccctggagcaggccatacctcctcgtagctcattttcctcatgtctaaaatgagccaaatggtcttttagaggctaggtgcggtggctcacacctgtaatcccagcactttgggaggccgaggagggaggatcacttgagcccaggagtttgagaccagcttgggcaacatagtgagaccctgcctctacaaagaagtggtgcgagactgtagtcccaggagctaaggaggctaagctgggaggatggcttggcgtgggaaagtggggactgcagtgagccctcatctctccactgcctctagcctggtttgcagagtgagaccctgtcttaaaaaaataaaaataaaaataggctgggcgcggtggctcacgcctgtaatcccagcactttgggaggccgaggcgggcggatcacgaggtcaggagatcaagaccacggtgaaaccccgtctctactaaaaatacaaaaaattagcccggcgcggtggcgggcacctgtagtcccagctactctggaggctgaggcagaatggcgtgaaccccgggaggtggagcttgcagtgagccaagattgcaccactgcactccagcctgggtgacagagcgagactctgtctcaaaaaaaaaaaaaaataaaaataataaataaataaataaataaataaataaaataaacccctcaaatggcaacagcaaaaacacataaatggtctcttaaattccctggaagttgtaaagacagtaagtacatgccggtacctccctcagttgcttgagctgttctcctggaactcactgcccttcagatagccacaacacttgacacacaatattttccatacccgtaggcatctatcattcagaggaagaggcttatcttccagtctttgtaccctgcagggcccaatgcaggctggctggtgggcacctggcctccaggaatgcttcctggaatagcaatgaatggcgctctagtctcttagagtctcagcatttatgtccatttcaattaaagaaaaaaaaaaaaaaagaatcgcaggaggtggtgtagtgagcagcacaggataacgcgcttcgtaggtatgaactcagttaaccccacagtcacactatgaagtgtgttatccccatttcccagataagggaaaagacagagaggttaagtaatttgaccaaagtcaacagctggtgactggagagccaggtttaaaaaccggatgccggctccgtgcagcagcccgccgatggctactggagcggagaggttccgaggtttcaggggcattttgtcctttcccacttctgggccgtgggctcccccatagacgatcccgcgggcccttcctcctctgacaccctcggatctggttccacctttcccggaccgcagctcagccccgcgcctctccagctcttcgatgaccggttcccggccgtgccccgggccctccctcggagcgcgcgccgccaggggcacctgtccctgcgcgggggtgtcgccgcccctcggcgccgccgggcgcttgccgctgagccgtggcgcccctggcaggagcactgcaaggacgcctcccgggactgcaccgcggccctgcgcacttggggcgacggggccaggcgcgggggacggctgcgggctgggagggcgcgcggaggagacaccgctgaggggacgccgctgagggcgccacgcggggggcgcggctgaggcgcctcgaagggcaagcgccaagggggcgcgggcgccgccggaagctggggcggggcgcccagcgggatgcggtgaagggcgagcggcgcggcggctgcgatgagtgcctctgcggccaccggggtcttcgtgctgtccctctcggccatcccggtcacctatgtcttcaaccacctggcggcccagcatgagtgagtgagccggcgcggcgggggtcgcgccgaggggcggcgggagttggctcgccgcgacgggagcctcgcaacttttccgagggggctgggaccgtccgccgcgggacagaggttcgtggccgcaggggctccccgcgcctggccagactaggggggcgccccaggggtcgcacgggccgggtcttggagccgggccctgaggtgcccaggctggcgcatttcgggatgttggtgccagcaccgcgccaggtgcccggggtcacaggcgtcaatacggccatgcccctgccctggaggggcccaggggccggtggggagcggaacaaacacggacactacgaacctggccgtgtcagctcgtttgtgccttgttctttttgcatctcacgggaacgtttccatgtatggactttcgcatacttatcatttcttattaattttagaaactgttgtgaatgactagcagaaatagcccggaaccaacaggcagagacgtgggttctaggcctggctttggcactgacggtgtctggcctgacggtgtttggcactgacggtgtggtctggcctcggttttccggtcaagtggactttgtgtgcgtcctattgtaaggttccaccgagacctctttgtgaaggggcgttgtgaatggagaagtgcttcccagtgcctgcgctggggtaggatggggacaggcagcagaggcagaacacttcaatgtgaaggaaatgggtggggctgatggagggggacagggcttgggttcgaagccctgcctcccactccactgcagggatcacggactaacctgcagccggcagctgaaggcctgagggtcgccgggtgttgggacaggcgccagcctctgttcctgctgatgttggttgctgtctggagggaggaggaagtaacctgctatgtctctcagctgttg

SEQ ID NO: 6681 - DNA, 6000 bp, Homo sapiens
ggtcgctcagagaataagaatcaactgctccaaaaacatacattttgaagcattgtcctgagccaaatggaagccacctcacccgggaggcaatccccacttccactcttaatccttgcccccatccttggcccatgactagcactgctacgaaaggctgtccttgcttcacctcaaagtggaactaactccatgggagagtttgggctctagggtgtctctgtgggatcagactaaagccaagccccagccgagaccacactgctgcttcttcccttggccctattctgcctcccttatccccttctcccaagaacactcccccaataaatcacttgaacagaatccccatctcaggctaaggaatctgcataagatccatcaggcatcctgctgtgttggctctcgctgacagagaaatttcactgggactcttcttttcttcgctttctttctctttttctttccctctctctctctctttctttcctttctttcctctctttctctctctctctctctctctgtcttctttttttcaggatcttgctgtattgcccaggttggagtgcagtggtgttatcatggcttactgcagcctcgaactcctgggctcaagcaattctcccacctcagcctcccaagtagccaggaccacaggcatgtgctaccatgctggtggctcatcttttctttcctttctttttcttttctttctttctttctttttttttttttttttttggaaatagagcctcgctctgtcacccaggctgcagtacagtggcatgatcttggttcacgataacctgtgcctcctgggctcaagcaattctcctgccttagcctcccgagtagctgggactacgggcatgcaccatcatgcccacctaatttttatatttttagtagagactgggtttcaccatgttgatcaggctggtctcgaactcctgacctcaagtgatctgcccgcctcagcctcccaaagtgctgggattacaggcgtgagccactgtatgagggctcatcttttctatcatggcaaaatgtatatccttggagcagttggattcttattcaggatatggggctgactgcccagtaaatcaatccttgcagaattcacactgggtcttacccaggaagtcattcagagacaccataaccctgatgacacagagtctggccagagaacacagtccccagcagtagagtccaagcgggggtccagaatccatcctgcctgtcaggcagccgatgagatggtcacatggggcagacacctcaagagctagctcagatcttccaaatactagcacgcagcgcggtggcccctggctttacctcaggttggccagcttctcaatagttgctccctttctggtactggctgccccgtcatactcccccatggaggacaggtaggggaaacagtggccaatgcctacctcactgggttattgtgagggttccttgagatagtgcatgtaaggctcttatcacagagcctggcatctgccaagctcttaagtgtgccagctggtaccattgttgtcaccatctcctggaactacaggatccatctcagggcccctcacacactgctcttcccctccaacctgggagctccagtgcctctccgtttcctgaggttggggtggttaaaaaagctctctgcccaagcccctgagtactacctttccagctctcatccctgtggggaccagcactgccctggggaaggagactgatgggaaccaacaggaaatgctacagctgaggctcccggcccatgagctggccagtattgagcttctgtgatgggtcaggtctccacggccacagaactgagggaattggacgcagcccttggaatcaggaaccttgcttctacaggtgtagtgaaatggaaaggagtgtttccaagtgagtcatggcgtctgattggcaggcccatccaggaacaacagtgagagtaccagtgagagtagagtgaaagacacagccacgcctttgactccatggcaggacactagtggtggaattccacctggggggtaggggacgagatatgcttggagagtttcaatgtctgaatatgggacgtgacattcacaggtgtccgtttttgttctacctaacaattgtatttaatttgtggtgccctacttgtcagcacttctctatggaccctgctggtctttggtagatttgttttcctggctcctgccaggaggccttaagtcctcttcatgattactcctgtaaaaatatctggcttcgccctaagtctcagtgagggccacatcagaccacttctatgacagggggagaagatggaacaatcaaggaattatttttgtctgtatagcgaatcggcttatcaactgtgacttgatcaataaggcaatggagatccaaattaatagtctccacagcccctgccaatagctggaggaagtgtactttagaaggaagatatagcctttagtataaaacctataatagacagggacatcacccctgaacccaatagcataacatgaattaagacccttggtttgcagaacatcttgatctggatcaaactgaaaaggaactatctcaatttctcactatatgaaaagctgatatgaggctgggcacagtggctcacacttgtaatcccagcactttgggagaccggggcaggaggatcacttgagcccaggagttctagacctgggcaacatggtaagaccctgtctctacaaaataggtaaataaataaatattagaacaaccaggatgaaattttttaaaaaagaaaaaaaaattagctggcgtatggtgcacatctgtagtcccaactactctggaggctgaggtgggaggattggtgggaggtcgaggctgtagtgagctgagattgcgccactgcacgccagccagggagacagagtgagaccctgtctcaaaaaaataaatgaataaataaaatgctaatatgagctggagaggcaagaggaatagaaggtaaaaagaacaacaagggaaatacactttttaagtacaatcaattaaatattaaatatttgggaacagtgagctctgaactgcttgggtaaaattcgccctgcctggtggccttaagcactcctgcaggtgggacccggcatcctaattctaccaggcctcttgttgctgccgtagatgagccccagactcggccttccattttgtattggatgatgaccacatgtgcccagatgttctcagtgagtagagtgggtcaaggagtaaactatatcggaaaccgttggataatcatgccaagcaggctgggggcttccagcctttggggtactggaatgctttcttcccctgggaccagctgaactagctctgtagttgccgggagagcagtgtgctctaacacttgggctagtccgttcccacaggaaaactagaagagtcacaagcaaagagtataaaagcccaagatatttctttagtctttgtatttagctctatgtcatcaatttttttttttacagggtctcactcctgtcgcccaggctggagtgcagtggtgtgattatggttcactgcagccttgacttcccaggcttaaatgatcctcccacctcagcctcctgagtagctgggattacaggtgcacgccaccacacctgtctaattttttctattttttgtagagacagggtctccctgtgttgcccaggctggtcttgaagtcctgggctcaagcgatctacctgccttggcctcccaaagtgctaggattattgctactttccaatatttctactacagactacgggaagtccatttttcaatgccaaatgcagaagaaaaagttgtatggatgccctttctgccaatcatcccaggtttaggagagaagaatgatgaggtcatgttcatggaacttgacgagtgataagcctctttatttgtccagtgcttggatacacgaatcgatgcaatgaaagagacctcgcctgtgaagagctaagaaatgagtgtgggcagaatcatgagaagaaaataaagagattgctgagcaactcttctgacagttcttgtgctttttgaatgtttcactcactacttataaaataacctattatgtcagagcctggcgagaagggatcctctccaactctttgactaataattccctaaaacaggaggtggcctgcagaagaactaaaaccagaaaagttaggtggttgcctctgaggaatgggatagagttggaggggtggagcagcccctttactgtcaacccttctgagctctgctggatggtgagggaaattatctatgtatatttatgtggtcctctccccactctgccctggcctggctcagctctaggtctcactcagcgggcgtctgcgggtgtgccgggcctcagaggctgtctccttaggaaacaggccaccaagaagcccaaggacatgctgaggtcccacagctggaggggcacagccgggacacctgaggtcctccagctgttggtctttccctggggtctccaccccaatctatccagcctcccaactccccagcctgtggctttttgccacattccacctgaaaagaccgcttggcttctggggtctgggatccctgctggccatgcctccttgagaggaggagcaggggagaagcccggagtctcctggcctggaggaggggagcagtgtgtcaggacaccccggatgggacctgtgacagcaatgacacctgccagcctgatgccgcttgactccctgccaggtacttcctaagcaggagcacgctgactcctcatgtgctctattacccaccaccagatgaggcagcaagttaactttggcagtcaggagtggagacctttgggctccaagctcaaggtccaccccaagacacacagcccattaaatccttgttgtagagattagggcccacaacgatgtgaaggttataagctgcactgcatggttgctgctggatgtgttgtgttcctggcttccctctggatgctgacagaaacaagggtgagagaaaaggacagtaggagaggagggaaggcgggactgaagaaaggaggggaagggggtagcacagggcaaagtggaaaagcaggtagcgtcctttttttcttcactagggcttggcgaagaccccttcgaggacagctccaggcccatccctgtggtggccacccatggagacagtagtgctgctcagaggcatttagtttttgtttcttttctgtttttgaggtagagtctcgctctgttgccgaggctggagtgcagtggtgtgatctctgctcactgcagcctccacctctcgggttcaagcaattctcctgcctcagcctcccgagtagctgggactacaggcacctgccaccatgcctggctaatttttgtatttttagtagagacggggtttcaccatgttggccaggctggtctcgaactcctggcttcaagtgatctgcccaccttggcctcccaaagtgctgggagtgcaggcatgagccaccgtgccccccctcttttttttttttaaaggtagagtcttgctctgtggctagttttcaatcaaggtaacacatgggctctcaacagtgtgcggaactctgctagaaaaatcaaattatgagaacactgttactgtgtgatcccctattggaaaatgaataacataaaataacatacatttaggaaaaaaaaagtggagaaaaggccaggcgcggtggctcatgcctgtaatcccagcactttgggaggccaaggtgggtggaccacctgaggttggaagttcgagaccagcctgaccaacatggagaaaccccatctctactaaaaatacaaaattagccaggtgtggtggcgcatgcctgtaatcacagctacttgggaggctgaggcaggagaatcgcttgaacttgggaggcggaggttgcagtgaaccgagctcgcaccactgtactcc

SEQ ID NO: 6682 - DNA, 6000 bp, Homo sapiens
tgtttgtgtgtttcatgagcatttttagtactgggtcctatatatgtaagtataaatattaccataaaatttatcaaccaaattgggactatttgagagtcacctggtgggagggagggcactattaaaattttgccaggacaacatacataagccaggagtgttcatcttatgattttactatagacaactcacatatagcttaagaaagcagctcaaatcacagacaagattatttttcatgatcgttttcactggccaccagaaagccttttctaataacaaaaggaccacatttttgaatttcatcatagtttgtcctcatggaactattgcatgctgggacttaaagcctctaaacaaacttcatctccattaccaataagaagccagacagtcgacctggtaacaggacattctgaacctccttcctagactgcatgcagactgcaccggctgtgacaataaagccacaatattggatccctcagactgcaccatgtcatgactgcaggaatactttatgaacctccaggctgcagcttttactattattctcttagcctcatcctttccatttccctcacagtgattacactgatgaggtctagtctcaaaaaccttaactcggtcctcaaaccgtttttggtaaccatattcgaaaggaaaagtttctcgcaccaggtggtgagattttgctagtgtaaaaaaaaaaaaaaaaaaaatcctgcatgtgttggagagtgtgtatataggaactgtctgtactttccacttaattttgttataaacctaaaactatttatttatttagagacagagtctccctctgttgcccaggctggagtgcagtggtacgatcttggttcactgcatccgccgcctcctaggttcaagcgattctcctgcctcagcctcccaagtagctgggattacaggcacacgtcaccacacccagctaatttttgtatttttagtagagacggtgtttcgccaattgaccagactggtctcaaactcctggcttcaagtgatccgcccacctcagcctcccaaagtgttgggattacaggcatgagccacggcgcctggccctaaaactgctttaaaaaataaagtctatctatattttctaaaaatcctgaatcctgtgatcactacttctgagggctagaacttagaaaatgagtgaggaccttagaggaaggttctgaaatgggctcctataatagctgtggcaaacatttattaaacatttttaggtatttgccaggtactgtttgatgcactttgcatctgtgaactcatctgccactcaaaggaccccatgagacaagcacttcactgtcctctgcgttttacagaagaaagtagggcacagagatgtgctgtactcgcccaaggtcacaaggctaggaaggatggaatcaggatccaatccccagcagtagagcttccaaatcccctttctctgaaccatcccccgaggacacagaataacaaaaatgacaaactgagtgaattgctgattttccttaaaagaataaatagaacatattatctgctccaaccactgctccctgctgtctcccagagtaccttgactttctcaggttagtaaatcctgcagaggccccagttgagttagaagcagttctgctttaatgaagtcctgcagctttggccatcccagaaggtgactggggcataccctctcccttgttcttttttattacaaggtactgtcacggttttgaaaattcactttacagccacatcccaacacctgcttatctcaggccaaggctcaccaaatcctcaatcccaacgggccactaaacttgaaggcaaaaataagtccattttgtctcctaaatggcctccctcagaaatgatttatagaatgaaataatatgattaaacagaatatggcaagactgcaagcagaagggaggaaacagaaaccagagacaattaaggaaacagttctgtgtgctgggaaatgataatggatcattctttaagcctgccagagctgcagagaagatgcccggatccttttactcttcctcctcttcctgagctcagtctgtgcctctttttgagcctctgtgacataattgtgttttagaattcctgaactggaaagatgtccttttctggaactggtggctgaacctatgttcctgagatgggagaaaaaagccatttacacaatggcgagcccatctgcaatctactcctaacagctgctttttgtggctctgaatcaagttggagaaatcatcctggatctcaggagccacttcatgcttttcagggcctaacaagacatctcactttcccttagcaaacacaggcagaagcaaacctgtattgggctgggcctatttccgtaacatgcatgcagccatgtgtatggctaccaagcagcactgtttaaagacaagaaccagaaaactgtggatcagaaccaaatgtgtacatagatatgtgtacacacccctccaaaactagtgacaaatcttttttgtttttttttttctgagacagagtctcactctgtcatccaagctggaatgcagtggtgcaatctcactgcagcctctgcttcctgggttcaaacgattatcctgcctcagcctcctgagtagctgggattacaggtgtgtgccaccatgcccagctaattttgtatttttagtagagatggggtttcaccatgatggccaggctggtctggaactgctgacctcaggtgatcctcctgccttggcctcccaaagtgctgggattacaggcttgagccactgtgcccagcctattttttaaattattattaatttttaattgacaaaatttgtatatatttatgatgtacaacatgctttacttatttatgtttatcatgttattatgtttatttgtcaaacaaggtctcactctgtggcccaggctggagtgcagtggtgcgatcacagctcactgcagcctcaacttcctgggctcaaacaaccctcctgcctcagcctccccactagctgggactacaggcatgcaccaccacatcaggctaaattttaaattttttgtagagacggggtctcactatgttgcccaggttggtctcagactcctgggctccgcctcagcttcccaaaatgttggattacaggcgtgagccactgtaccggtccatgttttgatacatgtatacattgtgggatagctacaccaagctagttaacatatgcattaccttatatacttatctagtgataatctaaagctcttttttggaagtccaaactgttttaactcagagtcaggacgatggggttcatcactaagagactttgctactgaagcctgggtttttcttttccaagatgaaagagaatacagaggaatatataaacactgagatgaaacctttttttttcaaggtaacatgacaactgaatgaaaaatagagcaatggcaaaggattctttcttctccttcactctgatgtaccatggctgtgagttctttcaaagacagacacaaagggtctggggctacattcaggcctgagaagctatttctgtccacactctgtgatgtctacaccttcagaatggggaatgggtttcaggggtctctgacagatagagctcatgcaatgatttctggtccggtgctgatcagccttcaaaggatgttatttggttacgctccataaaacttgagccagcccactgttccttgtcacaacctgaaatatgttgggaaaaatttacatggtaacaaatgccacttcccttctctgactaaatcgctcctctcatttcatcccctgctccctctctccgagccctatggggccttggtagggtggccttgtctgccctacaggggttgcatttcaagtcgctcaagtgttctattcttggtacacgacatgccattgcaaaagcagtttcaggctcatagaattttagaaatgggcctagtttcccagccggatgaggtgagtgggtgatgggggaagaatcagccttgattgaatgcctgttgagtgccagccactgttggcatttatcagagtttatttaatcttctcatcaactactattgttaccctcagttgccaagtgaagggagcatgcgggaaggttaagtgacttgcccaagcccacacaaccggtaggagccccaattccaggccctagttccaaggctacattcttccaggcggcctccaactgggttggttaagggttgaaaggacagtgggacaataactgaggcccgtattgcccagagcgtccccatcccccgtccggagctggaagaggccatagaccgctgcctccacatcttttcctctccttcgggttcggtgactcacgacccttcttcctctctcccgggatatgacctcaaatttcacccctgcgaaatttgagtacacgtgagtcagtcagtcggcctggacccataagagccccagctgagctaccagcagctgagctaccagccgacctcattcctctgagcccagtcgacagctgaccttacccagccctctaaagcagtttgcggtcacaattacccgtctcttcaccccgcccccatcgacatcaaacacgacccaccttctagccctcctcccctttccccgcccactccgggctggccttatccagtagcgtctgggtccctggactaaagccgtcaaatgtaaccaattgctgaggagctctcccctaagaatcccgcctccactctgaggaacagcttcgctgatcaatggatcccctcctagacgcaatgagcgcgcggggcaagtggagaagcggctgaactgcccaatgaacaagcggtttccgtggttaggggcgtggcagaagcggtcgtcaggggcgtggcggcagttacttgggcggggccggtagcggcgggagctgcactggccaggggttccggctgtatatccatgagcgccgctggcagccggggagctgcaggaaccagactgggggcgagctgagcacctgtagtcaatcacacgcaggtaaagccacggccgagcgagctccgcggagcggggatcgcaccccggacccgtcgaaccgaatctccgagccccgaggtccccggcgtagctcggcccatcacgccgcagcctgaggggatcctggggggcctgtcatctggcgccgtgggggtcccaggggctggcttgcccagtggtggggacagcccagatcgcggcgggggatacgccttcctgaggccctttgtccccttctgcccgaggaaccgaggttggggacaaccccgaccgcggcctttcccccattggtgctcactcctgggtcttcaggggcctggggaggggtctgccggttcaggctcggcgaagaaggtccgggatccgcacctggaaggagagggccgaggggcctgattacagcccgagatacccgagaggcctctgtgtttcggggctccaggggctcacgcaggaccagtgggtttaagttctagaaaggcagcttttgacccacttggaagcacatttaccgagttcggccccgcgaccggcactgttctaggcccttcgtgagcttttcccacagctagagctgtccagcagcgcaggaggctgcctgccaggccgggcagctagcgcctcgaccttggcgatgtccaagcagtggcctgatgacagccacctgtgtcggatgcttaggactcccaagggaggactgcatgacccatctgtaagggccttctctacccacaaatgcactctaagtggcctttgatgcctagcttgagaagagtacttctgggggtccattaggttccaagtggctgttgaattcacccataatgaattttgaggtttcagctctcaagagtgggtgttagcaaagagactggattatacaaaaagatagaggtttatttagccactgtgaaactccttgtatttgaactaccatggac

SEQ ID NO: 6683 - DNA, 6000 bp, Homo sapiens
ggagaatcgcttgaacccgggaggtggtagttgcagtgaaccgagattgcactattgcactccagtctgggcaacgagagcaaaactccctctcaaaaaaaaaaaaaaaaattacaataaaaaaatcacaatgagatattactatgcacctataagagcagctaaaataaaaaacagtgataacaggaaatgctggcaagagtgtggagaaaatggatctctctccacattcctggtggaaatgtaaatggtacagccattctgcaaaaaatcatggcaatttataagactagatatgcacttaccataagacacagcaatggcattctttggacatatatctcagagaaatgaaaacttacattcatataaaaacctgtacacaaatgtttagagttgcttcatttgtaatagcccaaaactggaaacaacccaaatagccttcaattcaatgggtgaataaacttgagctagatatggtggcttatgcctgtaatcccagtactttgagagactgaggtgggaggattgcttgagcccaggagttgaagaccagcctaggcaacatagggagacccccatctgtacaaaaaaataaaaagttaaactctagtacatgcattccatgggatactactcagtaataaaaaggaaagaactattgatacacacagtgacttggttggatatatctcagaggcattatggttatcgaaaaaagccaatctctgcactccaggctggatgacagagagagacgttgtcttaaaaaaaataataaaaaaataaaaagaaaaaagccaatctcaaaaggttatgcactatatttacataacattcttgaaataacaaaactatacagatggagaagagattaatggttgtgagaggacagtgacaggagtgtgactataaagaggtaccgtgaaggagtaccccacagggatggaacagttcttgatggtggtggtcggtacacaaatgcattcatgggttcaagttacataaaactaaacgcacatatatatgtgcaggcacaaataagtgcatgcaaaaactgaacgataaggtctgcagtctatttacagcattgaccaatgtcaatttcttgattttgctattctactacaattatataagttcatcactggggaaagctggtgaagtgttcatgggacactatgtactattttgcaacttcctctgaatccataattatttcaaaattaaaaagttaacaggccaggcccggcggctcacacctgtaatcccagcactttgggaagctgaggcgggcagatcacgaggtgaggagatcgagaccatcctggccaacatggtgaaacgctgtctctactaaaaatacaaaaaaaattagccagacatggtggcgggtccctgtagtcccagctacttgggaggctgaggcaggagaatcgcttgaacccaggaggcagaggttgcagtgagccgagatggtgcccctgcactccagcctggctgcagagcaagactccgtctcaaaaaaaaaaaaaaaaaagttaacaaaaacatgtatctaattctaaaattacacattttaaagaacatgtaagaacaaaaacatgtatattaaacaccttaatggttttctatcaggagagggagcgggaggaggaatgaaataaacagctacattaatcaagggtccctgtgcagacaaatgataataatgtgctgtgaaccgaaaaggtattaagtcaaacttctctgcacctgaggtcctgcagagaggaaagggtatgtgtgttgggggtcgggggaggagatgagagaaggggggatcaataacattaaagacagggctttatttcaaataaagattcaaaaatctttatttaaagatttttccctttgttcaatagaagactggaggaggttggaggaggagaaggagcaggaaaagggaggagggagaaggtgccggagtgggcagtggaaagtactcttctggtctggggaccactagctgaatccctgaggagctctgaggccccacgggggagtcctagtttccaggtgcttctctgagcagtggtgctcccaaggtgctctgtgtgctggaaaattggaagtgctgattttaatttttattaaatctgttttaattatgttaatattttttctagagggtgttatggagaaagaagtgctgatttttaacatcgcctcttgcaaggcacagcttgcaggtgctgggtgacctaaggcaagacccctaatttagctgtgctttccatatccttagcaaggagtgtccccaccccagcactgtttgaaaggcagagctcataagaggattgagaggattttaaaagccgtttgcacaagttcatggccttagttataaacgcagtacatattgctactaattggatgactataaggaggaagaaagaatataaggggcaaaaggaaacaattcaggaagtgcataaaggtttattgacaaggatgctcatctcaacattacttaagataataaacaattagaaacaacttaaatatccacttggttaaaaatgtacggtacattcgtgtgatagaatacattaaaatgaaagtatgcaagaattcttacatttatttatttatttatttatttatttatttatttatttattttgagacggactctcactctgttgcccacgctggagtgcagtggtgtgatctcagctcactgcaacctctgcttcccgggttcaagcgattctcctgcttcagcctcctgagtagctgggattacaggtgcccaccaccatgccctgctaatttttgtattttaagtagagacggggcttcaccccatctctactgaataccccatgtattttcagtagagacggggttggtcaggttgatcttgaactcctgaccttgtgatccgcccacctcagcctcctaaagagttgggattacaggcgtgagccactgcacccggcaagaatttttaatgttatagaaaaatgcgatataggccgggtgctgtggctcacacctgtaatcccagcactttgggaggcaaggcaggcagatcacttgaggtcagaagttcgagaccagcctggccaacgtggtgaaaccccgtctctattaaaaatacaaaaattatctgggtgtggtggtgggtgcctgtaatcccacctacttgggagactgaggcaggagaatcgcttgaatctgggaggtggaggttacagtgagccgaaatcgcaccgctgcactccagcccgtgcaacaagagagagactccatctcaaaaacaagaaaagaaaaacataatagaatgctgtcctaagtaaaagttagaaaacagtatgtattgaataatcttttttctaaaagatgtaagtgtataattatgcataggaaacacacaggaagatattcaccaaaatattaacaccagtatacctaagatttgtgcagtttactacatgcaaattaatcttaatttttaaaaagttttaaaaaatattaacgctgacggccgggtgtggtggctcacgcctgtaatcccagcactttggggggccaaggcgggtgggtcacgaggtcaggagttcgagaccagcctgtccaatattgtgaaaccctgtctctactaaaaatacaaaaattagtcaggtgcagtggcggacacctgtaatcccagctacttgggaggctgaggcaggagaattgcttgaacccgggaggcagaggttgcagtgagctgagatcgagccactgcactccagcctgggtgacagagcaagactccgtctcggaaaaaaaaaaattaacaaggttgatgccaatgtgtaggtaaaatgaaattatgagtgatattatttttaattgtgtttttctgttgtctaactttcttgtactaaatatgtgtttacttttatagagaggtaacaaaagtaaccacttttttctttttctggaggagctaggcagcaattcccggagaggagaggctgcagaaggacaatgtacacttaggccaggcctgcccggccctggaacgggctgccacttggcctctggtttctgcagtcccttgacccgtcagttcaggccagctcagccacttacaagtccagaactggttgtttcagtaaccgccctgaaagctgccgttgctttcctggaagatagcaccgggacgcaagagtggagagggaggagccaaggtcacctcataaatgcgggatatttataaccctatctttcacccctcctgcagatctccgtttcgttttactctctgagcacgcccgcccactgcatgttaagggagcagtgagcagcatttatctcgggtggagacgtgggtggtttcacagagtgtggatctgccctcctctctctcacttgcctccttctgtaaacaatattaccattcttgagagctgaccatgtgccaggtgtgtgcctccaccattgcatttcccatcacagccttgtgagatctctagtgttctgatgcccactttacagatgaaaaactccaggctcagagaggttaaggaactcgtcctacgtaacacagccagttaggtaagagtggatctaggatttcaacccgggccagcccagactccagctagtgaggccgccccctgtggcccaggtccagcgaggccgagtctcccaaggtgaaggaccgcacagtcccttgggctccacggctaacttgggccgaccagcggtcgtggggaggcggacccgacaggccagggtggtcgtggcatcgagtccatcgttggtgcaaatggccgggggccggtggcggtggtggggcggggggcacggcccgcatcaggcaaatcccggaggcgccctctggacaattcccgtaaacacgggcagagcggggcggggctgggcggggcttggcgggggcccagcatttccggggacgccgcgccggactgaggctgtgcgcccgagactccgggtccccaggggctgcgccgggccggcctggcaagggggacgagtcagtggacactccaggaagagcggccccgcggggggcgatgaccgtgcgctgaccctgactcactccaggtaggcgcggggggtgcctggcgaggtgggagccgctgcccgggaggtggcggaccaggcgaaaaccgccgcgcagccgctgcccccacccttgcacccgcacctcccgcccggcccctctccccagaaggcgccacctgcacgctctgatgggcactggggcccgccgcccggggagcctgttgccatggcagcgcaggaggctgggcccgcgttcccatggccaccgggggcctttgagcagcgttcacatcgcgccagtgcaccacccctactcctaaacccgggacctggtcctggggggaagtcatttggaattcggaaaaggcctgggcccctgcggaatggtcgtggatatgacctccgagttaggccctttgtcatggcttctttcttctcactgagcaccaaggtgctagaaggagaaggctagaaggagaaggaagttgaggttctgggcatgaagctgcagttgcggctactcgggagttattctggtctagcagaaaggcgaaggagccctgggtcatctcgggaaggtcatcaaatctctgcccacatttcctcacctgtaatatgggtatgttatttgagttaaacacaggattcctctaaaggttgaaatgccttaaaattttgtgcgggaagcatacaaacttttaaaaagtttttttccccataatgccttagaactggaaaagatgtagaaatcaccttggcccatcccccctcattttcataaggaaaactgaagccagagagattaaatcgcttcccaagatgacagtgagttagtgggaaggtcaggatttgaactcaggccatggccgtttcttttggtgatttttttttttttttttttttttttttgagacggagtcttgctctatcctccag

SEQ ID NO: 6684 - DNA, 6000 bp, Homo sapiens
gtagcatgccaccacgctgggctaattttttgtattttctgtagagacggggtttttcattttgcccaggctggtcttgaactcctggcctcaagcaatcctctctcctctgcttcccaaagtgctggggggtataggtgtgagccgttgtgcctggccagcatgttattatcttaatgtctatttctctgaatcttgagtttattgactaggaattgggctttgtcattagacaggcctgggtttgagttccagctctgcctcttgctgtgtggcttcaggtaagtaacccagttctccattttcccaagtgtaaaatggacataatgggattattacaaggatcagctgagaaaataaatgtgcaacacttagtatagtaaggtaccagtgcagttggtaacttaacatctctgtggctttcacctcagacaaactttgtaattaagtaaagaaagcctttatggaatgaacaattggattaatatgttggagttaagaagaaatatttcggctgggcatggtggctcatgcctataaccccagcacattgggaggccaaggtgggcagatcacttgaggtcaagagttcgagaccagcctggccaacatggcaaaacctcacctccagtaaaaatacaaaaattagccgggtgtggtcgtgtgcgcctgtaagcccagctactcaggaggctgaggcaggataatcacttgaacttgggaggctgaggttgcagtgagccgaaatcacgccactgcactccagcctgggtgacagagtgaaactctgtctcaaaaaaaaaaaaaaaaaaagaagaagaagaagaaatatttcacattttatgtattcgcaatgtttaagaaaatttggccgacttgaatgacagcttttttgtaaatcattttaaatgtgtaattgagttagttttagacttaggtttttgagttgaaagcttactaagtttacacatggaatcaggccatctaagagaatgttagctttgttatgcttgtatgtttatttataggaattactaagttttgaaaaagttttaaacaattgaatgaattaaaaagaaaatctaggccgggcacagtggttcacgcctgtaatccaagcagtttgggaggcagaggtgggtggatcacctgaggtcaggagttcaagaccagcctgggcaacatggtgaaatcccgtctctactaaaaatacaaaaattagctgggcgcggtggtgcgtgcctgtaatcccagctactcaggaggctgaggcaggagaatcgcttgagcccaggaggcagaggttgcaatgagccaagattgtgccattacactccagcctgtgcgacagagtgagactccgtctcaaaaaaaaaaaaaagttttgaaaaagttttatacgattgaatgaactaaaaagaaaatctaggccaggtgcggtggctcatgcctgtaatcttagcactttgggaggccgaggccagtggatcacaaggtcaggagtttgagaccagcctggccaatatagtgaaaccccatctctaataaaaaaatatatatatatataaaattagccaggtgtggtggcgggtgcctgtaattccagccacttgggaggctgaggcagaagaatcccttgaacccgggaggcggaggttgcagtgagctgagattgcaccattgcactccagcctgggtgacaagagtgaaactccatctcaaaagaaaaaaaaaaagaaaatgtaataggaaatctaatatagacaatataataggcacaatttattctttattattattttttatttttatttatttatttttttgagatggagtctcgctctattgcctaggctagagtgcagaggcatgatcttggctcactgcaagctccgcctccagggttcacgccattctcctgcctcagcctcccgagtagctggaatacaggtgcccgccaccatgcccggctaattttttttttttttgtgtttttaatagagctggggtttcaccgtgttagcctggatggtctcaatatcctgacctcgtgattcgcccacctcggcctccgaaagtgctaggattacaggcgtgagccaccgtgcccggcaattattattattttttaaaagacagtctcgctccgtcaaccaggctggattgcaggagcacaatctcggctcactgcaacctctgcctcctgggttcaagtgattctcctgccttagcctcccgagtagctgggactacaggcgtgtgtcaccatactaagctaatttttttgtattttagtagagacgggggtttcaccatgttggccaggctgctctcgaactcctgacctaaggtgatccacccaccttgacctcccaaagtgctcggattacaggtgtgagccactgtgcctgccctagtaggcataattttaaatatttgaagatgttgaattaactgagtgagacttaaaaaaaaattttcaggaaatttcagaatgctctatgtcctcgttgccattgcggctgcctttctcaagaatgcctggcctaaggagcgggtgctggtcctgttcctcaccatcgggggcctagctataaatctgaccccagtctgcccctataccatgtactccaccaggatcaactaggccacgccccacaacaacccagtgcccctccgagatgatgggaacatgctggacatgcccagccacccccaaggcccaagcatggagtggttgaagaaactgcaagcacttccattgacatggagaagaccatgtcccctgtggcccccaataaaaatgtgacccccccgcctccgaaataaataaatcattcagtttctgaaaagtgtttggtaaaatgtgctagacttataaatagaataatacaatttgtaaagtgaacttaaaagcttaagaatgaaataactttttactttgtaggcttaataaatgaaacccttgcccacttttctacaggggtgttttgttcttacaggttttcaagtatctttaatagtctgaaggaagagtgaatacattgaaaatagctggagcaaaacatctggagtcaggctatgatttggcatgctaaatcatgctgaacttggcccattatcttgaagggaggaatagaaaaaaaaatttaaaaagagaaacacaattgcatttgcactttagagagaacaccctgataactgtgaggatctagttggcagaagggcgactacagtgtaatcacaacagggatggagacaaaagtagacatctcagaaataaacacagattggatgtagggtgcgaggcaaggagcctggggtgttcccactgggaattgagtacttctgtgaatagagaatatagcaggagcagggtcagtatttgacacgtgggatttgaagtgtctgccctatacacaggtgaaagtgttcattagctgaaaatactgagggacttccagacgatctggtctggtgatacatatcgaggggtcctcagcagttataggcgagtgtagaaaagattactgagtaggcaaagaataaacggaagagggccgggcgcggtggctcacacctgtaatctcagcactttgggaagcagaagcgggtggattacctgaggtcaggagttcgagaccagcctgatcaacatggtgaaaccctgcctctactaaaaatacaaaaaaagtagttgggcgtggtggcgggcacctataatcccagctacttgggaggctgaggcgggagagtcgcttgaacccgggaggcggaggttgcagtgagccgagatcgcgccactgcactccagcctgaacgactgagcaaaactccgtctcaaaaaaaaaaaaaaaaaaaaaatgccgggcgcggtggctcacgcctgtaatcccagcactgtgggaggccgaggcgggtggatcacgaggtcaggagatcgagaccatcctggctaacacggtgaaaccccgtctctactaaaaatacaaaaacttagccgggcgcggtggcgggtgcctgtagactcagctactcgggaggctgaggcaggagaatggcgcgaacccgggaggcggagcttgcagtgagcccggatcgcgccactgcactccagcctgggcgacagagcgagactccgtctcaaaaaaaaaagaaaataaaaaaaaagaaagaaagaaaagaaaaaagaataaacagaagagggctgcggacagaataccgttgaataccaatatctgaagggcaagccacaaggtgcagggggcagaggcatccctgatacgggaaaagagttattttaaaaagaacttgcaaagaacaatgtcaagggatccaaaggtagggaatttggacagagttcggctttagcatccgcatctcaaatacctgggtacctgggtaatctggtgactgctgccgaatctaagaggactgaggccaggttgccaaactgcggagagtggggttggagggctttcatggcagtttggggcctgcttgtgtccaacaagacaacctgggtcacctcaaagggtgtcttctccaaatattggtgcagaggttagctgggccggcaagagaagggagatgacccactattttgatttcaggcagcagacaccggcagcctttcggttagagttgcggatagggcagtggccttgggggcggggctataaacctgggcgggcattcccggcagggcaagctcagcgtgagcccgattggaggatgggctctaccttcttccttccgcctacggagaccatagcgggatgcagggcggggccgggctgagggggcggagttaggggcggggcacggtgactctggccccgcctctttccggccgctcagggcggtgtcgctggggcggtgccgctggggcggggcctgcggggtggggctgacggcacggggcggggcctcggggaccccggcaagcccgcgcacttggcaggagctgtagctaccgccgtccgcgcctccaaggtttcacggcttcctcagcagagactcgggctcgtccgccatgtccgccgcagacgaggttgacgggctgggcgtggcccggccgcactatggctgtgagtgcggggctccgcggcgcgggggcttcgggctgggctaattgcagacgaggcgcgattttcctgggggctcggccgggcgggtggggcagggcggctgccggcagctcggacccggaagagccgtcccggtggggcggcgggcggcgggcggggaggcccctggttcgcgccccctcggggtccgaggcggcggagaggacccccgaggcctcccgccttagctggggccgcggtagggggagccccacccagcgcctctcgccgcccaggctcggccgagattggggaagacggcctagagtgaggtggcaggatgaccgcgcagggcgtgtcccggggattgggggtctgggtacgcgggctctgcccgtttcgtggaaaggcgctgccctagtgttgcctgcggggtagacccaagggatagaccagggtccagacctgtccggtcccaggctagctacgaggtgccgtcctgggcaagtcacttcagttttctcgggcttagttccctcctcaagatttcaaaagtaaaatagtaataaagaaaaaaaaaagaagcagaaaatcctctgacttcctcattttctgttgtcggccctggacgtcattgaactgcaggcaggattggctaaaggaggaccctttgggattttgaggttttcggttttattttatattgtgggaataatgttcttttttaaaggatcaacatttcacgcatcaacagttatacgtgaggtattgtgccacgtttgtgaaattaaagatgagtaagatcaggccctgtctccaaagagcgttttaatcagagagtcaggtgtgcaagctaatgattataaggtgcaataatgataaaagatgctgaacttactagccatacagagtaatgtaggtaaggagaagg

SEQ ID NO: 6685 - DNA, 6000 bp, Homo sapiens
ctgaatctgaatcgagggctgggctgatcaccaacactgcagcctcccaacaagtttgcagaggggaagggcagttcagcacttcagtagcatgaatattacaaaaaaaaaatcagggcaggcgcagtggctcatgcctgtaatcccagcactttgggaggctgaggagggaggggtcatttgacaccaggagttctagaccagcctagacaacatggtgagaccttgtctttacgaaagaataaaaaatttcaggaggcatggtggcatgtgcttgtagtcccagctactcgggaagctgaggtgggtggattccttgagaccaggaattcaaggccgtagtatgatctgatggcacctgtgaagagctgctgcactccagcctgggcaacagaacaatactgtttcagacaaaaacaaaagaaaccagaaaaatcagcatgtactactgtgagaacataggtgaacaattcttgtccaagaaaaagtcaaatgtgaatcacagctgagccacccacatcacgatggctgagtgaatctgtgtctgatttagccacagttcagctctcttgtagaggcagaaagcagagcggttgaagtgtgtgtaggctttctattcttatgtcccaggttcaaatcctgggtctttattttccttagtgactgcgagtccaggcctcagtttcctaatctgtgaaacagggatcataacagcacctgcctcaagggttgttgtgagcaatatatgaagcaatcattataaggcattgagcacagagcctgagagtatgagcccgtaaactcactgtgagtttcagctgttaactcaaagcagctttttgttgccaagtcgctggctaaagatgcccaagggctatggtctagagagaagcacctgaacccacctaagcagttgggttgggggatcccgcctggctgctccgccagctcttgtcctgcagaggcccccacttcgcaggtcagatgtgtggttcacctcctgtccagccttcccaggcctgcgcaggagcctaccacctgctcactggtttgtaagtcattcaggggctgggcgcttatagagtcactcaaggcggtgactcacacctgtaatcccagcactctgggaggccgaggcaggtggttcacttgaagtcaggagtttgagaccagcctggccaacgtagcaaatgaaaacccgtctctactaaaaatacaaaaaattagctgggcgtggtagcacatgcctctaatcccagctactcggggaggctgaggcagaggctgcagtgagctgagaccgcaccactgcactccagcctgggtgacaagagtgacactgtctcaaaaaaaaaaaaagtcactggactcccccaagccagtcccctacatttcacatcaggagggtcacctatggtgcctcctgcgtcgggctgtggtgggttcccacacgaacccccatatctctactccccatggtagtcagaggagcctttaaaaagggtaaatttgccgggcacggtggctcacgcctgtaatcccagcacctctggagggggaggcaggaggattgcttgaggccagtctgggcaacagagtgagagcccatcttttaaattaaatttaaaaatataaaaataaaatggctgggcgcggtggctcacgcctgtaatcccagcactttgggaggctgaggcaggtggactgactgaggtcaggagttcgagaccagtctggccaacatggtgaaaccctgtctctactaaaaatacaaaaaaattagccgggtgtggtggtgtgtgcctgtaatcccagctactcgggaggctgaggcaggggaattgcttgagccagggaggtggaggttgcagtgagccgagattgcgccactgcactccagcctggacgacagagcaagactccatctctaaataaataaataaataatttttattaaagggtaaatcagtcaaatttccaaaagaattttgagaatccagagcccattgctctgataattaaattcaacatctggacccagcttggcaagtgctctgtgatccagcccgttacctacctctcatctcatctctcggccatgctccaagaagtgtctgctccccaagtgcataagctcatgcccccaggcccatgtccttgcctctccctctgcctgggacactcttcctccagatctttacacttttgcctcttttttcagcctcagctcaaacatcacctcctcccagaggtcttccctgaccaccccagggatagcagccctcccgcttccccaggcactcccacattaccttctttatcattttcttccagagctcttaggatgatctgaacttctctcataaactggcttattcacctgtgaactgcctgcttccctcgctataactgaagcactggaagaggtcctgcacccagcaggcactcaatgagtatctgaggaatgagtgaatgaaatgcccagtgcacaatcaacctccacaaaagcagtttttcttttcacatataactcatcgctatcacagcccctctccttgctcacccgcctcgctgaggggctcctgagaacctccgtagaggtctccatcagccaaaaagcatctgcaccgtcagagagggcccctcactgccgctcgcagtgctccctgctgccacgtgcagccccttgagcatgagcctgttgacacaggttggcacacggtgtctggcttctgtaaatgctctctgctcccaggtgtgccgtgccccattgaaggacagcactcacactcctccaggtattaactgactttttccccagcaatgtttgttttagggattaaagtttgtggaggagcctataatttccagactcatctgttcctttcctggcagccagcacatttgtcattctatttttcccaagtccctgataataccgttccagacatgttgatttgatggcatcagtcaacggaaagactctctggggcctgccgtaggccagaggacaggctctccgggccacactcaggggcgactgagccaactcttcacgccattcctttccttccctgcctaggacgaccttacagcccatgatcgcttttcttcttcttcttctgtttgttttttcttcctgttttctttttaagtactacagtgaccccttatttattcagcaaagaaatggactactccacagtagtgaattttcaaaataatgcccttcaagcactaaaactttaaacaacacatcttcaaaacagctttgctgaggtataactgacacactataaacggcatggatttaaagtgtacaacttgatatgttttgatatatggacacacccatgaaaccatcaccacaatcaagataatgaacatgtccatcattcccaaaagtttcctcccgcccctccctgcccccttccccaagcaagcactgatctgttttccaaatacgtctttaatgctacaagggctcacacacctccccaccttagaaaatggagtatgatcaacatgattgatcctttccttgattcagcattatcaccaacacgatggaaagtgatctcagatgtcatgaggatgcatgattgtttgccctgatcactaaacggcccattgttgtgctggcatactgggcagtttcaagtttgggagttttctccctcactgctagctgtctcagagcttagttcccagcagacaactcttgctgcctcgaaccctggcacactaaccaccatcctgtgacgttcccactcctcattctgcgacagtggttctttgctgggagagatttttgtctcccaagggacatttggcaatacctggagatctttttggttgtcatcatgggagcgggaatgctactagcagctaatgtttagtgactagggatgcgactgaacatcctgcaatgtagagtgcagtgtcccctacagagaattatccgacccaagatgttgataatgccaaggttgagaaaccctgttcaggatgacaaactgattgaaaactcaacaaggggaccgggcgtggtggctcacgcctaataatcccagcacttagggaggccgaggtgggtgtatcacttaaggtcaggagtgcgagaccagcctggccaacatggcaaaaccccatctctactaaaaatacaaaaaaaaaaaaaaaaaatacgagtggcgtaagcctgtaatcccagctacttgggaggctgaagcatgagaatcgcctgaacccagaaggcagaggttgcagtgagctgtgatcaggccattgcattccagcctgggcaacagagcgagactcttgtctagaaaaaaaaaaaacaaacccataaaacaaacaaacaaaaaaaactatgaggattgagtgattcacatttctgaatcgagagagagaaggatgggcagcaggcttgttgaagctggaaggccagggaggtcgcagactgaggaagaccctggtgtgtcccaggtacctccatgcaaccctactagagaggtggtctctggcttcctatggacaagctctaagggacccagctatggggcaccagagcccagcgttcagcagctgctcaatgaatgtctgccaggcgagactgcacccaaagcatttattaggtacataattgtggcagcactggctggccatggaaggcaaggcagaacacaaggagctggagctggcggaaggaagtcattaagtcagccagtggctgggatgcagcaaagccaggcagaaggtaagtgcagacccaccccaataaatgaggaaaatgagaagggctggctggccatgttaggatccagttccagtgcgaccagatatgtcaccaccacatcacttttagctcctccccccacccacagacaccctgtttgcctgtcatataaagaaggttttcccaaagtggtttagccagaactggaagggccccgccctgtgaagggataggagcctgactgttgcagctgcagtgagtggcggggaagcagcagcggccaggatgaatcccaggtgctctggagctggatggtgaagtatggacatgctttattcgattttgcattgacttaaaggtttaattattttaggagttcttgtagacattcctgaaaaatgcaggtaggcaaaaagaagaaaacaaagatcgcaaatgtgaccctttcattcggagagaacaccaatggaattttgttgtgcacccttctatgcacgtctgaatgttgtgtagacattctgcttacaactaggtgtgggtgctgctgccgaaggctttatttgctgtgcctgaggtggaccagagatttcagagaagactcccagagcaccccaaggagacaacaggagtgcttggagtcaggatgactgggtggatttaggactatgtgattctcaggagcctctctggattagccccaaatcaaggataaagagaggcctagctggactcttcctcccagagccctgctgggaaaatggagcccctttacagcccccacttacccatcaggccctgctcctctcactcatctccagacttctgtcacatgcccaagtcctgctaactgctgtgtaaaactggtaaggtgggatccagaggaccttgggcccctagggccccaggtcaggagacctgggctccagggccagttgagagtgataaagagaacaatacctgcccacaggacttgttgcaatgagataaaggcagaagtcaccagttgtggtcaaatgggatttttttccagagaagtctcacagagagtggctttcaaattctttttagcagcagaattgttgtaaaatacaatctcatgtgaaaccctaaaatgtgagacactctgggtgaagcagagagaggtgctcaactgcccaatcctgtcctcattcctccctctcagggaggcacctctgagaacccactttaaagaattttgccttatgcagattgaagaggcaagctggctggaagaaactggg

SEQ ID NO: 6686 - DNA, 6000 bp, Homo sapiens
aaggcaagtcccacagtcttgcagtgtttagagaggaggcctggagtgaacaaatagctggtctccccaacataaggtatttgccaggttttgcgcctgtgtgggttgggaagctaaagagctccctttaaatctctgaagagcagaactttaagatctgagagagacagagactgactaggctttcaatccaaaatccaagagggccattcctaaggaacaaggacaaccaggaggggattgaattttactgcaattccaacactgccccaacccagttcagtacgtaattgcatcgaagtgactagctcctgtagggaataacaagatttgaagcccctatccttcttttatacccaatatgtgacatacaattaaaaatcataaaccatgcaaaaaatggagaaatgtggggctaatacataaaagaaaaaataaataaaagcagacccacatgtgatccaggcattggaactggcaaagatttttaaataacttggttaatatgtcaaatagagaagaagatggacaaaaaagaagcaaatgtagagaatgtcaacagagttggaatctattaaaagaggatgaaaggaggctattgaactgaaaaatacccctgaaattacaaactcattggatggatttcataaacattgatagaagtaaaggataaaatcacaatcgaatttagaaattaagtcatatcagaaaacagaattagtgaacttaataggttaaaaggaggtacctaaactgaagtacagagaggaaaaaagagaatggaagctaagaaacatgggactatatgaataattcaagttacagaagaagtggagagagaaattaggtccagaacaactggaaaatgacccaaacgtatatacagcaataaaaacaaacaaacaaaacaccactaatatatgcaccgacattgatgaatgtcaaagacgtggttgggcacagtggctcatgcctgtaaccccagcactttgggaggccaaggtgggcaaatcacttgatgccaagagttgaccagcctggccaacatggtgaaaccccgtctctactaaaaatacaaaaattagatgggtgtggtggcacatgcctgtagtcccagctactcaggaggccaaggcatgagaatcacttgaacccaggaggcggaggttgcagtaaactgagatcgcaccactgcactccagcttgggtgacagcaagactgtctcaaaaaaaaaaaaaaaaagtcatactgagtaaagaagccagacatgaaaagagttcatacttatgattctattttatgaagttcaagaacaggcaaaactaagttacagagaagtcaaagcagtgcttatgtctggagggtcctgatggaaaggcgtgtgaagatggaggggaaaaggttcaccatggtgcccttacaaccatgtgtgtctctacatgggccacataggcaaggctggaccacagtctgacagccactatggtgtgcttagggactgcttggccacttaacacgggaacattttgggtagatgggaatgtcctgcattttgatctgggtggtgattatgcttgtgtatgtatttatcaaaacccatcaagctgtacacttaagatttgtgccacacagtgtaaactgtacctaaatttttaaaaaagaaccaccagacaacaaacaagaattcttgaaaattgagattatcaggctgggcgcggtggctcatgcctgtaatcccagcactttgggaggctgaggtgggcagatcacctgaggttgggagttcgagacgagtccaaccaacatggagaaaccctatccctactaaaaataccaaattagccaggcgtggtggcagatgcctgtaatcccagctactcaggaggctgaggcaagagaatcactcgaatccagaggcagaggttgtggtgagtggagatcacgccattgcactccagcctgggcaacaagagcagaactccctctcaaaacgaaggaaaaaagaagattatcaccaaaatgaggctgagcacggtggctcacgcctgtaatcccaacactttgggaggccgaggtgggcaaatcacctgaggtcaggagttcaagaccagcctggccaacatggtgaaaccccatctctactaaaaatacaaaaattagctgggcatggtggtgcgcgcttctaatcccagctactcgggaggctgaagcacaagaatcacttgaacctgggaagcagaggttgcagtgagctgagatcacgccaccactcttcagcctgagcgacagagtgagactttgtctcaaaaaaaaaaaaaaaaaaaaaaaaattaccaaaatggaaaattcaatagaagggctggaaaataaatctcccagaacacaaggcaaaatatgaaaagacaaagaggatgatgagcccagtctaggtctaacaccctaataacaggcattccagtgagtaaacaaacctggaaagctgttcctgatggtgataaaagaagtggcagtcgagtgcagtggcttatccctgtaatcacagcactttgggaagctgaggcaggaggatcaaggccaggagttcgaggctgcagtgaaccatgatcacaccactgcactccagcctgggtgacagacaagagcttgtcaaaaacaataaaaaaataaaaagagctgggcactatggctcatatctgtaatcctggaactttggaaggccaaagtggggggatcgcttgagcccaggagttggagaacagcctgggcaacacagtgagaccctcccacccaccacaaaaaataaaaaaattagggccgggcacagtgactcacgcctgtaatcccagcactttgggaggctgaggcaggtggatcacctgaggtcaggagttcgagaccagcctggacaacatggtaaaaccccatctctactaaaaacacaaaattagccaggtatggtggcacgtgcctgtagtcccagctatttgggaggctgaggcaggagaatcgcttgaacctgggaggcggaggttgcagtgagccaagatcgcgccattgcactccagcctgggcaacaagaacgaaactccgtctcaaaaaataaaaataaaaaaattaaaaaataaaaaaattagctgggtgtagtggcacatacctgtaaggctcagctactcaggaggctgaagtgggaggatggcttgagtctggaaggtcaaagatgcagtgagctgagatggtgccactgcactccagcctgggaaacagtgagatattgtctcaaaaaaaagaaatggtcgttaaataagagatagcattgatcattctcagcaaactaacacaggaacagaaaaccaaacaccgcatgttctcactaataagtgggagttaacaatgaaaacacatggacacagagaggggaacatcacacaccggggcctgtcgggggttgggggcaaggtgagggagagcacctaatgtatgtggggcttaaaacctagatgatgggttgatgggtgcagcaaaccaccatggcacatgtatacctatgtaacaaatctgcatgttctgcacatgtatcccagaacttaaaggaaaatttttaaaaatgagatggcattatatatctcattaatcagctaaaacattgtttaagcaatatccagcagtttgttattgatggtgtaaactggtacagtcttttgggggagcgatagtgtcatcagtcatctctgtccttatcttttgcccgggtaacttcactgttgcaaattcatcataaaataacgtcttaatctgttcgggctgttaggacaaaataccataaagtaggtagtttatcaacaacagaaatgtattttctcacagttctggaggctggaaagtccatgataaggcataagcggattcagtgtcgggtgagggcctgcctgtggtgcacagatagtgccttctagctgtgttctcacgtggttgaaggggccgactctcggggtcatttgataccggcactaatcccattcatgagagctctcccttcaaactctgttcacccccaaaggcccatctcctaataccatcatcaccttgagggattaggatttgaacatgaatttggggggtcacattcagataatgttatatataacttaaaaagaacaaaaatgtggaattcatggagatgttcattgcagtatggattacactgaaaaactgtaaacaacctagatgcccagtaaaagggaaacagccaagaaaagtctgtgtcttgttcactcgctggcaggaaacatagagcaggcacggaaaggaaagggactcgaggaatgcgctgtaccgacaggaggcagcacccctttgcccgaggggcgcaacgacagagacctaaggctacctgggccggagccgggtgaggccgcggagaacgcaccccgctacgcgtctgccgagacggaggcgggcgtttcgaccactgcccgatcatgcgcttactcaagtaggattccgaaaaaattcagtcgcgcgtccctcctgaggttccgcagctggccaggcccggcccgggctggtgcggctgcgcactgcagcccagcggagcgggcccgggaggagccgggcggggaccgcggcggccagagctcctgtcagctccgccgggcacacgcaggccggggcgggcggcgcggctgtccccgccccgcacgctgctgggcccggcagcttcagaggctggcggacccgcgcggggccggcgcagcggagcgcgccggcggcccggggcccagcgggagcgcggcagcggcgcgcggagcagggggctacgggtgggcgggcgcccgccttcgcctgcgtcgctgcctgcacgcgggccgccgtccccgggcgtgtgagagccggcagctcggccgactgggcccggagcggcgcggaggccgggcgctgacggtaacgggccgggtgcgcgcgcgggagggctccggctgccccgacagaggccgggctcgggcggcgggagtgcgagcgccactgcggcgtcagaggggccaggaagggacaggaggctgcctgaggcccgtacctggcgcctgtctctgcggtccccggggccgacgaagtcggagcgggtggggagggagccgggcgggcggccagagacctggcggcaggtgcctgccctctgtgatccaactctctccccagctccacccacattggcctagacccagtctctaagggctgaaaatattgcccggaagctcccgagcagaatcagatcgcgctaagtagggcacaacgcagaggcgacaaagctcctcggccccagggcccgcggagcagactccggagcgcggtcccgcccacgctcggctccgcagttagcgtcctccttcctcctgagcaggcaagcggagcccgagggcggtggcggcggggggcacgggtcccctgaagttgcctcgcagctgagcactgggccccgtctctcccttcccagggggccttcggcgtcactgcaggcttcctaggggtcccctaagtgctctgcaaaccgcggctggaagtttcccactgcagtgaacagtagagaaacagggagaacacacagggcttgctttatgctagaaacacaagcatctttcttctttattagaaagaaactcattctgtgtttctgagaaaggatcgtgccaggcactgtttctggtgagtgccagtttgacccgaaagggcactgagaaaggctttcctatcagtctctttgggttctggctaaacttttaaatcaaacaaaatagagactagcttattcacctgaaactagaagcacatggccgaggagcctgaacaggcacctcctatctaggcagggaagctgtgtaatcaggagcttgtgtggtgcgctccagtcggagctgggactcttatcctgggcccgtttttcatagcaccagccaaaggagagcgtcctctccaccctagcggcagagctgctaccaggacca

SEQ ID NO: 6687 - DNA, 6000 bp, Homo sapiens
agtccttttcttttgtcttgtcacttctctaaaaatttattattctttgttgaagatgttgtataagatggagtttgaagctatctctgtgagaattacttattttctgggtatcctccaggcatatgtaagatatacatgttaataaacttgtttggttttctcttgttaatctgtattttgtttcagaagccccagccaaacattttagaagggtagaagggaacttatttttcctcccctatacacctatggttagcatcatacttattagtaagagtgctttccctctgaagttatgactaagacatgctgttcattattaccacgtttacagttaacatcatacataacagtatgaagatgccccattccccaaatttgagagttagacaatgatgcccggtgtcatcacttttatgaaagggcctagctagagcaataaggcatgaaaaagtttatgtagaagatgtaaccattggaaaagaaaaagtgaaattgtctttaatcacatatattctgtaccttaaaaatatcaaagaatatataagcttttttgttttgttctgtttttgttttttgagatggagtcttcctctgttgccaggctggagtgtcatggtgcgatctcagctcactgcaacctccacctcccgggttcaagtgattctcctgcctcagcctcctgagtagctgggactacaggcatgtgctgccacactcagctaatttttgtatttttagtagagacggggtttcaccatgttggccaggatggtctcaatctcttgaccttgtgatctgcccacctcggcctccccaaagtgctgggattacaggtatgagccaccgcgcctggcctatacaagctgtaaaaattaataagtgaatttagcaattaaaaggatataaaatataagaacaatatatcgaaataagttttattttgatactgatataaggtcaatctaaaattaattgtatttttgtatactagcaataagattaaaaatgaagttatagtactatttacaatagaatgaaaacatcaaagatttaagcatgatacaacaaaacataggcaagatctattcattgaaatctagaaagtatttctgagtgacattaaagaagacaaaataagtagagagatataaaatgtaaaattattgggggacagtattgctaaggtgttcattctcaccaaattgatctatagatataaggcaatgccaatcaaaatcccaccagggattgtgtgcataatttgacaagttgattctaaaattcttgtggaaaagttaaggacccgaaagaaccaagacaacttggaagaagaaaaaaggtgggcaaacatgatcagatttctagacttataataaaggtaactaagacagtgtagtgttggtgtaagtataggtacacagaccagtgaaacagaatgaagagtctagaaatagatgcacatatagatggtcacttgacttataacaaagatgctattgcaagctaattcataaagaatgatcttttccacagtggttttggagcaactgctatcttgaaataaaagtaaaatttcagcctaccttatcccatgcacaaatagaaaataaactaaaatgtaaagggtaaaacaaaggcttgtagaaggaaagaaacaccagacaatagatgcccaaccctgagacaaagaaagatttgttaaacaaaacacacaaaagcatttgtcttttaatcacaaaagaaaaaattaatgttgtgtgtcattaaaattaagacaataaaaatataagccccaaacacggagaagatattaaaattactatatccaaccaaggatttatacctaaaacagagagagtgcctacagatcaataagaaaaagacagaaaacccaataaattggtcaaaagacttgaaactttacaaaagaatatccaaatggccaataagcataagaaattgctcaacattagtaataatcaagaaacacacattaaaactatatcaaagttttaacttcaatgtaatttacactacacacaagaatggctaaaattaaaagcactgataatgccaagttatggcaaagaaatagaacatctggaattctcaaatattgcagatgggactaggactgtaaattggcacaaccactttggaaaactgtttggtagtactgtatctactaaggcaaagtactgtatctatttactaaggcaaaaacaggcatttaccttgtgacccagcaactctattcctagtttcatattcaaaagaaaagagcacatatgtctatcaaatgttcataacaggctgtgtgccatggctcacacctgtaatcctagcactttggaaggctgatgtgggtggatatctgaggtcaggagtttgacaccagcctggccaacatttcaaaaccccgtctctactaaaaatacaaaaattttccggacttggtggcatgtgcctgtaatcccagctacttgggaggctgaggcaggagaattgtttgaatctgggaggtggaggttgcagtgagctgagatcatgccactgcactccagcctgggcgacagagcgagacttcttctcaaaacaaaacaaaacaaaaaaccaaaaaagaacaaaaaacaagttcatagcagctttattcatcacagctaaaatctggaagcaactcaaatgtacactcatagaagaagggataaattgtgttatattcaggcaatagaataccatacagcaataagaaaaaaatgacctactgatatatgtaatgatatggaagaatctcacagacattattttgagtaaaagaagccacacccaaaagagtacatactatatatatactgtatgactccattcatgagtagttcaagagcaggtgatactaattgctgctgaaaagggtcagagtggtggttacacctaggtggagggtgactggtattgcctgggaaagagcataaagagaccccttgatgccaggactgtttgccaccttaatctggatggtggctgtagcaatagatattaagcagatacgatattctgggtccctgtccatatgaggcagacaacagaggcgtgcgttcctacagcttacattctcttatggaagccggacaacaactttagtaaggcgttgggtgctgtagtagaggaactaatggtagctctgggcacatggagcagggagaattcaggtatttcaggaatgagggaagacttctttgaggaagagatggctcagctgagaataaggctttaggcagaggtaagaggaatgggaggaggagaacattccaagcagagggaacagtatgtgcaaagacctagaggtgaaagagtgaggcacgtccaaggaattagaagttccatatggccagagtacaggggaaaagatgagggtggaggggtgaggctgtggggggttagcaagggtttgctttccagcactaaatgtgatgtgttaggctggcgctgtagcgcgagcctgcatcccagcttgggaggctgaggcaggcggatcacttgagctcaggagttccagaccagcctggagaacagagtgagacttctactctacaaaacgtttaacaattggccaggagtggtggcgcatgcctgtagtcccagctacttgagaggctgaggcaggaggattgcttgagctgcggaggttgaggctgtgatccagccactgcaccacagcttgggcaacagagccagaccctgtctcaaaaaaaaaaaaaaaaaaatgtttcggatttttcaaggacactgggaagccatcacatggttttaggtaggaaagagtcaagatcagatttacatgttgagaaatgactccaggagcctgagaagttgaagtccttgcgggtggtccaggtgcgagtcggcggaggccccagccagggaagaggcagggagctggagcgcaggtcattgacggcagcgagagtggggagtccagctgaagacctcatgatggaggatgtgctccatggagaagagggggaaggctcttccagaactggccttcattttagccctgttaggaaaggaacgtagcttcggatcctagaggggccaggcacctgcagtgttgtgctgtttgagtccgcatccgaatttccagtgtcctttccttgctccttacttgctcctagaaggagccctatgctcctaaagagtctttcggtgctgagccttggcagtttagtttgctgaactctcgtcagtggagttagtgggtggtggtttggaaggagggagacagaggtggagggcttgtttgaatgcaccaagccttgcaggctttcctcctccccgcgctggccgggtaggttctcttcagttcctgatgaggcaaacgagaacaaagcagtcgaacagcaccatgatcgacgatactttgggggcggcgtgatcagaggattccccttcccgggaacttgcgtctagtcctctgacgcatcctagttcggagtgggtggaagggcatgtggagtccacagcgccccctcgccctaggcggggtggagacagcgagacgacgcccatgatcagctggttacaaaactcgaggaataagaagtttaatatttattggtctgcaaatccggagaccttgcggcctcactggtcctccttccctctgagctatctccacacccagccttcgatcagaaggagatttagaagcagagctgcccgcagcgaatacttttaatgcccgggccgggaagaaagcgggttaggatctgatcccgctgagtagaggacccaggagcctcccgccccgcgtgctctgtagcgcgggggcgcgctgcgcgctgcgcctgggcggctggcgggggcggcgtgggcgcggtgatgcaggtgtgacacccgccggcgcctgcctccgcccggatcgcccagctccgcgttagccggagctgcacgcggggctgccggggcggacgctgctctgcctgcatccggaggcggccgccagcggatttgccacccaggtaggggactgcgttgctcgctgcggtgcaaccgacccagccggggcgcggaccccgcgtgcgccagggctcccagactcgcctgcctgggctgaaatatacacgctcgcacagctgagtgctgttcatagtaaatggcacaaaagatcggagagtcttgaaaaaccggcgcagaaaagcaaggacttgcccgctgcctggagctgtgcgcttctttgaaagcggcctccccaagggctgttttaaaaccctgtttgaactattagcgccataagtagttttgcaacttataaatgtcaggctgctggcatttatagctccgtttccataagcttcctagccgctgcttttagtttcagttacattctagtagatagattttgttattgttgttggcttgttcttaaagaacagaattcaaacgtgcttacacctggtggctcttggggtttgtgagtgtgtatttctgtatgtgcagggcgccctccgtgggcgtgggagccgtttcttagggacacagaaggatttgtttatggacgggttttagcgcaagggaaagaaaatgacttgttttgcagggatgggctagcaaatgcgtttagccagggaggagcaaggcaccgctgtgtcttcggcagacgggtggtagaaatctctgctgtccagggttcagcagggctgatgaaatacactcctttatccggaaattacagatgcaaattactccgtttaagggtaacttaacgttggtgtcttgggctctgataagagcagccccagtggggtggggtgggacgctgggggaatgcttgctggctttctagcccttggggaggtgaatgtgggtggctttggggctcagagagtggcaggtgaggggtaaggagggtgcatgagggaggactgggcactgtagtcggctcagcggtggttctggtctatgctggtctcctctgtgtttctgcttcctgcc

SEQ ID NO: 6688 - DNA, 6000 bp, Homo sapiens
tgatgtttatcattttcacttctttgctgagctttagggcacattcaaattaagagatataattcacaatatgaaactatgaatatagtaagtagcaaacggaggctatttggtagaaaggcatatggaccaggctaattggaaaatgggggtggggagagaaaaactctgagaaaaagaaaataagcttcaactcagcccaaatattagtttcaagccaaataagttggcctagccccaattctatccttggttggacacaacataggattggtgcattttcagaaaaaaaaaaaaaaaattcacagggtgagaatctaagcatccattttccatcccagtgacaatcagaaatcattctttgcatttattcttcaactttgtatttgcctgtgaacaaaactgaagctggcaaaagatgcttcacgtgaattacttgaacaacaatttctcattgtgttgaattacactgaggctgcttgctgggaaatctttcacagtccagtaacagaggaagatattgtcgttttttcccacgaccatatagttaacccacttctctcctaccaaaatgaatagacagtcctctctaaaatgagggaggaaagctcttcaaatcctgatcactaagcatttacctatagcttatcaatatcttacgaaccaaaagccagtttatcttctcatgtcaccccactttcttttttgcttccccacatcagattttaagattacttggcttctcaatgtttagaatacctctagtagccaacaaagtaaggaatcacggaaccacagccttagctagcaatattttcatcttgaaaagtcatctagtccagaaagtagttgagaggctaaaataatcataaaggttctagagtcattcataataccaacctcttcctaaattcaccatccaccactagagggagagatgaatgaaaaaggccctagcatggaagtggaggttacagcatttctccaaggcaacatttaaggaagcccagttgaggcctttaatggggtttaagttgtcggctttcctgctcacatgagtgttaaccgtctatttcagaggcttgttggagggggcactgcagttcatggaagggttaaaccccctctacctccctttctttctcctccctgctcccgtgtcaggagttggttccttcctgtgggttcgtggtctcgctgacttcaagaatgaagctgcggacctttgcggtgagtgttacagctcttaaaggtggcacggacccaaagagtgagtagcagcaagatttattgtgaagagcaaaagaacaaagcttccacagcgtgggggggggggggggtggggcagcttttgttcccttatttgtccccactcatgtcctgctgattggtccatttttcagagtgctgattggtccattttacaaacctctagctagctacagagcaccgattggtgcgtttttacagagcactgattggtgcattttacaaacctctagctagctacagagtgctgattggtgcattttacaatgctcttgtgagacagaaaagttctccaagtccccatccgacccaggaagtccagctggcttcacctctcactcccaccaatttggggtggcaaatgtagactcaattcctgccacttgctggcggtgagctcccaaaatccacctactgttgtttcttttgagaaaaaaaaggggctaataagaccagctctccctgttgtaagcttcagctgagatacaggacatagaagtacttcataagcattaacgtgctgtacagatacaaggatgtttactatttttctgctgcttcctctatctgcatacggggctaggggaatgccaagcagaagcacttggtgctcataaacccaccttatcatccctggagccctgatctacaagtaaataaaggatgagcaaagaaggaagggagttgaacttgttaaattccttctttctgactgttgtgaggccgcagcctgatttccctgaggctgactttgatgattctttaggcttcaggcaccaggattactttcatggctgcttaccattaattataggaagaatccacaaccctaatccgaaatcctttatctgacagcaaaagtgtgtgatttctctaaagacagctaattttttaatctaaaataaatggttaagctgaaagaaggctgtgcccttctcagtctgtacatgaggcattgtggcatagaacaaaaagggctggccgggcgtggtggctcatgcctgtaatcccagcactttgggaggctgaggcaggtggatcacctgagatcagagttcgagaccagcctgaccaacattaagaaaccccgtctctattaaaaatacaaaattagccgggtgtggtggcacgtctgtaattccagctactccagaggctgaggcaggagaatcactgaaacccgggaggtggaggttgccatgggccgagatcgcaccattgcactccagcctgggcaacaagagcgaaactccatctcaaacaaacaaacaaacaaaaaagaacaaaaagggctggacatggatgcaagttttgttcctttccagctttataaaagaggaacaacataagtcccagcctccccatcagatgaaccacactgcgtgataaacgagataatatgtatgtagttataaagaacctgggctatgatggcagacaacctggttttcaaagacttgccctgccacttactagacaagtgacactggtcaggttaacctttctaggcctcagttgtctcatctgtaaaacaaggctaataatagtatctggtttagaggattgctgtgaggattacgttgtaaatgcgggtgaagcactgagaatggtgtctggccataataagcacacagtaaacattagctcttgttattacaaagaatgtaaataagagttgaagactataaagcactccgcacatttcattagcaatggggtcaccattcgtagacaagtctcagctcagctttgcagcttaccgtcacagaggcagggaacagagctagcttgtcaagggtcttctcaggaggaagtggggaggtagcccatgaagcaaagtgatggggagggaaagagggggacataaagatcctgcagagaagttggctccgagtgataggagggtgtggggaagaaagaagggggcagtaaggattctcattataggactggccgggaatggtgtgaccactgattcaggaagtggggaagacgggaagagacttcaagtgtggggggagccaattcagataggaggtggcctagacaaggtgagggcatctcaaagcgacaccaagcctgggtgagatcacgtctggagccacagaaggatgaagcagtttatatttaaatgccatggcaaaacaacatccccaccattacaccctccattctcattcaagttcttcgggagaaaggaaaaatatggtcgggttcattgctattcagttttgaagttgagcctgcatttggacacaggcgcttgggagagtgggtcattttctttgacacaattattaaggaaaccgttttaaatgattccttgagtcccccaatggcccaggtggaaggtgctgtttcctggtacctgtccagccctctgagcttttctctcagcttccaaacgctgcagttgagaactagcagatcctattggtagtgccctgtggcccacactccttggtaacggtgagagtggggagtaattaggagcggctgccatgggccaggcattcaggtcaaggccgaggatggtggccagggccacagagccaggggacgggtggggacccagcaggcctgcggctggccgcttgctgagcgctccagcagcggggccctgggcggatgaagggccggagaaggccctctgctggggccgcggcgatcttgcagcgcctggacaccgaggctggggcactaacggtccgtggggctcccgacgtattcctctaacttcccctttctgtcctttcggtctggggccttttcaacaccccctgtggccggggacagctggggcagaaaccggcaggcggcagaagcctcaagcagctctgacctctggcacctccccaagacccagagcacaacatctgtccccagaaatccccgggcggagaagagcgcgcgccaagcccttcctgggtactcagtattctcccttcctgggaacagcctgccctctgaggcctgggcacccgggttcccgagcgccgggtcccagccccgcgggggcgcctccgcaccccatctccgcgcccggcgcagagccgccagtctccgccgcggggccccgtgccccgcagcgccacctaggggccgggcgccgcctcccgccctcaggggcaccccccttactccgcaaggactccgggtctccccagttctcccggcagccggaccctcccagcctcggccgccgggccgccctccgcatcccaagcccgcctcccgtgcctccccgggggcgcaccggcagcgaggagcggctcggcgagggcgcgcagcggcggcccaggcccaggccttggggctggggctgagggggtgagagcaggcgcggccggcgggcaaggggaaccgggcgatggcagcggcgggcggccgcgggaggcgaggcagcggcggcggcgggcggcgcgacgagcccctgtgattggcacagccggagccggaggaggaggccaggggagggcggaggcgggggaggaggaggaggaaggggcgatcgcggcggcggcggcggcggcgaggagctgtgccttccacctctccagccccggcaggacgggggcggccgccgcgaacccggggcggggacagcacgcagcctcgaggcgcgcacccccgcccggcagcggccccgacacccggggcgagcgggaaagcggcagcggcggcggcggcggcggcggcgggggaaggatgcaggggaagaagccgggcggttcgtcgggcggcggccggagcggcgagctgcagggggacgaggcgcagaggaacaagaaaaagaaaaagaaggtgtcctgcttttccaacatcaagatcttcctggtgtccgagtgcgccctgatgctggcgcagggcacggtgggcgcctacctggtgagtccccgagccaactccgccgcgggccccttccccagcccggctctcgagcggccgcctggcccgacgagggggccgcccggcgctgggggcaggcgggcatgacctcggcccggcgtggaggttggcgagtggtgcagaggcggccgccgggggagctgccggccggggctgccagcgagcgggtagcgggcgggaccgttgatgccggtagcagctcgcgcgcgtccggctggggcagggggtgccgggggaggagaggcggcgggcaggtgggcgtgaaactattcctctccccccataagagcggagcgagacggtgagttcagggttctccttggagaggaacgaaaaagcgtcggggttttcaggtgacctgcacatgggaagaaaaaccagttagcatcctgcgtcctctactctccattgcatcctcctcgagaacaaatctattatgcatcattttctccgggcgctttctacatccgccaattacagggggatataacagcttagagtgaaatgcgccctagtgtggccctggcctgagccggggctgcagggggaatattgccacccggtatccctatagccctctttgagcgtctgggataaagttacggtacctagagagcagctgcgagtttgtgtagttcctgctatccactcttagtgctaaattccccatcgtggtctgtcgcctacagaaggttgcaccattttccacaatgaatatgtattttatttgcctccagaaaggggatgttaatgctcagagggcccatgggtgcgtaacatttcagaggaaacagcttgtaatgactcagcactgtcaggtac

SEQ ID NO: 6689 - DNA, 6000 bp, Homo sapiens
tgagtgggaaagcaccatctccaccaacccttccagctctgagaatgtggaggtccatgatccaaactaaggttaagagaagtggcacaagactgagagccagggatggtcaacacgggccagtttcctcagatgcctacaaggaaggggccatgctggactctgggcaaaggtgggcaagccaagaagttgggcaagccaggaagtctgactgagatcacagtgatcattcctcgaagccctggtgagaatcgtgagcggacattccttttagttcttctctgttgtctggtacctgacttcatgctttggttcaatactgccttgaatgccagctgaagagtttgttaaactcccagcaaaacaaacaaacaaacaaacaaaaaaacattgaaccatccccctgcccactaccacttccagctcgctgtggagctcattctcacacccctcccaagatctcttgctgatagtctcggaaatatttacagcaatcgcctgagtacatttcttttctttccttggctaaactataattttgctatttaaaaaaagttacaaaaggaatgcaaatgtgcccgttaacttttccatattcttaccactctgagtctgattttaaagcggaaaacgttgcatttgtgagaatactcaaatttaatgtaaatttctcaagataaggcaaattctctcatttattagcagtgcagaaacacaatagccaatgaatgtatcccgactatgatactctacctgttgacatcaccctcccatcctacccagtcccaacacacatacagttcccccttcagagatgatgaaaaagcaagaccattaccactttgtagttatttcacattctaaattgctcttggagcgagttcaaaggtgttaggtcagaattttgaatgcgattgttattatttattcttaaggtttttttaagtctgaattgattgaaataactcgttttttccatgtggaaagatgaaaacagagatttattactatagtctcacaaatgatgaagggtgtgcagtgagtgaagatagatttgttcccagaatcctcacatgccagaactaagggcacatagtcagaattaaagaagatgcctgtttacaaatctatttagaattgccccacgtgcggaagaggatattggccatcccacagtcccacatgttgctgggtcagggtaggaaatcagcttctttgagcctcagtttcctcaaatgtaaaagggagataatgatatctatatgaaaggattgccaggattaaatcagagaaatagcccaggccagcgccttgaacttgtgtgcactcccaaatgttagctccattcccccttgctccctcccccgtccgacttgcccccatttccagccagtcacttggacaagttattatcaatacagaccttactactcccaagaagtcgctcaggtgaagattctgcatagctggggtggagagggggagtttagccctatgtgtaaatggtagatacagttttagagtttccacgaattcaggctttgggtggttccccattctccaggttgcagctagaaggacaaacatgccctcagccagtgtcagacacaaggaaggggtgtccatgtgtgaccctgttgggctcctttgagcttctgaaaagcctcttggccctctgtccctcattactacaaactgcccagggccttaccagttgcctgaatagcttatatactcaattaatttgagttaaaatgttaatgggtggtaatggcctttaatttgccaccacttcctcattttaacccaaacattcaatgacttagtctacagaagtgatggctgtaggaccttcgggcttcttggaaaatccaaggcaggaaaagagacttgcttaaacagaggggtaagcaggaggggaggggtcagggtggccaagccaagcacatgcccatgtggcagttcacatcaccagtctgacattctccaccaatctcatcagtcttcctctttccagattccaggaacaaactcatttttgcagaggcagcaacgggtggtgtatgtacacaatcacttgttaaaggagctggcccaacgagacccaaacctaagtgatcacagatagcaggtattctatagtcaacgatcacaagggtcccccatcaccctccaagaaaaatcccacttcagtgactctcatcgcaaggacagcgtctatgtgaggaagctagctctacttccgagcaggtatacttgagagatattgctctgtgggtctgattacagggatctctctatatggaatcgaaccattcaacaaaagcttccactgtttcctgtccactcatatgactctggtctggtgggtgcaaagaaggaagactgagcctgggatgagaacatgggccacctaacaggaaacggaaatagattctgctgtaatcgtgggtcacctaacaggaaatggaaatagactctgttgtaattgtgcttgcagcaatgaggttgacccgacctggtgaatttagtaccacggcaacacttccatgatgttctgcatggtaagagtgcagtaggtagagaagcagagaagcagagaacagaggagagaaaggtcagtttcttcttgctcttttgggggatcttattaatcaattataagtgagccaggagaccttaggtctactgcagctcaaatcccctatcataattagacacctgaatgtctgtctcccttgtgaacagtgagccactagagggcaggaaacccgaggtgtctctctccacttggtgtctctagctcctagcacagagcctggtacaaggtaggttaaatattgctgcacgttggagtgagtggaggagcgattcaaatacagagcagcataccaggcgcatcctgtactttcctctccctattcaggtatcccaaccattcccttcagaaaaacaaggcaaaatgatgacaaaaaccactccacacctcctaaaccacccttcaagcaagacaaagggaaagattttggcattttgaaaacttgaaataaggatggttagaccccgtgccagccacactgatgggaaactctcctttgacgtctcatccctgcctctaacagacagggagagtgacgtccaacattgttctccacatcagaaaaacctcaccccaagaaaaatacatggtattttcgaagtgcttactgtaaaaggagcagggtgcgctgacttcgccaaggaatgggaaggaaatgaagcgctgaggtgggaattagtacacgcttcctctggggaaaagacatctgctcctggcactcctcaaaggaggtgaggcagagctctcccttgacgctgtgctgcttccctaatccattctccaggctgggtgatgggacctcttcctgcaggggagagcctgccctggctcccagggtcaacaagggcagcagcccccggcttggaagcctccctcctgcccctccttacacacgaaggggcagaagggctctgggcacaagcagtactttggtagaaaatcagaaggccctcttacatccccgggggcgccatgaagggacttggctgctgccagcccctcgccaaactcctctgagtggtccaggggataaggccgacacgcccctcccattcactggggtgtggtttccagcacttaggacattccatgtagcttctccaacaggactcctcctccccacactcaaacccaaaggaccctttcataaaccagatgatcatttctggaaagttacatttcttaatttcaggaattgttccaattcgtgcaaagaaaataaaaggtaattatctaattccagtaaaacttaatggggcccttcccacccctggccaatggttggtgtgaaatgtaatttgacttaaactgtctaaggctgtgaaagtgtacaatattcggaagggtggggggcattaccccttgtgggagccatatttttctagaaggcattttgatcaagacaggcctcccgcggttattgatcttagggtcattgagagtccaagaactggggagatgaaggccacccggcgtcagcaccgcgagggcggagggaaggcgggcgctgagtctcccattggggttctagccgagggttccagccaggactgcgtgatctgggggcagctcggagagctctcccgacccagtatcgggtctataaatggagataaagatcagcacctggagggagtggtttctcgagggctgagagcctcgcccacaaactgtagtcagcatcttcactgaagttggcctgtcttggatatttcttctctcctccccttcccccacctcccctcctaattcatcaactgctgaaacatctgcctggctgaaaccgccttctcgccgcgcgctgggggctgtccccaggtgttggtctttgtgtcgagaaaactttgcgaggaggcgagggagctggacaaagagcgggcgagggagggcgtttgccagcctgaggggtgcgccgggcggtgcgcgcacttccctgggctcagctccgtacccggtcgctcgcggtggccagagcccagtctctctaggccaggagtggcgtccggctgcatccccgcgccctcgggagctgaataaagccaggcgggagaagcaaaggctagcgcctggacgctggagttggtgggaggaggcgagcagaggcgcggagcaaagctgtcaaactgcgcgcggagccgggcgcggggcgggggaagggagaggagggagggaggggcaggcgggagccgggagggagcgagcgggctcgccgcgcctgagcaacccctgcctgtcgctgccgctgccgctgccgctgccgccgccggcccggactcgtccggagcgcagggtgtctgcccagctgcgcgcggcgcgcggaggctccggcgtccgccgctgcgccctccggcccctgctcctcgcgccggcccgcgtgggtcccggcgggcgcgaacccaccatgcagctgcagttccggagctggatgctggccgcgctcacgctgctcgtggtcttcctcatcttcgcagacatctcagagatcgaagaagaaatcgggtaaatagctgctcccaggcccgtgccacgagccctggcgggatctctccctccttctgtactctccaccctccgaccccctttgtgtgcgccgcgccccgctgtagctccgctggagagatggggacggtttggcagaaggtggcggcgacaggggcccgggacggtttggggagaggagggtgggggcgcggctgctgtggggtgtccccgggcggggttcacgggaagcccccagctggcccgcgtcgggaagcggactcgcccaccctgcccccctgcctggcgtgtccaagcgcagtgtcgccggggtcgagggagggcgccggggagtgtctcgggcgggcggaggggccgagagtggagggaggcaggagtttctttgtctccagcacggccgctttctcgccttggcaaagtgggcagggggcgcgcagggatctctgagctgggggaggggttcctggggccggagcggagggcggggttctgcatgggctactgggaagcggaatgtcccctgcacacacagacaggcacacgcgcctcccgccggcccgggagcccggcgtaggagctggcaccactagagaagggctcgcatagctggactgagaccccccgccctcgcctggctttggacgttcagccaagccacggcaaccccggcgaccctgggttcctgtgcgctcgcagcgcggagacggagacatttcgggaaagtctgtaccgccgcccggtgggcttctgggccctcaggcgggcgatctggcgctttttttctcccgacctcgccagaggtagggtgggaccgcgagcccggatcctcccggctccggacttcctggagtgcgcacttgaggcgcgggacgcaccggctgtgtgtcccaggggctgagact

SEQ ID NO: 6690 - DNA, 6000 bp, Homo sapiens
ctagatggctggcttcatttattgaactgatctttgtctgccagttgagtctgtacttatctcaattgtgtaagccaggtttcacccatgaagactcccttttttcatcacttgggactgactggggtcccggtttctgctgattctctggtgtattttctacctggttttttacaccacttgctgggctctgcaggtgctactatcaaggcctcttcactctgacactctattgtgtttatctgtttacacatctagcgaaaatgtgagccattggagggcagaagctatcatatttgtgttatatccacagagtttatcacagagcttaatatatggatcaggggattcaaactggttgccaggctttcggccacctgtattttttagccagcacagggttaacaataagtaaatttgaatgtctttaggtgggcctactctctgctatttgccacagtctctatcttcttatatgtgaccacagtcaatctctatttcaccagtctcacccatgtaggcaccctagtttgtggtcctggttgtagatgatgaatacatgctaattatgtgaatgaatacatcaatgaatgtacttcttattttgcatggagaattgattgttatctaaatattcttgtcctgaaaattcccctagtttcatctctcattttggaaaatacaggtagaaaaacagataactgtaatgtgcaatgcacaaataagcatttctgaatacttgccagaggtgagccactctgtgcattctagtggctcaattagagaggaaaacaaattcaactgtgttatttgcagaacccataagatgcaaacaaaccatttgttgtggaaaagctcaagatttttgtatctgagatgagtgataacttctaccttggatcatcttaaaacaggcagtgtaattttaaaaaacaatgaccccgaccaacatgccaaatgtatgttcaacaacgtatttcccaaggtagattcttaagataccccccactattgccaatgacaacacactagagaacaattcaataaatgtgatttggggccacagaaattctctacagtatgaacctctcccctggcctaggggaagttttaagcaattaactgaatgaaattcagatcgtcagacaaaaatgttggtactgagatagtaatcttgggcaaagttaaccttcatctgaagaagtaaatttggttcttctttacccatctaatgaatggcagactcagtctcttaagagttaactccaagcctctaataattttaacttttcagaagcaaccactaccagatgttcattttggccataaaagttcccacccaataaaggtacaacatccataaaagtcgatctttgaacaacttactacctgtgaacatttccagctaatcagcttgtgttaaatacatgtttaggtatttgaaagaaaagaacttgatacatagaatcatcattaggacaattcaatgctgatgttgatttccaaagagattttataagaagtctttctgaataattagagaataggactcattttctgttaggtccattcttttgttcaagaaagtgaagcctacaggataaactcgtaactagtaagtggcagagctaggtctggagtgagtcactaaatttggtctctccacacctgcctataaaaaggggataacatgataattataccaaaggaaaaaaaatcctgagtacatataataacaaagactatttgcactaacaataaaagaagtaccatttctcaacgccacgtaacagagtgcatattcttccttaaagcacacactaaaataaacatttgttacttggacaatagactgaagtttgctttaaccattatattcgttttaacccctggtagatctaaattgacatgtttatgtctcagtcatttttctacttctgctcttatcggcccagaaatgatgagaagcaccaacgaaggaaaatgtgagggaagctaggtgccaagcccttacattactgctagcagatctcagacagctttctctttgacataaagggacttgtcccagcaagattagctctgtgtcctccaaatggagccagactgtgttgactgcatggccaactctgataggatgacccaaggaggctcccactgagcagagaagatatggaactctagatcctatgcatttacagacagggtcttgtcttctttagagaagactgctttaaccctcattgtcaaagactctgggtggctacagcaattttcatttgtttcatttgaaatactctggctcattcaaaaaggcacagggacgtggctagataactgcactaattgttatctagcctttgtatgcacttaaccgtgcttctgcatgtatgacaggcagtatagccatgatagccaaggagtacactgggccttcagaagacacatcttccatttacaatttaaaagaagaggtgccaatattagattgtcatgcaaccaaacatacattgtctaagatataaaagcaattgtatctgaaagtgggaaatctccacctcaattatcacattgacaataggggcatttcttcagaggccaaatatctggttgctcagaagagagagaaagctgcctatgatacgtgcaggagattttatttttttttaagtataattatgacatcactgaccagtgcctataatgtaagacctggttcaaaatctgtttagagaaattcaatataacaaaagtgtgttaaaaatttatcagctacatgtatgagtccagttgccattctaaatgctggtgtggttatgtagtaaagttaaattggtataagcaacaatattattccctggaagggacatttcctgggtggaacatagaaaaggagacaggtaatatgtttgaacaattaaaaacaaaaaacccaggaagctgggcagatgagtgtattgtggtgggaagggcaagttgtgaccttagatttctgtatctttagttgtttcactttctataccatttaatgattgaaaaatgcggttggactgccggaaccacagaacaggaactccactggggcaggagttaaaggcaaaaaagcttttgtgtgggttcacttactattttaattcatttgtattcttagtcagctttaaaggtatgattgcttcgtctgcctactgctctttctcttcttcctttcatgctgttttacccttacctctctctgttctctgctaggggatgtaaccttcggcacggtgggaaaagccaattttgccataggcctcagcttgctctgactcggctactaacttgactcatagcttcaggcaggttatttcatggttctgatgctcattttcctcatcttgaatcagagattttattaactgtctcctggtttgtgaaaattcaatatgatcacgtgttacatgccaatcacagaaactggtgcgaagttgtgttcctcagtggtagctattgttgtaagtcggaattgcatgacagtggcagctgttttctatcacgtcctcatgttttctaaatttttatgccccttcctcccatttcctaccttagtattgttaatagctaacttttattaagtggttaccatggcccaggacactgtaatgaggattttatgtgaattacctaattaatttctcagaaagtatgagatagctattattttaagctatttaagctattttaagctatttaaacaaccagtttgttgaagttaaaatttagagaggttaagtgaactcgtccatttacacaattagttgcccaggcagaatttgatttgaggtctgactccaaagccggagctcttaatcaccagtgacaccaactaaacgcttcatttcagagctcgcctattcccagaggtcccattcccgttttaaggttattttctgtaactctcttgtatctaatttaaaaatgctatttcccagagatgagtccctgatctcccagaaggcatggatcatacatttcttttcctaatccacccaaattcctagagcgcacagacttaggctcgttcatagacgggaaaagaaactgaccaggcagtgaaaccgagcaaacaaagtgcaataagacaattacagcaggaaagcggcgtaaaaaaaagtagaaaaagaaagtaagggaaaggggaaataaatagcaaatattcgctgagtgccaacaatcgcacgggagggtctttagggttctctgccgagtactcgggacggcttgctgagcagtacgccggccttatctcatagatgaggcaccaaggctcaggaaacagttctgtggatctgggcgggcatcttccacccacagtcgcgcacacgtggcataggttaataggctgtctggctcgggtacctcttcccagggtcagggcgttacaaagggaggctgctgtcttcccatgaatctattagggacctacaggagcgaagagaacccttctgagtatcagcgaagacagcttattaagactttacgagtttgcaagccatcctcgtcctatttcctcacttcggactttttggacacaccttccttttcctgtgagccaacccaaacgaatgagttacaagtaatcgccttctctacgcccagccagtgcccagcaccaagcatagcgcctccttgcaacacccggccgagctcccggcggcagcgcgggcgcttgggtcggaggctgctcaaaggtgacgcgcggccgcctcctcccctttaggcggggctcgcaagggcggtgggggggcccgaggaagtccgggggccctcggtgatgcccccgcccccgccgcgtcagggttgctccctgcgcttccgagtggcgactgcagcgggtccggtgcaggtgaggggcgcgcgcctgcccagctttgcagcccccgaacgcggcctcgcacaggtgagggcggtgccgggttcacctggcagcgcgcgtgggccgggcagcacggtcgccgcctgggggtgggcgtcttctctcaaccgaagctgggagttggggagctggagggtccaggatgagaattcagtggcgctactaccccggagctgcttgtggttcagagatcagaaaggtgtcctgaggactggaggcagaaatccaggcgtggcgtactggaaggcgcactaggggagggcagcctggcccagaatttctttgcattttaaaggccacacattcagtctccccggggcgctacggaggtagtcaccgccacatccaggactccttccacagaggtcagttcctcagctgggtgggctttaatacgctctcttcgtagagacccggaggttcaactttaattctttgcgctgacatttgctcaacgacaccggagcagaaatccttgggataattgcgtaggtaacaaacagtgtctcaatcccactgaagataagtaagttaaaaataaagacagtgatgttggtggtgaacttgagtggcgattagtttccgcaattagttccctcctgcactgtccatttgttaagcaaatgtgctgacggctttttttaaatgattgggttgccataaaagaggttttctctagtctgaatgaacttctgtgcgatgctgactgagggtttcagcctcctctagatgcttacaagagcttggtctggaaggtacaagggtgcgaacccttaaggtaccaagcagcttctcagtgaaccgtgagacgttagaacacttgcttcaggacgcacagaattcagacaccacttattgaaggatttgtatggattataatttacattagcattcattttttgcttgagtcagtagcatttcaattcaacaaatatttattgtacacctgttaacgggcagacctctgagagccgggctggtgtgctgttgggtagcacaggtgttgatattaatacaaaggggaatcttaaggcacttattcctcacaggtgggtgtttagaacgagaccaatggtgctgcgctt

SEQ ID NO: 6691 - DNA, 6000 bp, Homo sapiens; identical to SEQ ID NO: 1849

SEQ ID NO: 6692 - DNA, 6000 bp, Homo sapiens
ctgtacactttatagctgatagatatcttgcaaggataaggataaccatttgcttctcccttctcttctttctcaatatttccccccattttctggtgttaacttttgctgtggaaaactctgatgccaaaatgattttctttttctctaagttgactatttttgcttaagcccccacataatgctttcttaatctttaaagtcctagtcccatacacagatatatcttggtgttgaacattctaataacatatataagcatatactacacagtaatgtaaatatatgtgcttatgatgatctatcttggcttaatataggcaataacttttttctaattctatcctatgttttacagtttttggatttttggacggggagaggacttattacatattcttctctcacttacaccctttacgacccttacattatttggggttcagtctcccttgttctctttacaatttagtttttttttttttcctacaatgattttgtttttaaatcctatttctttcatggattctgccagttgctattgcactttctggctatctcttccccatgctcttgcatttcacttcatggtctctttatgttttattacacccttaaaatttatgttggaatgtataaatgttcattccttttttcatctgttttgtagcaacatgtttctagttattacaagagttgatatattccttttttatctttattcttagagtatttttatgtgaatgctgagaaaattcctttagtatttctcatatgtgaaagttgaatttcctacaggacaaaggaaaggggttgtagaatgtgccccagcctgctagctcaagggccctctcatcatttgctacagtgacagactgttgcctcattttggggacattatggagtcaccgctcgttctccataagagcataaatgattaccaggtagttgttactgtcttctctccttgatactcatacataactcatagcacatatggaagcaaccttctaaatacccatgttttatctttaaaatgttctttgtgtgtagctgcccatttgttttgtgctaactgactgcccctattaccttcagttgtaacaacccatttaaggtagaaacgaaggacactcatctccatgtgttttcagaatttaaatgaaaaaataaaaagaggctgatgtcacgtcccagtttaacgtaggggttttatttatttatgtacactcaatcaaactatgactattacaaatggttttaccgctacaataaagatagttaattcatagctcaataaaaatgaagagtgaaagattaaaaaaggaaagcaacaattctaaactataaaatctacttcaaaaagctacatacagcaaagctcaataaataaattatgaaaaaaaaaatatgggataagttttatggtttaggagataccttcctataagccaaaaacctaaaaaaaatgctaaaggtatagcttgctatagtacgtcgtaggagaaattaacatgtataaaatcaataacattcacattatgtgatagtctacagccaaacaataatagaaagcaagtgaaatgcttagcatagctatttagtctactaaattaggtttgtgaaaatgggaatgccaaatgccttaaggcttacagcaggtgcaaaagcaaaacatcagaggtcaacctaaggatatttttaatataaaattaatgtacctgcattgtaagcattttttttgtatggtagaaaggaaaaaattcttgtattattctactataaatgtgtattctttgctctactaaatttgcatgtcattgtcagcctttcactttgtcttcagctaacaagaacctcttgggttcatcctttggagaacctgatatcatggaaaatggactgaactaggagaagagcctttgtttagaccacatgctgaggtctagtggcttcaattaaaaatatataaatgtggccgggcacagtggctcacgcctgttaactccagcactttgggattctgaggcgggcagatcacgaggtcaggagttcaagaccagcctgaccaacgtgatgaaatcccgtctctactaaaaatacaaaaattagctaggcatggtggcacgtgcctgtaatcccagctactcaggaggctgacgcaggagaatcgcttgaatcccggaggcggaagctgtagtgagccaagatcatgccattgcactctagcctgggacgacagagtgagactccatctcaaaaaaaaaaaaaacaattatgtgtgtgtgtgtatatatatatatatatatatatatatatgcttaatctctaagctttggaaggaacagcctatctacagaaaaatttaaaacttggtcatggcaggtacagagctgggccccatgaattttgttgacattggggtcagcagattctgtaaattttcactatacctctcatatgatctgccgccacaccattcatactcttttaactttatttctcctcataccagtaaattactaaaactgccaagtttttttttcacaaattagtatttttagcattctcttccttcagtctgcaatgaaattctctactcccctccctcctccttcctccttgactcccactaatgcacatttgtgttttggtttccacaccaaatgagctaccttcaataagcatcccacaactccacagggaacttttgtttctctaccttctgtgctgtggaagcacttggctcagaatgagagatctgtctgcatttcagatctacaaattactcattgtgtgaccttggacatatccctaatatttttgagcctcagtttctcaaaaattagaataaagataccaaactcctggggttttgtgagagtaaaatgagacgatgtgtgtaagagactcagtgcagtgtcagtatctaccatgtgctatgcactctgcgttttctttttttttttttttttttttgagacggagtctcgctctgtcacccaggctggagtgcagtggcgtgatcttggctcattgcaaactctgcctcctgggttcaagagattctcctgtctcagccttcgagtagctgggactacaggcccttgccaccacgcctggctaatttttgtatttttagtaaagacagcgtttcaccatattggtcaggctggtcttgaactcctgacctcaggtcatccacccacctcggcatccgaaagtgctgggattacaggtgtgagccaccatgcccgggccaacccatagccttttggtcttctctcagccaaggcatccagtgaaaatgcaatttatttttcagattcctctggagaattaaaaagtctcttttgcggctggacacagcaactcctgtaatcccagcactctgggaggctgaggcaggcagatcacaaggtcaggagatcgagaccatcctggccatggccaaaatggtgaaacctgtctctactaaaaatacagaaattagctgggtgtggtggcacaggcctgttgtcccagctacgtgggaggctgaggcaggagaattgcttgaacccaggagacggaggttgcagtgggccaagattgagccactgcacttgctctggtgaaagagcaagactccgtctcaaaaaaaaaaaaaaaaaaaaaaaagtctcttttgcatcaaattgccatactctctgctcttggtcctcttttccatgtactcattcttcaagcatttattttctcattgcctgatccagatcattgcaatgaccaaaaaatgttcggatgctatgatttttgtgatattcttttagcaagttaatcacgatgttgcattcttgagtgtgcaagtgtggaggtaagtcaggatgcatctttaagacaaaaagatgggtcacggcagtgccacaccactcacggccacaccaggagagctgaaagtcaccaacgaagatgcctgacccagaagctggctgctagggagccaagccaggtcactccacatgtggccaatgcccggggattgccctccaccgcccaagcttattattattactattattattattttgagatggagtctggctctgcctcccaggctggagtgcagtagcacgatctcggctcactgcaacctccgcctctggggttcaagcgattctcctgcctcagcctcccgagtagctgggaccacaggcacgtgccacctcacctggctaattttattttttgaatagacagggtcttgttatgttgcccaggctggtcttgaactcccgggctcaagcgatcctcccacttcagcctcccaaagtgccaagactacaggtgtgagccaccacacctggccaagttctacttttctaatatttaaaatatgaaataggccgggcacggtggctcacacctgtaatcccagaactttgggaggctgaggcgggcagatcaccagaggtcaggagttcgtgaccagcctggccaacatgatgaaaccccgtcactactgaaaatacaaaaattagccaggtgtggtagcagatgcctgtaatcccagctactcggaaggctgaggcacctaaaccggggaggtggaggttgtagtgagccgctaccatgccactgcactccagtctcggcgacgcaatgagactctgtctcaaaaaaaaaaaaaaatagatgatgtcagtgatttctattacatgaggtctggaagcactctgtacgtgattgctccacgtttagtggtgctaagttcaaataattcaggtggtgagaaactgacttccgtaggagtgcgggtgtgcgtgcgtgccgcggaaatcccgccttctggcacctgcggttgccccctggcctcagccggtgggctcccaagtaggaagataaaccgcattgcaggaagcgggagagtccggaggagcggcgaagcgctcctcttccccattggctgcgcccacggagccgccttgcgattggccctaagcgcgggtggcgggggtcgggagaggcgtcaggatccctggcgccgcctgagccagcggctgctaggaggctgtgtccgcaagccagcggggcgaggcggctgggccctgcgcgtcaggtcccggcctggggcaccggggctgccagcgtcggaggaggtgcgggcgctgggttgacgggcggccgaacggggggcctgcgcggaccgcccgcggcgcagccttgggtctgtctccatgtctaagtggtggtggctgtgggtttttctgcaggtgatccttttgagtaatttgtttcacgcaggcgccctgctgtagggtaaagcggcagattcgtgctgctgtcatttgtcgttcaaactgtgggcttcttgaccaggcgcggtggctcaagcctgtaatcccagcactttgggaggccgaggcgggcggatcacgaggtcaggagatggagatcatcctggctaacacggcgaaaccctgtctctactaaaaatacaaaaaattagctgggcgtggtggcgggcgcctgcagtcccagctactcgggaggctgaggcaggacaatggtgtgaacccgggaggtggagcttgcagtgagctgagattccgccactgcactcaagactgggtgacagagggagactccatctcaaaacaaaacaaaaaacgatgggctttctgtcatgtgtgtgtgtaccttttggatttgagggcagggggatgacattgtgatctggcctcctgagaaaccaggcacaccctgcctaccttggaaggaggctttcccttccccacctccctctccctccatctgttccctctttccctctctgcacttcactccggtcccccagctcttctctcccatctttttgttctctgtctctctcttttgttttttttctgcattaaacctttccggagtgtctttgtaaaatagtaaaaagcgttaggtcttcaacatgtatgtttacttgcaggcctgagaactgggaggaagctggagaaaagatgccct

SEQ ID NO: 6693 - DNA, 6000 bp, Homo sapiens
gttgatgtttttccatcacagaatgaaggtgaacattcatctaccggatatttagtaagaagccaccctgcgcggtgctcttctaggcacaggggctaccttgcagcagtgaaagaggcagacactgactcctgccttgtggagctgaacgtcttgccacgaaggagaagaggcagtcagctaacacgtgggatgcctatcggtgcaaattcaaatagagctggaaggggatgtggagccctgggtgggttgtgtaggaagtgcctggagagttgcaacccagctgggctgagctctctggtgtcttccttctgcccggtcttggtttcattatcttagttgccctgttagttccctgtggctttaaaatacattttttgtaagcattttgtccatctttcctagatgtctcctgaagggctgtcccaattttcttggtctgctactggcgcaggcaaaagtgagagggatttttctggatccaccctctccccaatatgaccatctagattgttaatgttgccactttgtgggtttttttttaatgtgttacctgctgtgctttctacttccaagaatttttggctgttcctcatttacttcctttccatggcaattttatagatgggctggtcttctggatatctaaggacaataacggtgatttctaatgttattgtctgtgttctgcattggctctttttcctcagagaggggaaactcacttgggtgaagtttgctttttttttttcatattaccagttgttctaaaacaatccagtgactcttgactgtaatatagattcatgcttatcattgcagatatcgaccagaggttcttaaacctggctgcaattggaatcacccaagaagcttttaaaaaatctgggtgctggggcctggtccccatgtgtactgagtctggagcaaggcttgggcattgcttgggcattagtagctcatcaggtaaccttaaggagcagccggtcttaagagcagctacttgaaataaccagcgtgggacttgcagtggcatcctggatgtagcaacatggcggcctcgttattttcccacctgcgcctcatcctagaatggcctgctttctctgattttgagccttctcaagggatctactggaaaaactcacttttttaaaaaaagtgtccttgcttacttaactctgtaatatgttttcttttttcttttcttttttttttgagactgagtctcgcactgtctcccaggctggagtgcagtggcgggatctcagctcactgcaacctccgcctcccaggctcaagagattctcctgcctcagcctcccgagtagctgggattacagacgcgcgccaccacgccctgctaagtttttgtatttttagtagagacggggtttcaacatgttggccacgctggtctggaactcctgaccttgtgattcgcccgcctcggcctcccaaagtgctgggattacaggcatgagccaccgcgcgtggacaatatgttttctcatatgtgttagactttcccgctaatgtgttcatcagttttatgtattcctgacatccctcaatatcttctgagatatcttttcgtcttctgaaggtactttttcccagctccccagcacaactgtacatttatctttttgaaaaatatcatgtgttttgtaaaggaaatttagtttggaaaaacggagaacaaattatctcaggcaggcatatcaaactatgaattccttagaaattatggtatgtgggataaggaaaagcttaaaaataaaaaatataaatttttgcttctctctctagaatatatttttttttttttgacggagttcactcttgttgcccaggctggagtgcaatggtacaacctcggctcactgcaacctccacctccctggttcaagcgattctcttgccttagcctcctgagtagctgggattacaggcatgtgccaccacacccggctaattttgtatttttagtggagattgggtttctctgtgttggtcaggtgggtctcgaactcccgacctcaggtaatccgcctgtctcgacctcccaaagtgctgggattacaggcatgagtcactgtgcccggccagaattttgtatttttaggattatgtacataatcatagatttagcttactcaatcattagtcaattacttttgtccaaaatttcacagctctgtattttggaagtttttggatgatgctgaggccatattaattaataggtagcatctgtgcctggtttttcatattacaaatttcagaatctggctggacccaggtgggaggattgcttgagcccaggagtttgaggccaccctgggcaacatagggggaccctgtctctttctaaaaattaaaaataaaaatagtttatttatttttgagatgaagtcttgctctgtcacccaggagtgcagtggcacaatctcggctcactgcaacctccacctcccaggttcaagcaattctccttccttgacctcccaagtggctggaattacaggtgtgcatcaccatgcccagctaatttttgcatttttagtagagacgagatttcaccatgttgtctaggctggtcttgaactcctaacctcaagtgatcctgcccacctcgtatcctaaagtgctgggattacaggaatgaaccaccacgcccagccaaaaattaaaaatatttaaaataaaaattttaaaaatgtcagaatctgttatgcctatttgtaagggcagtcactagagtaaatattaaacaatgctgtcaggttaaaatgttttagactgtgattcttacttattccataattatttatttcaccagccattagaggtactgattcttggtatctgaaaactggaaacaatcttgatgattgtctcattcaattctctatacttcttagttggaaagtaacacccagagtctctttttatgccctgtgtgcatctcgcgcatctaggtgcgatctcatcacatagctctaacccccaggtgtctcccagcatcccccacagctgtgtcaccagtgtggacctttgctgtcatgtccggtcttcgatacgccactgcccacttgccatctcacacttaacatggcttatgctgagcttgcattttctccttaaaccacttcatttatttttctcactgaaacatccaacctgttggccagtcacattagctctgcctggaagacgtacttccaatttgtccatgtctgtctatccaatgccaggtgtaagccacctcttaatttacacctctcctgctccaactctgctcggaatcaattttctatctattaaaagagcatataagatcttctcatctcacgcctctctgcttggggcagcccatggctccctattgcagttggagcaaatccagagacttgtcctttccaaaggctagtgaagccctaaatgctggccactctgctgctcctcatggctaccctctcctgcatccagacctgctcttgaccccagactgacatcaccactgccagcacgactcctgctcctgagggctggtgggcacctccagttctgcctcatcttctgtcttcccaactcactagatgaaacttgggtttttagctgttgggccaccctcacctcctctcttgcacatcccacaaccattccaacagcatgtcccgcatgctctgaggaggctatgtcccacatccaccatggccacccagcctgagccacagcacctttgcaggatcactgcagtggccgctcgccacgacgtctcccttcttctgccctggccctctacattctatttacattgcagcaggagtgatctctggaaacctcggtaaagccacttgatgccacttctcaaaatcctcccaagctttccctctcgctcaaaagccaaaatcctcaccgggatccacaaggccccacatgacctcactctcggccacgtctccaatctcccactcagctccagctaccccggcttccttgctgggcctgaaatccctgaacgctccctatcccgccccgtgcttaccatttcttccctaggtgcctgcacagcttgtgtccctaggcctccgctcagtgttgcttgagaagcctccttggaccgcccaattgacaggagcaagagcaggatcccacccctcccagccctggtttcaggtgtcccttcattttctgagccatctttgttgggattcccacgtgaggacttagtgttccggggagcagaaacttactgtgtttcccaggtgtccccattgcctaaagcagaagctgtggggttgaaggttttagaatgagtgtgaggcagaagccccacctgtttcttaaacacattgagatttctccttctttgggaccttttgacagagctgccccctctgtctggaagcctcttccacctgatcttgtcccattcaggtttcaactccagtgcctctcttcgaaaaggccatccctcatcccttccaaagccctccgtgggctctcatggtttttcgttcagttgctgcagctccatgacaacatcttgtcctctctagctctccgatgaattcctgtgcctggaacattgccgggcatacagcaggggatgagtaagtatttgccgaacaaggacacttacagtggttctcatggcctatagcaggcccttgttagagccctgtggtgcagatggccaacccagagttgaccagaccacatcagagcctcatcctcgccccagcaggccagggtctcagagtccagctggcagaagacacctgagctcaaaacccctccacgattccccagatcacacagcttggagacctttccagaggtgagctgagctaggccttcctggaaatcctgactttgcactggggaagagcaggtggaaaaagattccagacttgaggagcattgtgactcacagaatcttggaaccttagagcggaatgtggatgggatgagtaaggactgttctgagaaggataaggagacctctcaccttggggctgggcctgaaccagggaggggctgaagaaaatcagcaagctggttcccctcagggcctcaagggacctctgcctgaggaatcagcatttggctttgtaagcaccaggagtactcctggaagctccagggtaagcaaatggaatgaggcggtaattactttggcaacagtgtggactggctgaagctgggagtctggtaggcgcggacacccctggagactttgggcgaagggtccacggggatgcctgtgaagacaggaggccgaagtgtagggaggccgaaggcctcgggggtcaccaggtgggctggtagaggaaaacacggagccatgggatgtgaggcctcaagactgcaggcgctgtgggccttcatttgcagttgatgctccgtttgggtttctgctggttgactgtgagacctgactcctttccccaacaatgcagacttcagccaaacctttccctgatctgggcctctacatgtcaaaagcccacccctgtgactgggggatgggattattttcttcacacctgtcaccactctaccttctaacactgggttctgggcaacattgtggatggtggcaaaactgggcagagatgtaagaatgtcataactggagccgggtaagccagggtgctggaggggagggcctccccaagccagggtcctggcgaagacgtgatttgagtccatccagggcagtgccttgttagcaggcacccccaggaagagcctggggccacggccaaccgcccagccacggcctcctgggcaagaaataactgcttctcatctctgtacttcttgagtgggaggcaaacagtcacagccatgaaacatctgtggggtctcactgcggacgtgggggactcccagctcctttttccatgccgtgcttattctcccaccccttctcggatgccccatgatgtggaggggagcccttcgccccacacttctgggacaccc

SEQ ID NO: 6694 - DNA, 6000 bp, Homo sapiens; identical to SEQ ID NO: 1834

SEQ ID NO: 6695 - DNA, 6000 bp, Homo sapiens
aggcctcgcgccagcagcgctcagtgcccttcctggagctctcctggcccaggcctggcgggcactgcttcccggcctgcgatgtcccaaggcggggaaggagtccagattgggtccccctcacaggttagtggtgatacattttaagtctgggagagcggcctgcttgtgcagtgggtcgccgaggataagaggtgagccccctctctcctggctgcagtccttggcgctttggtccagaagggtgcgaagagcgctgggccgaacatactggagactcaccacggcccctccgaggaagaggcacaggacgcctgtggcggtggggatcgaaagaaaggagggcatgtggagtcagggctatgttgcccaggctggtctcgaactctggcctcaaacgaccttcctgcctcgacctcccaaagtgctgggattacaggcgtgatgcccgggccttcttccatcttttggagcctaccccttgtgttacctcccgccacacacctctaatctgaattacatgaaacacggcaagacaccaaacccttctgagccccccacttttcatctgtaaaatggtcataacagtgcctgtttctgcgaactattgagaggggcaaatagggtaatagatgtgaattcattctgtaaactggaaagtgcacacccggtgtgaatcctgtctccacccttagcccccggggcccattctctcggtcctcaccggttgccagcgtgacccagaaggcggcgccgtactgagtggtgagcgcggaggagcctaggcggagcgggcagagcggcacgctagagatggaggccaaggcgaagaccccgaagagcgcgaaggctccggtggtcagcagtgccaggcctccgtagagcggggccggcgtggagagcagcacgttggagaggagccagaagcagaacgccaccctgccggggagtggggggacccgctgtgagcgggcttctcccagcccaccggggttcccacagctgcgctcttctttatccctaccccagcgtcaaagccagggactgggatggcagcggtgcaggggaattccccgggggagaagcgggctcctgaggtccaggcggtggctggagtctctccggattccgtctgtgcagatctcgtggatcttctaacccgcgaggctgtcatgcccaccccgagcgcgtcgggtctggctgcagctgctcagcgcctccgaggcctgcatcctcccgctcatacggcccagctcctggcacacacacacgtgcacacagccttccctccagcacttaccatagcgtggccgaggcgtagtgtcccgccaggtggtactggtggtacaggccgcaagggctactcggtgtgaacttctccgccaggtagagcactgggtccggcagccccttctccagtgcgttcgcgtactccgcggcgtaattctctttcagacgccaggtgaactgctcgttgtagtcaatggtctcgttcagctgatgcactggggtccctgtggggtgaggcgggctcatggggctgcccgcggtcggagacctcgcaactaagcggattcagacaggaaagtgggggtgtggcgctctcggcgggagaaatgggttcggtggtggttggagaaaacgcaaatccacgaggaccacaagctatttgagcttgtgggatgtgagaggccctccagctatccctgacacactcacctaaccggggatctcccagctccaggagttcatttagccccagccccctcacctgtgagtgtaatattaatgccctccaggcccacgagcagacggacacgggctgtaacgcgcgctgcgctgaaggctttgtaggatgtgttggtgttcactgtacccacgaaccattctgcactgaagtgcacagctgtagggaaaggcacacggtgggggtgggatgagggtgggaaaatggaattagagagtggtatgggaggtgggacactgcagagagatggggacttagaggtccaatgtggttgcatggtaagggccaaaaagtgggccctagaaggagctggagagtgggaagagggagcagaaaaccaaccccagttccctattgtcccaggtgccctctgcccacctccttcctcaccccgtcctctccccatgggctgcaccacacactcacccacaatttctgcgcctatgaacagactgagaagaactctcaccaaccaaaaccagcgctgcaggaataggcacccgggtcaggcctgagccctgccaaaccagagtccccaagaccacccttgaccccacttcacctggatctttagttatatccagacttttgagactaatgttaggcacgcttttcctgcaagtccctctgggctactggcatttctgatattttgtgaccacgcactttcacctccctagccccatttcccatctaccctaacagcacctcccctccacccccacttcctggcactcttccaccaccttcactcccctagctgtctggcgcctggtcctggttctgcctcctggtccagtcactgcttggtgaggctcagtgagtccagaagtgctaggcacgcaggggtcacctccctcagaagagggaggccccagcctgatctccgaggggaggaggtgggaatgcagatactcctaggtgcaccagttccagggaaagcaacacagattaagatgcagaaaagctgggtcctcccagaactgaaaaatgcacaacctaggttctgggagagggggaaagtctaagacaatgcacccagttggctccaacttctaatccaatgtgggagtctcagtcctgaggatgaggcacccatacacatgtgtctcaacccagtgcaaaggggaacactgcagtctgagctgctggcatctgtccttttggcctgaaggtcatcacccaccggatgggatgagagtgcagctttagtcctgggagaggtgggaggccctccagcacaagaagcctagactgttcctcaggattactggactgggtgcccattctctgcagcagccttcccaaggacccagctggggtccttctccaggatatcctggatggggagctctccctatccttggaaaggggtgcttgctgcaccagactcctgacttcactccacctgagcctcaattcgactattcatggaggctcttgtacagtcttacctgtcctgggtccctcaggagacaatctgcccatgagccttcccccactctacctgcactatgaggacacccttaccgagtggccacggatccccggcaagatgagcaggaagcttgctgctagagccaaaaacactagaataacgatgagcagtggaacgctgaagcctgcggcatgccggggctgggggtaaaaaggcagtacgccgttccacagggtcatgctgcacgccggccgagtgctgcacgcaggcgggcaggcaagccagcaagctggggctgcctggacgcgggagagcgcgtccttggcgtctctttgcgtacaaggctgggaccgagtgggctggtgaagtctgagtcctgcacctctccgttaaggaagcgtggaggtgggctgctctcaacgctctggggttggtaccgacagagtttttctagccggcgagcgaaactatttctcactgtctgtagccgttactttcctggttctgcgggttggcgctgagtttggaagtcgcgcgggaccccttttatagcagcgtgggcgacgtgccacacgggtgtcccagcccaggggctggtctgagctggaagaggttgtgcaaataagggccccacctccacggcaggagggtgagccctaggtccagatgctcacactggcgcaggtctgtcctgagccgacacctgcacagtggcgagaccaaggacccagagagaaaggtgagagtgcagccggggaggctgaggatcggcggagctggaagagtgagggtgaaggcaagaagtagagcacagaagcaaagattttaagaggaaagaagacatctgaacccaacaccaccctaaaccacaggttagaccagagtttgggatctgaccctagccctcgcccatcatgcacaggcgttcattgcagaaggggagtttattggggaaggggggattcattgtggaagggtgctgcagtccctcactcccaggtcagtaacctttttcccttccctgcctcctggaggagaagcggagcctgacggatcgggggcgggtggaggtgaaacattggagacattgggcacaccctgggaggcttgaccagtcctgccctggactgacatgccccagaagactcctgcccagtgggttcctatggtcgggggttaactctctgatggggtggcggatggggaacagtgtcaatgcctccagagctgccaattgtcctggaaagagtggcgtttggatgaaggtcctcggtgatgcttctaacagctaccttccagaagtggaaacagctggtgctcctcctccagtactagctgtaggaacaagaggggaggcatagaggacgccctaacagtggctttcgcataccacctaccacccccaccctcaccccgcaggctgcagggttggcatgctccgtgcaagaccagaggcactgatgctcctgggagctcttctgactggatccctgggtccatcgggcaagtatcaggctcctctagcggcggggtgttccccaggatccctgggaggtggggcggggagaggtgcggcaagcggctccctgagactggaaggtcatttcgccgtgcagctcagcgggatgggaaacttcccagtgcggcccgacacttgggtccggttaggggcgctccgcgagctggggaaggactggccaaggccttcgttgctcgggaggggtagctgggagcgtagtgctgaggaggcccttctctgtgcccacaggcagtcaggacgcactctcactgccctgggaagtgcagcgctatgacggctggtttaacaacctgaggcaccacgagcgtggtgctgttggtgcgttctgggggcccgggcgtgctggggccgtggctcgcgaagggccggggcgcgaaaggccctgagcggggaatctgcggggaacacgcgcccagcagctccgctgcctacacagcgcaatcttatgcgctcccggggccaagagacccttgagggaaggttctgtcagtgaagtgggatgggggttgagggaggcttagggagaggtttgggggatcctaggggatggagtgcttagacagagccccgctccctgcctccgcaggctgccggttgcagcgccgcgtaccagccaattacgccgacggtgtgtatcaggctctggaggagccgcagctgcccaacccgcgccggctcagcaacgcagccacgcggggcatagccggcctgccgtcgctccacaaccgcaccgtactgggggtcttctttggtgagggcaaagggggagaccagtggggttgatctggcgctctgctcagcctgggggaggggccagatcccgtctgcgagtccacaggagacccatccgactcccaaccacttcctctctacgcagcacttcgagactgccttcatctcggagagattttgggatgttgatacagagatatttgctctgtatctaacctttctcttacgccttattccaacctaggggtgtcactggacccccattatagctcttgggaactgagctccccagccaccgctctcctcaccgtgtgtttgtaaccattttacctccccctagcccagagggaggaggactgacttggggtacccctacataaattatatcattttgattctcacaacagctttatgaattgagtaggaagggaactcactatagtcttactttgcagattagaaaattgaggctacctggggctaacgtgcagagctggtggcggagctggcactgggacctctgtcttttggctcctgaggaca

SEQ ID NO: 6696 - DNA, 6000 bp, Homo sapiens
gattttacagaatcagaattctcagaggtaattttgagttctttgtcacttgatttatgactttagactttgtcatttcatggacttgtggaaaaagtaccatgctgaagtcaggagtctgggattaattaggtatttgataaaaacttgatagctagtctcggttacttagctatttgaccttgtacaagattccacaaatttctgggccacagtaaaatgaagatattaagaggtttgctagtttgctatctacctaacaggattaaggattaatctaaagataaaaggttacatgttaagtattttaaaggacaacacaacaacttattatagttgtatggatccagtttgccaattacattccaaaggtactttgtcggtgtaatagttgtagatatcagtaacattagcagtattgatttcattcgtctggttctttttgtttgtttattcttctttctctttctctctttgattctagacaggaaataatggttatttctgtttcatgccatgtgctaagcctggttttgagggagaagaaagtaaatctaagacatgcatggatcctagcaagcaaggccatgcctcgtagtagagaagaatgacacatatattaatcagtttgggaacaataaaagaaaaaataatgtagtaaactgtccataggcaatcagagcagaagatgttggaagatataagtactagagaaattttaaggaaaggaatgtggaacataattgttgggaagcataattttttaaagctctgtgactttttgttctgcaaaatatagtaaatatctgctatcaaatatatatatatatagatatatatttttttaagatggaatctcgctgtctcgcccaggctggagtgcagtggcgtgagctcggctcgctgcaagctccgcctcctgggttcatgccattctcccacctcagcctcccaagtagctgggactacaggtgtcccccaccaggcctggctaatttgttttttttgtatttttagtagagacggggtttcaccgtgttagccaggatggtctcgatctcctgacctcgtgatccacacgccttggcctcccaaagtgctgggattgcaggggtgagccaccgtgcccagcctcaaatatgttttttgttttgcttttgtcttttaaaaataaagcccttgataaaggaccttttataaaatacaagattaatcaagattagtgtaatataagcttacagctggataaatacatttctgttgtcatttcttagccttccaaagacagtatttaaaaattcacttggcaaacctttgtaaagggttttaggctttgaaagaatataaaggttcaaggaatgcagacatacctttgcaacagattattaaaagcatcatatgctaagcgtctaatatagtgttcatcatcttgcaaacaacttggtgaatgattgctggctcatttagcagggttataaaggaagtgtaaacaatttctagctatctcttgtaaaacgtattgtgccctgatcatttgtactttgcccaacctttgccagattataaactctacaagaaaaaatcacatttgttcaaataacctttttctcccaggaaggtttaatttatcaaggcaagcttcaccctgcacaaatagtcacggaggatactttggaatgagtctggcaagacagcataactctgcatctgctgtaacccagtgttaaattttcaaaggcttcttgtccctagtggattgtaggagatgtgcctggcatgagaaggaggaagtggtgaatggatgagtagtaccagcatgtatctgagaggaatataaagagtcattattatcctctttctggttgctgttgcagaaattcctaggagtagaaaacagtggagtgcttttattttgttttttgaaagggtagcttggtctttaaaaatgtttaatgatgataacatttttcattagtccagaaattcagcctgctgtttgcctatagaccttagtaaaagagctaattaatgattcagaccccaggcgtcagcaaacttcatctttctaccagataataagtaatttaggctttgcagaccatcggtctctgttgcaactactcaactctcagctgtgccattgtagtgcaaaagcagccatagacaatacgtaaacaaatgaatgtgcctgcgttcctgtaaaactttatttacaaaaacaagcagcaggccaaatttgcctatggacctttttttaccagcctctgtttaagactttcactggcatcattcagtttttctaaagacctgtttcttggcttattccttattcaccaagctaggttccagcgtaactgatgtgaacctggatattgaactaaccagagatgggtccactttcatatatttgatatttgtcagactgagataaaaatggaagtcgagacacaaaatctagaaaagatattgtttttgacattaaagagctaaacatctagacatttgatcagtcttgatgagtaaaagccattgggacaatttgaacttgttaagcaattccagtcttaaaagtttttgcacatctagttagaagtgttcaaaccagtataacatggccaagtcccatgatgtattagggacactctttgagtaacagtcagagaacttgagttctagtcctgcttgtccagatagctagcaagcatgtgacctgccagagcctctttccttacatgtgaaataagcatatgagaacttgccctgtttctttgataggattgctgggaaaccaaatgagaatatccagctaaagtagacacactgtgacacacttgagcccattaccaagttttacacctttctagtacttattgctatctgaaattatctgatttatggtggagactgtcatatctgacatgatcaggactagtagtttgtcagttcatcaattatataaataaacatttttaaaatacctgctttaaccagttttaaacaaaaatttaaattaaaacacttaaaacatttttaaacttaaaatatatcaatgtacattgctttgctaatcttttgatgaaggttcaaggctttttcttagagtctggattctctgattggcgttctgcttcatttagcttgaaaaatgggaagatgcatcacgtacatttctcaatgtatttatgattgagaaattgactaagaacttagacatttggaaaacaatctgaatgcagaatctgtctagatttttacatttttgaaaaccaatattttggccgggcatggtggctcacacctataatcccagccctttggggggccgacgcgggtggatcacgaggtcaggagattgagaccagcctggccaacatggtgaaaccctgtctctactaaaaatacaaaaaattagccgggcgtggtggcatgcgcctgtaatcccagttactcagggagttgaggcaggagaatcatttgaacctggtgggaggcggaggttgcagtgagctgagatggtgccattgcactcctgtctgggcaacagagtgagactccatctcaaaaacaaaaacaaacaaacaacaatatttaacagctgttgcacctaccctattcaacaataatttttagcaaactgattgagccattttaaagcattcaaatgttttctctttagttgtcttctaaaatacacatagccctggaaactttctaaattttttttcagttattaaaaatttgtgaatttgcttatcatatcacttccttgtatgacaaaaagacttgaagagatgtgagagctgaatggattagaaaaaggagaggtgtggttggtatgaggcatattgacagggaattaccaaaggcagatttgcactgtcacacaattttggcaagtgttaattctgttgaatgggaaaatcaataatgtttttttttttctttttctttttctttttctttttttttttttgagacagagtctcgctttgtcacccaggctggagtgcagtggcacgatctcagctcactgcaacctctgcctcctgggttcaagcaattctcctgccttggcctctgaagtagctgtgactacaggcacgtgccaccatgcctggctaatttttgaatttttagtagaaatggggtttccccatgttggccaggctggtcttgaactcctgacatcaagctatctgcccgcctcagcctcccaaagtgctggggttacaggctgagcaaccatgcctggccaataatggggttttaagagaaataaagcatatttgaaagtatgctcctgatcttaacggggcaaaatatctttttttttcccttcacaaaatatcttgaggtgctattttctagacagaattctgagatgcatggatagcccatggttttggcttagtataagtgcttttattctcttatgctagtttgtgtgttctcttgtttcattttattgaggctctctaatagaagtgctatgtcctgttttgtctgcaaagcatggcaaaaaaactggccaagaggattccaagtctgtctgaaggtaaacatgctgttagtggttggccatgagatctcaggcaggaggagcaaaaggcctcaaaatatcaagatgttttagagttcttcattcaacagatactgagtgtctgcccagagggcttatgtgctcaatgctagggatcagcactgaacatggagtggttggagtctcaattccaataccttatacaaagagctgtttactgcctatgaacctatcatgagctgtatttttctcctgtaagtattgtgtttatttgcttctacttccaggccaacacatatgaaaagtactggccattttaccagaagcaaggagggcattattttcccaaagatcatttgaaaaaggctgttgctgaaattgaagaaatgtgcaatattttaaaaacggaaggagtgacagtaaggaggcctgaccccattgactggtcattgaagtataaaactcctgattttgagtctacgggtaagtgatgtcagataactaaactgccagtgtctgaattttcaatttctttcttaatgtgtaaggggaaagctccaaaaaatttcttggagagtcctttgctttgctagttcttgaaaactttaaagatttatttaggaatggtttggtccatgttgatatgattaagatgtatacattctaaactccattccatctcgtggaatctccttgaaatgacaagttttcctaaactttatagccatttccttacataataacagtggattcgtttaattttcctcaagaacagaaattaaaaggggaatagaaacatttccattttatttttaactgacattgctgcatgactgttcttgtgccttaggtcactgttctaatttctagttttagattgatccttggctcaatttttatcttgtgataccgatagtcctttaagagctgtgtttctgtatagcaagaaaggagcttacaaatggtgaaagcttggtggttcaagatctctttgtacaaggactttattccttcacttttttttcttttcttttttttctgggcttcccccccaccacacaattcatgttaacaatctagtatgtgttattcgaattttttgctattttcatatatatatacacacatgtatttctagcaatttttttaaccaaaaaaagaggtaatattatatagacattttttgtttgtttgtttgagacagagtctcactctgtcgcccaggctggagtgtggtggcacaatctcggctcactgcagcctttgcctcttggttcaagtgattctcctgcctcagtctcccgagtagctaggattacaggcacgtgccaccatgcctggctaattgttttcgtattcttttagtagagatggggcttgaccatgttggccaggctgctcttgaagaggatcaagtgatccgcccgtcttggcctcccaaagtggtgggattacaggca

SEQ ID NO: 6697 - DNA, 6000 bp, Homo sapiens
agtggtgcaatcgtagctcactgcagcatcgacctccggggctcaagtgatcctcccacttcagcgtcctgagtagtggggactacaggtataagccaccaccacacccaactaatttttgtattttttgtagagagagagttttgccatgtttcctaggctggtttcatattcctgtgctcaaatgatctgcctgcctccgcttcccacaggaggatcatttgagcccaggagtttgagactagcctgggaaacacggcaaaacaaggcatggagccaccacactcaagcctgctgttggacttagtttgttacttttttgttcagaatatttatgtctatgttcatcagagatattgatctgtagttttctttttttgttgtgttcttctctgattttggtatgagggtaatgctggccttgtagaacaagttagggagaattcccttctcttcagtttttttggtatacttaaggataatttatagtaattcttctttacatgtttggtagaatctggtagtgaagtcatccaattctgggtttttctttgttgggagactttttattgcagactcaatctcattattggcttttggtatgttcagattttccgtttcttcctgattcaatcttagaagtttgcatgtgtccagaaatttatccatttcctctaggttttcctgttagttagcatatagttgttcttaaagtcttgatcttgtatatttctgtggcgtaagttgtaatgtctttgttttcattcctgattttgtttatttggatcctctctctttttttcttggttagtctagctaaaagtttattaactttgttcatcttttcaaaaaaaccaagttttcatttcattgatcctttgtattttttagtctattttatttacatatgctctgatctttattatcttttaccttctactaattttgggttttgttcttgcttttcgggttctttcagtcatttcattatattgcttatttaaaatctttttacttttttgatgtaggcatttattgctataaaattctctcttagcagtgcttttgctgtattccataggttttggtatgttttgtttccattttcatatgtttgaggaaatcttttcattttcatcttacttttttcattggcccagtattcattcaggaacatgtttaattttcatgtagtgtattgtttctaagttccttttggtattgatttctagtttcattccattgtggtctgagaagatacttgatatgacttcagttttcaaaaatttgttgagactgattttgaggcctaacttatgatctatactggagaatgtttcatgtgctggtgagaagaatgtgtattctgcaagtgttggataaaatgtcctgtggatgtctgttcagtccatttgatctaaagtccagtttaaatctaatgttcttcattgattatctgtctaaatgatttatttaatgctgagaatgtactgttgaagtccctcattattattgtattggagtctacttctccctttagatctaatgatatctgctttatatatctgggtacttcagtgttgggtgaatatatatttagaattgtaatatcctcttattgtaatatcctcttactgaactgatccctttatcattataaaatgataattttggctctttttactatttttggcttaaagtgtcttgtatctgatataagtatagctactcctgtttgcttttggtttctgtttgtgaggaatatctttttctatacctttactttcagtctataggtgtctttacaggttaaggagtttcttgtaggcagcatatagatcacatttttatagatccagatccaggccatctggatcacatttttaaaaaacccattccgccattctgtatttttcaagcggaaaatttaattcatttccattgaaagttgctattgatatgtgaggttttgttcctgtcacattgttaattgttttctggatgttgtatatatcttctgttcctttatttcttttttattatatatttttgtgtcagtagttttctttagttgtaactttgagtcctttctcttcctcattggtgtgtttgctttaccagtgagttttgcacttttatgtgttgttcttaatagtagatattgtccttttgcttccaggtttaggattccctcaattattttgtagggcttttctagtagtgttgaattcccttagtttttgcttgtctgggaaagactttatttccccaaagagggtaattttatttctccacaataaagtaactttatttagaaataaacttatttctccaaaaaggataactttgctgggtatagtatttcttgacttccagatactgtctttcagcactttgaatgtattatcctgttatcttctggcttgtaaggtttttactgataagtctacggtaagtctgatggagactcctttataggtgactagatgcttttctcttgctatttttagaattttatcattgtcattgactttagacagtttgactataatgtatcacagagaaaacctttttgcattgtacctgtttggggattgctgggcctcctgtatttcaatgtctaaatctcttgctagagttgggaagattttatctattatttcatcaataggcttttgaatgcttttgttctctcttcacctttgggaatgctgataattcagatatgtggttgctttatgttgtctcgcacgttatgtaggctttgtctactcttgctaattcttttgttttacttttgtttgggttatttcaagagacctgtcttcttctgaaattctctcttcttcttgatctagtctattgtcaaaactctcaaatatatttttttatttcattcagtgaattcttcagttgcaggatttctgtttggttcttcgttatgatatctacctctttggtaaatttctcaatcatatcctgaattgtttttttcatttctttgtattgtttatctttgttctcttgtatctcactaaacttccttaatatcattattttgaattatttttatgggaatttcataaatttcctattcattggaatctgttactggagaattatggtgttcctttggagttgtatttcctagctttttcacgtttcttgtgtccttacgttgctatctgcacatctggtataacagtcgcttcttccaattttgtggatttactttcataggagaggacttcctcaatatgtatcttggtattggttgggtagggcactttggctttgattctggatgtgtgcagtagtatagtctccatataatttatttggctttcttttttttttttttttttttttttggtaaacaaagccaatggtgtctgtgacttcctcagtggcttagggtgtggttgttaatggagactgtagtgaagttttattgggcatggggacagcaggtgggacagtccttgggccccagtgggagcagtggtaggctgagcctgcctgtctttgggtccaagggtagcacatttggcactggcattagtgtgtcctggtgggatgattcttgggccaccaggaggcttgctcaggtgacagcagtagaaacagtgggctggaccttgggcccctgggctgcaggcatggcataggcaatggcagtagcagtggttggacaactctctggctcccaaatagcctatgctggtgttggcagtggctgtgacaggctggtcaggccattccccaggtccacgggtggtaagtgcaggtgggtgctagctgtggtggtagtggcaggctgggttagtctgtcttccagtctctgggaggagtggtcatgatggtggatggagccacggcagtggatggtggatggagcagggtgatccccaggcccctaggtggtatgctcaagtactggggtggggggtatggagtgcggtcaaagccagactggacagacctgtctgtatgttccccttctccccgctgtccagtggtatgtatgggtgctggctgtggtggcagggacagggttatcccaaggcctctggtggaatgctcaggtgggggtggcagtagctgcactctggccgtgctggctgctggggtgagtgggattgcttttagtagtagcagccttaggcaggtggctgggaagtgtgtgctttggctgtaggtggcagctatatgtaaggtagcctatccttagggcatgtggaaatgtgaggaagtcctgttgctggaagggtagtggggttgctgtcagcgtcttgcactttggccatggtggcagtggtggcagtggtggtggctgcaggtggggaatgtcagtggagctccaggaatgtggaaagccaagtactgttgggccctcaggcaggatgcagtctggtggggctgggctctcaaaatgacactttgctgtcattttgtggtatgtgggacccagtgtgagctccctctctggggcaatggcactgccttgtcttcaggcagctccctatgttaatttcagggtctgaaagggttgagaggctctcctatggctaggagtggagtctgtggtgagattgtggaccactgggcatccctcacttatactttccctacacaggagagcctttctgggctcccagccagacaggatgccttgtttccctcttcttcttttaggtgtttcctgtcacttctctcttgaactccaatattttctcttagatgacatatttgaagtatgattatctactctctatcttggtgcttctttgtggaggaggcaactgccagatgcctttagtcgtacatcttgaaggaccactctcattcagaacttgactcttgctgaaggaagatagatgcaaacagatctagattttaataagcctgttgctaaatgttttgagacagtgcctggaagagtattgtaggcagtacacatgtattacctcattttgttcttaagaaactcaatcgtaggcattactgttttccctgttggacatatgaggaagtcgaagtatatagagggtaagtaacttgcccaaagtagtccgtggttcaggtgggatgtgaatctaggcagcttggtcccagaggctgtgcacttgccatgtgtttccctaaacatacctcagatttatttttattccctttaataattaacctaaaaatatagttgttaaggtatcttactgcttcacttgagtaaatggtcagacaccagattagcaagtagagtcagcagaaatttccaggggaaatagcagatgtaggagaaagagtatgggcttcatgtcagctggattcaagttggaatctcagcttcatgcttaggctgagtgggaaacttttgatatgggaataacctctgtttgcttggtttccttatttgtaaaatggggatacaaatatctactctatatcttattttatttgggggattagataagaacttaaagctttatgactgttccatgcgcatctttcttgccttcctcattccttgtctatttcctcccttctcccttccttcattctttcagccactgatcccaatctttccaccaacaaggactacttttgtaactatttccccaataagggcagcaggcctgaaacagtggggaaggaaagggtagaataaaatagacagctttttggaggtagaatgaataggtcttgtaatttgattggatgtgaagagaaatagtaggaggctttgtcactgctaggtttcacagcccagagtgtgctcaggcatgcaagaatagaaactcattaaattttctaaaactgaacttgaacctctttctgtctgaggacagaacaattaaactaggcattttcagttaaatttagttcaagtctgggatgtacaattgcctcacctgttactgttcatcagtgtctaccctgctggcatccagcacttcccacgtctgtgttcctgtctggtctctgctctcttagggttgttgt

SEQ ID NO: 6698 - DNA, 6000 bp, Homo sapiens
atatggtaggaaagtaaagggaaaagggaagtacaaaacaccaatattttgaagctggatgatggggtaatgatgtataagaaggttaggactcggatcacttgaggtcaggagttccagactagcctgaccaacatggtgaaaccctatcctccctactaaaaatacaaaaattaactgggcatggtggtgcatacctataatcctagctacttgggaactgaggcaagagaatcgctggaacctgggaggaagacgttgcagtgagctgaaattgtgtcaccactgcatgccagcctgggcaacagagcaagactctgtctcaataaataaataaataaataaaaataaaaataaaaaagtaaggacagggggagaaggtcaggaggaggttgacagattgggttttagacgtaactatggagtaatggtgaaatatctgcatagtggagttcactaggcagtcagtgcttcagacatggagaagacagaggcaagaagggaatagggggaggtgccttcacagaagtaagagcttaagagaggaaaataatgagttctcaaaaggagaataaagcagagagggcaaacgctttaggctggagagatgctcatgatctctcatgggcatgggggctgacggaggaataagaacagctgtagaggaatagaaacgatgagagaagcctgccacaaccatcactggagaacagatacaagaaggaggaatggccaaatgggtccaacgccacagaatgagatcaagaacaaacatagacagggaagaggtacagatcaggcagtagtaaggtcacgtgtcagctctcagagacaggttttggtgcgatcaggcagaagtcaggagatgaggaaatggatagagaaaaaaatgcatttctccaggagctggggtgtgaaagagggatgggccaggtttgctggagagaataagagggagtgcaagcttggcacccagccctcacatccagggtggctgggtctgtttccctgctgggccagtagcccccacgctaaaaggatttagcagggtctggtcatgctaggcagaagttccacaaggccagggcctgcctcccctccctgtggcaggctagggttagggctatagctgtactaggggatctgggagtccttcgtggcactgtgggaccctgaatgtgttcagacccccaggtcatcaggacacctgggctctgctgtgtccccagaggtttttgccctgactcaggctgaggactttgggtgtaggactcgcgttttcttacgcagaggttggtggggcgttgaatgaagttgttagtaggctccacgtagcacaggcacacaggcctagtgcatcaagtggccagagtccctgcttggtgccaggccaacgtgggatgctgagcaggcagagaccactctgcaaataacaatggtgcgacccaagaaaatgaccctgagagggcagtggagacccaggcatttgagacggcctggcaaatgcatagcacctgagggccatgtgcatgtacatgtgtgtttgggggtgaggggagggtattactggccgaggggacatgtaaacaacctctgtgcaagttctaggaccttcctatattcctgtaccactatttgaaggcttctgtttaacctacccacgtggcccattagaatgttccactgaacaggaaaaccaatgtgcattcaggagagaatctcaaaggacctttccagctgtggcattcagaggtccataaagcttaatcctttaaaaggaatcattctaaatagcccaggagtgaacataaatgaatgaaaagtccatgaatgtggggactaaatcccataatagggagcaaaatggcatgataaagagcatgggctctggagacagaccacctaggccccaattccagctctgtcacatatgagctgggtgccctagggcaagctgcttaactgccccaggcctcagtttctccatctgtaaaatggggataattagacttagctctcaggcttgtcgtgaagatgaatggcttaatatttctaaagtgcttagaccaatatctgacacatagcacatgttttctaggtgttaaaaaatattctttttgatggggttgtttgtttttttcttgtaaatttgagttcattgtagattctggatattagccctttgtcagatgagtaggttgcaaaaattttctcccattttgtaggttgcctgttcactctgatggtagtttattttgctgtgcagaagctctttagtttaattagatcccatttgtcaattttgtcttttgttgccattgcttttggtgttttagacatgaagtccttgcccatgcagatgacgagttagtgggtgcagcacaccagcatggcacatgtatacgtatgtaactaacctgcacaatgtgcacatgtaccctaaaacttaaagtataataataaaaataaaataaactaaaataaaatatattcttaccctgctggatttttaagtgatgctcttgtcggggatctttatgacatacttttgaggaagatgagaaacgaggcttcttaactctgttaaacattttagacacacaaacagtcctcacttttcatggcagtatggggctgtaaaaatgaccatgcaagctaaaaccgtgcaaagcaatcctaaaaatcaagagaaaaattaaaactgttctgtgacctttaaaatttgttgtcaaagcattagaaactcttaccataggttataagtgtgtaggggaacaaacaaacaaaaatagtaaaatattttaggacacagtaatttgaaacattagaaacaatgcaacattttaagtgttttctttctttgtgaaaataaacttactaacaggttttttaaaagtgcttgccttcttctctttgcataacttacgatactgagggaacatcttttctatgccagtgaattgccatagtcctttataaatttgcatcagcttgcaacatcttatctctttgctttcagtgttgtgaaatacctctggaagttcctataatgtgaagttttttgctgggatcacttcctgtgggacatcttcatcctttttgttgcaaccactttcctcatttatgctttgaacaatggtttcaggtttcatcaatataaatcgaaacttcaagggtcccaactgtcagaaagtcacatagaacttactcagaatgatgtcaaattccactctagaaatttaaaacctcaccctgttaaaaatagcttgtcatcaacaaaggaaccagatgataacagacacaaggctgactttttagtttcgacttatatatattaaaaaaaaaacaaccacaaaactgctcaacataagcacaatgtgctttcaggagagaatctcaaaggacctttccagtgcattttcagtgccctgcacccaagcattaatgattatttaaatggtagaataacataaaatgatgaaacaactggataaattcaactatgttgtaaaaattttgtagttgacagaaatcagtctttggactttaagatctcatatagatcagaggagaaatataatgacatactccttaagaatctgatgaaagttatggcctttctccactagaatgtgccgattacaatattttatgcagtgtttcaaggaatacacagagcccccaatatccagttagaagccctggctgtgaatctagaattttattacaggtgaaacccagcacaagtctgattgagagccattgcaagtcacagaaactctaggccctgtctaagtaaaggcaaaccttggagtatgtcatctgccactgaaaatgcatttaatgatgactcactctttcctcactatacaagtttgttcaacctacacctcttcagctacagactacctaccatccctgaaactctgttctgagagtaaagggattacaaaacctggctgaaaagacagattcaatggcatgttgaaaaacacagcagaaccagcacatcagactgtaaattgattgtcttgcacaggatgttagctgctcttcgaatgaggttcctgagtggcacctgagcctattgctggtggcatcctattctgcctgttctctctttcttcctccttccccattcctttcattctcttctcccttattcttcctctgcaattctttttttccacactaccgttggccggtccctagggatactgtttaatctggcccatggtacaagagattttagatcttcattgaagtcactagagatggcctgagtgagtcactttgaattcaatagacaaactgatggaaggctctgagaagacctcaacgatgcccaagaaatgtgttcttactgtagaaacttactattttgatcaaaaaagtcattttggtcaaaaaggggagttgggagattgcctttttgttttgaaattgatttggcttcaagggaagaagattgcctaaacaaaacctgctgatgaagtcacaaaatgactccacctctggaatgagctttattttcttataatttggcaagaaatttggctttcaattgggaatgcacgtcactctacccactcaagggcaagatgataaggttctatcagaccaagcgtctaaaggaacctgagactctaccaaggtcagaaatgctgcaattcaagccaaaagatctttcttgggcttccttgttttgacttgtaaccataaattagtcttgcctaaatgtctgatcacattataaaacagtaagtgaatctgtactgtacagcaccctctgaagcaacaggagctatagatgaaccttttaggggattctgtaatttttctgtccctttgatttccacaggactctaaattgccccctctgaggtcaaggaacacaagatggttttggaaatgctgaacccgatacattataacatcaccagcatcgtgcctgaagccatgcctgctgccaccatgccagtcctgctcctcactggcctttttctcttggtgtggaattatgagggcacatcctcaataccaggtaagtcagtcatttatttctgtatctaaggagattatttacttgggattttggtccatgatggtaaagaaaattttgcaaaaggacaaaaagcaaacctggaaagatctctgaagactatgtctgtgttagcaaatgaggacttgggagaaaattttcagaccaattatctgcacattttaaatgaaagcacttaaaaaatatcttagataaacccttccactctgtgctgtgctttcgtaaagtagacttggcacaagtaccctttaaaacaagctcaagatggggtggagtaaagtaaaattccagggttttctggttaacttttaaaaaatagattgcaattttgctctgaaggtgaaaatgtctctggaacatcttcttcactgcttttcttctccctttcactttgtttccgccatgccccctctttgtcttgtatttatcccttctctttattccactcatcattttctcttattcttgggaatgtggtgatagtggtccccatttttctcccactgtctggatcccattcgacccttatgggagcctggtagtgggagaaaaatggggaccactccagtgctcttggaacatcataccccgggagaatcttcaacaagatctgtggttcaatcaaaagcagagaataatataattattcagataatcccaatagaaaaccccacccttccacccttaaagccgcaatgatcagatatcagattaattcagaatgacttgaaatttcagactgcttctttaggtttcagtgaaaatgcttcattgcagacacatctgttcccaattccataagatatccaatgagactttaagagcatagttacacactggtaagtgtggtgggcctagtctcagtgggatcagaagtgggagcatggggctagcacaaaatgctctgtgtctggattctttttaacattccagataat

SEQ ID NO: 6699 - DNA, 6000 bp, Homo sapiens
gcaaaataactgccctgtaatcttcaaaagtatcaaggtcataaaagccaaggaaacactggaatttttccaaatcaaaggagagaaaagaaacatggtggctaaatatagcacacgattctgaactggatagtattgggacaaatggcaaaacctgaatggggtctgaggattaaatgttagtaatgtatcagccctgatttcctgattttgatgattgtcttgttatctaggaaaccacccttatattgtagaaattatatgctaaaatgttcaagagtaacagcatggtgctagcaacttactctgaggtgcttccagatttttaaaagtttttcttttttgtttttgtttgtttgtttatttgaggtggagtctcactctgttgcccaggctggagtgcagtggcacaatctcggctcactgtaacctctgcctccctggttcaagcgattctcccccctcagcctccttaatagtggaattacaggcacccaccatcattcctggctaatttttgtatttttagtagagacggggtttcaccatgtgggcctggctagtctcgaactcctgacctcaggtgatccacccgccccggcctcccaaagtgctgggagccacctgggagccaccgtgcccggcctcaggtttttaaaaggtacttggaacttttgaattgtacttgcaacttttctttaagtttgagactctttcaaaataaaacaaatgtttagaaagtaggaaaggctttgtgtacacaaagaaaaagtggcttgggatattttgctacaacatgccttttaattttagcattactctcattaatgctaaaattagcattagtattactttaattatataaacactgctggaaaaactaaacagtgtagaagtagtacccagtttgttgtaagtccctaagtcatagacagtcttcttaaatgggagttttgctggaaactattagtagtaattatatatgttacagtaacctgtgttaaataaatgtaaaggttcagttttgaagctgtaaatattttgtatgatgtttattagtacatgtggtcttaaaacaaagtttgaatatttggaattgcaaaatataatttaagactagacacagtaattttcctataaatttatcaataatttttgaaggtttttctgtttggctaattgatttgtttaatataggtcaggttaaaatagaagttttggtttcttctaagacgggatgaactttgcctgctgctaaaatatgtatcttcttccacttttcatatttaaaaagatagcctataaactaatgaatacaataaagatattatatataatgtaatgaaaactaatgtatataaaaagtaatttcataactagtccgagtctcaaattccaaatgaaataaaagaggaaaagggtgtctcaaagagatagaatttcagtcttaactttgataattagaaagcaatgtaggttaaagagtaatttttaaatctattcactagtagaatttaaagcaagttacatgctttctaagccatggaaagtataaacgcaatcaaaacatagtctataagagtaagaggagatccttttgtagttcataagtgtgatgattgggtttgcacactcatatgtgagatgtgccttcctcaaaccttgttagggcattggcacattatccatttgagggagaaaaaagagtaaggggaaaaaacaaaggcaatatttaaaccagaaaatatttaataacatgggaaaatgcaatataactatatgcaagatgaccccagttttgtatttgtgttcatgtgtatgacaaatgttgttatatgtaaagagactaaaaaaaatcagattgagcggtttcctctatgagatgaaattatgggtgatttccattttctcctttaaacttttttttatatttaaataatatatatgtgcaaatatctaacatatgtatacaactcctaaacaaatgttctttaaaaattacaatatactgtgttctattctatgttttatatactgtaaaagatactctaaaatattttgtagttttttttttttcagtggaaaaatctgtttatttctaggctcattggtgggcagtattacttatgggaattgctctgatcatgctaatggctggatttattaagatatgcagtgttcatactccaagtagtaatccaaagttgcctcctcctaaaccacttccaggtaagaatatttgagcaagatacatatttatgtaactcagaattgtttagcaggtagaattgaattataaatgagtctgtagtaactaatgttacagtactttctccgtaagaatgggattattggatgaatgatttagttgatatttgtgtgctttttgtcaatccaatctggccagtgactgctaagttaatgctaatttatctgagtgtctgaaaatatttagaactagaaattttaaattttgcttggtatttgttttcttgtttttttttttttaaatatattctaacatattcccttgccatgattatggtgaactactttaaaattgttgatctttctattctaatagttgtgcttctcatattgttgtccttcattcctccttccttcccttccatcttccctccctcccgccctcccttccttctttttcttttttctttctctcactgtgttgcccaggctggacttactcctgagctcaagcaatcctccccactttagcctcctaagtagctgggactataggcgcgtgcactgcacccagctctcttatcgtttttagtgtttgtgctcttgaaatattttctggcacataagcttattttcccccagggtgatgcttgtggggacatacagatcccagtctgtgggaaagtcttagagtagaggattcattcatcaaataagcacagtcaagtattctccattcctgaaaacaactctttagttctggtctccaccttttacctctcagggagacatagcatgaggaagaaccctctttagatgagctgtgggcattggaaggagaaaaggacaggaaataaacccttcgtattgtttagttccctctgtttatccctccccttctccaaggtattcgtagctattctctacaggtgtgaggacagacattgtctcagggcagcagcaggggagagccagaactaaatgacagcagttccctctcctgccgctctcagacttctcataagatgtcttgcctcaggcaaatccactaccttatacaaagtagttcaaaactaggtttcttacactttttctctgttttccctcagttgttcacctgcatttacctgtctggggcaagatggcccagtagtcatgctaggacagtatcttagtgagagttagaggaaatttgatttttatatcattgcttttcttaagttcacaatgttagttagcactctggaacttatgttagtatttaaggaagttctaagggccacatgacactttttagatgctgttaccaattgtggtcttattcagtgaaacattttatgtgtatgttggtttcattttaagtgaatagcacctttaaaaacttagaaaactagctgtcatttattgaaccctcacaaaaagtgttaaacatttttatatgaattatataatctttacaacaggctatatacgttaattatcatccttgttttacagtgtaggcatctgagtctcaggttaaggcatttgctcaaagacacttagtaattccctcatatggattctgtccagaatctgtgatattaatctggattaatctaatacttgtggctgctgagcactgaattgttgctagtttccattgaaatgtgctgttttaattaacatacataccagactttgaagatttagtataaaaaaagaaatattttgttagtaatttttgtattgattatatattgaaatgataacactttggctatattaatttaaataaaataaaaaatattattaaaattatttcaccttttaaaccttttttattgtggctatcagaagattttaaattacattgatggcccatattattggacagcactgaactaaaacctttcttattgaaacagcagctttgcttttaaagattaaaaagctcatgataaataaatctgctttgcttttatttgtggctcacaggcactttaaagaggaggagacctccacagcccattcagcaaccccagcgtcagcggccccgagagagttatcaaatgggacacatgagacgctaactgcagcttttgccttggttcttcctagtgcctacaatgggaaaacttcactccaaagagaaacctattaagtcatcatctccaaactaaaccctcacaagtaacagttgaagaaaaaatggcaagagatcatatcctcagaccaggtggaattacttaaattttaaagcctgaaaattccaatttgggggtgggaggtggaaaaggaacccaattttcttatgaacagatatttttaacttaatggcacaaagtcttagaatattattatgtgccccgtgttccctgttcttcgttgctgcattttcttcacttgcaggcaaacttggctctcaataaacttttaccacaaattgaaataaatatatttttttcaactgccaatcaaggctaggaggctcgaccacctcaacattggagacatcacttgccaatgtacataccttgttatatgcagacatgtatttcttacgtacactgtacttctgtgtgcaattgtaaacagaaattgcaatatggatgtttctttgtattataaaatttttccgctcttaattaaaaattactgtttaattgacatactcaggataacagagaatggtggtattcagtggtccaggattctgtaatgctttacacaggcagttttgaaatgaaaatcaatttacctttctgttacgatggagttggttttgatactcattttttctttatcacatggctgctacgggcacaagtgactatactgaagaacacagttaagtgttgtgcaaactggacatagcagcacatactacttcagagttcatgatgtagatgtctggtttctgcttacgtcttttaaactttctaattcaattccatttttcaattaataggtgaaattttattcatgctttgatagaaattatgtcaatgaaatgattctttttatttgtagcctacttatttgtgtttttcatatatctgaaatatgctaattatgttttctgtctgatatggaaaagaaaagctgtgtctttatcaaaatatttaaacggttttttcagcatatcatcactgatcattggtaaccactaaagatgagtaatttgcttaagtagtagttaaaattgtagataggccttctgacattttttttcctaaaatttttaacagcattgaaggtgaaacagcacaatgtcccattccaaatttatttttgaaacagatgtaaataattggcattttaaagagaaagcaaaaacatttaatgtattaacaggcttattgctatgcaggaaatagaaggggcattacaaaaattgaagcttgtgacatatttattgcttctgttttccaactacatcacttcaactagaagtaaagctatgattttcctgacttcacataggaggcaaatttagagaaagttgtaaagatttctatgttttgggtttttttttttcctttttttttttaagagtataaggtttacacaatcattctcataatgtgacgcaagccagcaaggccaaaaatgctagagaaaataacgggatctcttccttgtaaacttgtacagtatgtggtgactttttcaaaatacagctttttgtacatgatttagagacaaattttgtacatgaaaccccagatagactataaataattctaaacaaacaagtaggtagatatgtatgtaattgcttttaaatcatttaaatgcctttgtttttgg

SEQ ID NO: 6700 - DNA, 6000 bp, Homo sapiens
gaggtgggtatggctcttatcagtgagtctccctgtacctctagtttatttccttaaacagaaaaacgttctctgataaagggtcattttaatgatgttgtctagtgaccctgccctccctgggaatggaaggcacggcactgatgtgtatgtagatgtactcatcaacagattgaatttgctgatttttttttttttttcttgttggagagttgaaaccagtcggcaagctgggtgaggttgaagtgttggaaagagtggtgcaaactgccattttcatgttctttagagaagtctgccagaaaaggagtagtggttctgtttttaatggatttatgagttttatacggtgatgaggagtgagtagaggtgaaattgtctcatacagcatgtaggctttattttttattttcattcaaaacagtaagtacactgaagtcagagtagttgttttcagtaagaaaattctgcctccagagcaaatgttttggtgaatagataaatatgagtactgagtcccaatcattttggctcataggttccccagtatttccataggcaagcttaactttgcaccattcagagacttatattttaggttccccacagggcaccccactggacgtggctcattttccagcctgtagtcttgttcttctgccaccctggggcattattcctcttcccctctccccaggccttcccccttgcttcttggctggaacctcccatggtgattcacccttctcagcctaggcagacagcacctccctgttaagcccttaactaatcccgctctgatggctgtgatctttctctctgtgtcttaatcacttggaataaagaaccattgtggtgaggttgaaagggcattggcccaggagtctggggatctgggttttggccctgcctcagctacttaattcactgggtgaccctggactagactctcagtgtgtcacagaggcacgaagggaagagagctcaaaggtcctgcagggtggaagtctgcatttcacagttttataagtgtcttttgtatcctttaatatagtgcaggctcagcgtatgcttggtatgggttcgttgattaattccttgcgtattaccagtgtttgtaacctacagtagcactgccaagacttccttttcctgctttcaaggatagcagcacactgacacattctcattagtcaaatatgctatattaaactaatgttttaacaaacagtgaatcgcaaagccaactgttccttccagcgaataatagatcatatgcaaaatgactttgcattgctaggggatttgatggagtgaagaagcaagcactgtattttatttctttttattttgttttgttttttggacataacctcaagattttattgtcctcataataaaacaaaagatgatgcttagaactggatcacttggccctttcttttgttatctcctcccagttgaaaatgtttgcatgtcttaacagccagcattttcttagatctgcagatggggtcagcacactcaagcctcagcacaacctcctttgtaattttacccgttttccagaaaattgccttagtctacccaccatagtcactctgcttcttgtcataacgccgctttccctgggcatacagggagtcctggtattgtgccgttttgtggggttggtgcttgccacacttcttacagaaagcccagtgggttttaggaatgttcaccatgttttccggaatgctatcggcatgggaggaaagtggccatattttatttctagggtgaaaatgtttgccattaaactcacatgaagtaggaaatatttatatggatacaaaaggcacctgcatgggataatgtcaaatttcatagatactgctttgtggtaagtgtgactttgtggttattgtgatgtttgtgttttgttttttttttctgcaaaatggttatacatagtataaatgttatgcaaaatagcaactcattgttttcaagttgatttagcacctgcattatgtaaagataatctgaaatctgtagggggactgggactatgtagggaagatgaggtcaaccatatactttctactgctttgaattgtacctatgcattcaccatttgaatacttggcacgtgtagggcacttaaaacattctgccgaatggatgaatgaagtggtatcaaaaagtgccctggcagtgaaaggcaagatagagttctgtagagtaggggtcgtggtgaccctgttggagcagatactgaagtagtggtgagtgcggagaggcaagtcacattttggccctagtcaactgtagctgaggagtaaacagagggaactgtttactgtttacaggattctgatgctcatctttgaaggctgggctctgctggaggactgattttgaatgatgtcaaatgattttgacaagattaaatggggagatttagttggtggtggcatgcaggactgatttgatgaaagagcagcacagttatgaatggtgaaaccgaaaggaagatttgtggggcttttaacagtctcctcaaggtgttgtggctgtgggagaagaattaacatgaatggagagtgtaaagaagcctatcagattgtctttgatctgcacagtactggggagtcccatgtgggacacgggtaggcagcagtctacaaagctcagagctggaaagacaacttgaaagaacaacacaatgaaaagttaccgtgcctctagttgagattttctaaacatcggaaccaatgtgaggtgtctgatttcataaacaagtggaatttaatctatactctctaagtggaaacaactctgtttgcaactctgacttgctagttccctggttttgcttttgttttacgtttggcattttttatttcttgcctgtttatggtagagactagaattctgcacagcagatgacaacagtttatcccctgctgcagacctggtccagttctgactgagtccaggggtgatagttaaggccagggcttgggtggtttgatgtccatcctaggagtttcacctctgcttcggtaattctcgggctgagggatactgatgagaccctctagaatgtttcttggtccatgttgaagttagagatttcttgctctgtcaagaagactgtcagcctgggcaaggtaacgcgacattatctctactggaaaaaaaaaagccaggtgtagtggcacacgcctgtagtcccagctacttgggaggctgaggcaggaggatctcttgagtcctggagatcaaggctgcagtgagctatgattgcaccactgcactccagcctgggtaacagagagagaaaccctgtctcagacaaaaaaaaaaaaaaaaaaggtctaggtgtggtggctaacccctgtaatctcagtgctttggtaggctaaggcggagggattgcttgagcccaggaattcaagaccagcctgggcaacacagtgggaccttgtctctactgaaacattaaaaaaaaaaggaaaaaaaatggaaaaaggaaaaaggaaattaaatggaaataagatatattcaacatatcatagttgtaattgtaatatatgatcaatatataaattattgggctggacacagtggtttatgcccgtaatctcagtgcttggatcacttgaggctaggagttcgagaccagcctgggcaacatagcaagaccctgcctttaccaagaaagaaattataaatgagaaattttatataattttttcatactatgtcttcaaaattcagaatgtcctttacacttatagcacatctcagtttgaactgaccacatttcagatgctttgtagccacatgaggctggtggctactgtattggacggttctgctacagagcaagactattctaaattgtctttttttttttttgagacggagttttgctcttgttgcccaggctggagtgcagtggtgtgatcttggctcactgctacctctgccttctggtttcaagctattctcctgtctcagcctcccgagtagttgggattacaggcgcccgcccccacgcccagctaatttttgtatttttagtagagatggggtttcaccatgttggccaggctggtctctatctcctgacctcgtgatctgcctgcctcggcctcccacagtgctgggattacaggtgtgagccaccgcacccggccgattgtcttcatttttaggaaagttttaggttcatggcaaagttgaatagaaaatacaaagaatgcccatgttcccctgttcccacatacgcatagcttccactgtcaacatcccgtatcagggtggtacatttgttagaactgatgaacctacattgacacatcgttaccactcaaagtccatcgtttacattagcattcactgttggtgttgtacatagatgcatccaccattacaatatcagatagaatcatttcattgccttaataatcccctcccctgaatccctgatctttttgctgtccccataattttgccttttccagaatggtatgaagttggaactatacactgtattaccttttcagttggcttctttcactcagcaatgtgcaatttaggttcctctgtgtcttttcatggcttgatggctcatttcttttcagtgctgaataatattccatgtctgaatgtaccacagtttatttctagagcaatactttttacaaaccagaattataccccaacggtgggacaaattggggtggggaggctgtctgagagttgtgagtgtgggggaagtggaaggtctttgactgacttttcgctgtgcataaaaagcttctgtgagcatcaagaagagagtagtggtctgggggagagcccaggatgagaatcttgcaaaaatacatccttcaccacaactaaaggcgaatcctctcctcttacatttccccactttcttcccacaccaggcctgggatctgcttagtccaaaatgttcctataagttagcaaatatctatgtcacatactctcgccaaaccagttttatgaaaatatttagactaaacaaagtgaagagaatagaaagctgtatttgcatgtgtgcagtttccttgatcaaagaatattaagcaaaaagagaccaaagcaggagtcactgcaatttaaatgtcgttcctgtctatttcaggacgcagctctactctgttttctttattcttggggtgattatgttgatgacctgtcttgtctctgttgagataaatttaccaccaattgagcactccttattggcagggattgggtgtatcaattccgagaactgtatgattgcaaaggtggaaagccaattcatcaggctattgttttgctgccccattaagtatattaactggaagatgacttcatttcaaccatttcaaatcttaaatacaacagattcagtcctttatggaatgagttaaggtcagaaaatctgtccatcgtctttctcataaatactttaatatcttccaagtatcattggactaagaaagtaattatgggtaataataaagattccaattaagaattagggcaacatgaaaatgctactaatttcgattcacatcgtagctttcaggtccttctcaatatgtttaattacttgtgagaaatacagaagtagtggctggttcggcaagcccatcaccttttatgagaagtagaagactcagttttatcctgtctgaacaggttgcattagccatggggaacattttgtttttgcattcacacatcagtctccccaggttctgtttacacagaggaagagaaagactggctagtttagtagtccatcccaacccaaggcagaccatctctgaggtttagtttttacagtcgtaagatgggaattgcatctgtttgcaaaaactactccaatatcgtcagatgaaatggtccaaggagtagaaattagcataatgaatcgctgtgcttcagagtaaaggagagcctcttcataaagactttttgttgtac

SEQ ID NO: 6701 - DNA, 6000 bp, Homo sapiens
cctctggggcccaaacaatcctcccacctcagcctcccaagtacctgggactacaggcctgcaccaccacacccagctaatgtttttttattattattattatttttagtagaaactagaccctactatgttgcccaggctggtcttgaactcctgggctcaggtaatcccccgactcggccaaacaaagtactgggattacaggcttgagccactgtgccggtaggccagagatttctgacaaggagctagagctagacaaaagtttatgggcaaatcttgaaatgggccaggtcggctaggcactgtggctcatggcctgtaatctcagcactttgggagactgaggcaggtgtatcatttgagtcaggagttcaagaccagcctggccaacatagtgaaaccccatttctactaaaaatacacaaaattagccaggcatggtggtgtgtgcctgtaatcccagctactcgggaggctgagacaggagaatcacttgagccttggaggcagaggttgcagtgagctgagattgcaccactgtactccagcctgggtgacagagcaagactctgtctcagaaaaaaagaaaagaaagaaagggcccagatgctctttccagcatgctgattggtcaaatgggatttgggctctagcttcagagccagagctgaataggaccttagagaattgaaacccagtatttggcttgcaacaaacacttctcagatctttttctgctatcttcagatttggtttctttttccctcccccaacttgggttatttttgttttgcctcttatatcccagcttatatggagtgtcctcctctttctgcaacaattcccttcatcctaattttctgaggtctcttaaaattgtattccaattctcctgtaccttagagaaggcctgtctaatttagtcccagttgcagattagattagaatattcttgactccattatctcagatcatccataatgatattacatagaaagatcctcagccttgaggctgtttgatattcgtgccctcctctgtttctgatttttgcttctcaagtctgtcattttcccatcaaaccataacaaaatcaggatcattacaggcaggctggtatgatgttaataagatcaaggctttcctgaaataaagtgatattgcttttatcacatcagtttgaaaaggatccattgggctgtatgtccagctttgctttttgcggggtggagggaatcagaagacagggttcatgctggaatagcaagtatatctcttatccctcccacttgtctgcaaacattgtggggaaaggctagctcctctgcaccctcagggcttggcctagagttggtatctgatgagggtgagagaatggggagctgtgggtattatatgggaggataggaacacctcctacctgctgtgggtcactcgcccccaataactcagcagctgggattgggggagggcagatgaagctgaatcagatattactcctgaaaggcctataggagcattttacctaagcctttctcagcaggcttctgagtccctgctgtcaggagctgagagtgaccatgtctgactgctcttggctcaaagatgaaaaggtctcatccatttctctgcatctaactataccctaaatcccctatttcagtctcttctggtatgaaagggcacccgcatatccctattctattctcttccctgaaacacccttcttccaaggtctgaccattggccacttgggagaggatggagaaaaggctaagtcacaggtgccactactaagtactgagtgggaagggcttggcctggtgagttcaaatctcagtcttccatcccaggagaggtggctagtggtactcagtcatctcaggatgggacaccctcccaggaaagctggagaaacttgtaggattccagaccaccagccttaccctcagaagagctcacaggccaggctccatgctaagaagcatgcctcttccctgcagtgtcctgtgcatcccccatggaaggcctatccctgcacagacatgcctgccttcctgttataaccataatgacaacaaagcattctgtgaacccaagttgctgtggaaatgggggaaaaaaaggacacatactctcattattatactcattatgttcctatcagaatactcacccatggagcattatttttaaagttactcatggtcttgggtttgggaaaggaagagatcatttaaaagcattttctcaggccaggtgcagtggctcacacctgtagtcccagcacttggggcaggtgcatcacttgaagttaggacttcgagaccagcctggccaacatggtgaaaccctgtctctactaaaaatacaaaaattagccagacatggtggtacacacctgtaatacaagctactcgggaggctgaggcacaagaattgtttgaaccagggaggtggaggttgcactgagccaagatcgcgccactccactccagcctgggtgacagagcgagacttcatctaaaagaaaaataaactaattaattagataaactaaatcaaagcactttttcagttacttaaaaggctgaggtgggaggatcggttgagcccaggagttcgaggctgcagtgaaccagtgcactccagcctgggtgacagagagagaccatgtctcaaaaattaaaataaaataaaacataaagacactttttcagttaaaagtattgagtctctaatttaggcccggaggctcctcttgctttttgaatgtgccatttctcaaaatataatttatctgaggattggccattcaggcacccttgttgaaatctaggcaacccacaaaggcatatgtatagagataaatagtgacaaatgtatttgtagttacagtttgaacagccattttagtcttgcaaaatgaagctagtggcctgtatagcattaaaatggttttggggctccgtgcagtgtctcatgtctctaatcccagcactttggaaggctaaggcaggcagatcacttgaacccaggagttagagaccagcctgggcaacatggcaaaactccatctctaccgaaatacaaaaaattagccaggcatggtggtgggtgcctgtagtcccaggtacttagggagctgaggtgggaggatcgcttgagcctgagaggttgaggctgcagtgagctgaaatcacgccaccgtactccagcctgggtgacaaagtgagaccctgtctcagaaaaaaaaaaaaaaaaatatgtcttggatctgctactaactaactagctgttgttttcttggatcttttttctctctagaaatgggggctttaagcctctccctagaatcctgaaggtggaggggaaaagggaggtcaaagtggggttccaggcatcctacatctaccccatcaatggcagcttagcttttatctttttgttttgttttgttttggagttctctaaactgactaactaggcagataggtctaacagggagtagttcggcagctgcaggtgctgtgatgccaagagggcttaagggcctagagtcttaggtagaagaagtataactctaagatgaacatttaggagagttataaagaaaaacatttttatcacatctgtggttatgaccaaggttagattaagccttgattcaggaaaacaatgagttatacttaaattttggaaagcttttcatgtatcactgtcactactagtgcttggtagtgttaaatacagttagttggtcagagcaaggaacaacttggctcctgctcgtttggtccctcaataagtgttgcccattcttttattttattctcaaataaatggatggatagatggatacttctatgcaagggtttggctatgggcagtctagaaaatgcttataatcgaattatggtgacatggacattagaaaatgctgcagcctcagaaagggctctgtgatatgtgtcaaataaatggtgctaaccaagggctattggtttagccaacagccttctgttgatctgggcaacactaattatttaacagataaagaattgattaatcatttaataaatctgatagaacactggaacataagcatatcattcttcctttaggtggaattagtcaaagagcccatcagaagagattaggaagtccatgtttccagaaaaagaatatgcagaattgaggggtattaaagcaggtccaggccgggtgtggtggctcacacccgtaatcccagcactttgggaggctgaggtgggcggattgcctaaggtcaggagttcgagaccagcctggccaacatggtgaaaccccatctctactaaaaacacaaaaaaattagctgggcatagtggtgcctgcctgtaatcccagctacttcggaggcggaggcaagggaatcgcttgaatccaggaggcagaagttgcagtgagccgagatcaggccactgcactgcagcctggaagacagagcaagactccatctcaaaaaaaaaaaaaaaaaaagcaggtccattctcaaatctcacatcagcaaatctctaagagtatctatcctgcacctatctgcctctgtgccaagtactctgtgaaggatagcacagaaagataagacacttcctgatcttgaagggtgtaatctccccacccacccccccaaccctcgcctttaaaaaaaaacccactttgtttggtggtgatggtgaaaaagcagcctgacgtagcacaaagtatctcttgaatgcatacatagtgtgaccatcggcttgtccatctgcaccgtggtttcctttagttctgattgatttctaagttgagccacctcgtgtcctcacctgtgaaaaaagaagtgcctcagccttaccgggcttctcatggtgccttggcttccaggagcatctcggtcaaaacagtggcctccgtgcttgggacattaaatccaaattctgaggccttgctttgcagacctcccctttctgaccatttccctcttcccgactcctctagtcccttcatcagtccaggctccccacagtgccccatcttccctcttcttttcccagtctttctctcctgccttctctacccgcatctctcccagccattgcctaaacctcggcagtcctttcaggttggtggcacacagctgggcactaaggtatgtaaattccccactctttctccaagtgtttggtgtgtatcggcgaaatgggattaggtctttgaatgcagagccgtgcccgtttttcctgaattaaggacaactgcgcgctcagttagagcgcccctgagaatctgcaggtggagaaggctcggggaggggcccggagggagggacgagggcgagtccgggggccgcgcgtgtccgcccagcttccacggaaggtgaagggcctatttcctcggggagacaggcaccgcttcctcagtttccctccgccgccgcgagtgcgccggggccgggcccagctggggaatccgaggctctgggggagggggtggcgggaaatggtgcctcgctcgccccagcgacatcaaaccctcgtttggcgtgcgaggacaatggctgtcttattttctccattcgccgcgcacaatgccggattctctcattcacccgcggtggtgcgagcgaggtaattagccagcgccattcagcgcggacactattgctatgcgggaggggcgggggggcgggacgcccgcgtcggcggggattagccgcgggccggggcgcagctgcggccacttcaaaggcggcgcgcggcccggtcggctgtgggaaccggcccccgcctcgggcccggccgccgggaaggggcccgccgcgtcctccgggctcgcgccctcgcccgccgcccctgccgcgccctgggccggggagcctggggccgcttggaccggggctccggtggctgttgtcgctccccatcacgctcccactttcatcaggacctccagtgcttttctcctttgaggccc

SEQ ID NO: 6702 - DNA, 6000 bp, Homo sapiens
acatgtagtcaagcatgcatgcacacacaccatgacctcctgttgggtcaagccagccccactctcatccctgcaaacccgcttcatccatcccagcattttcagggctgcccctaccagattccctgcctaccacaaaatcaaaaccctgaaaaaagcctatcacctctttactagaatcccagagctaagaaagacttcagacatctgtagccagcctcctcttcattactgaggaggaaatgaagacccagcatgggacaatggcaggtccaatgtcacccagcaggcagaactgaaccttgtctcctgccccttattctgaccctggggcttgctcccttagctcagggctgggcagggctgaattgggctgcagggctggtggtgtgaagactggggaggttgggggtgggggaccgagagaccccctggagaaggaccagctcctagggccagaggagagaattgctgaagctgggcccaacagtgtctactgggatgatcccgaaagacaggctctcactttatcgatgggagcctcaggcccatagagaggaagtgcctggcactgatcccacagccagttcctggcaagatggaggtgggactcagtttttctgactctccagtgtcctctcactaccacccctcaatttgctcctaatgatcctgaggcacagagcaggctgggaccttctgcagcattcaccctctctgtgctcccagaactgaggaccagaccctttgcctttacaaagcctgtctctaaaagtcacagggctctggctatggcctgggcccccacctctgcagccccttgcagggagggaagaaaaggaagttacagaggcccaagagccacttaaggcctggcctcagggacttcagccccactgctgagggaaaggtctcaccctggccaagcactgggagcccaggcctcagacagggcctaggcagcttctgcagagcatgtatggaggaggggaaggcggggatggcttagtctacttgtgctgctataacaaaatatctcagactgggtcatttacaaaccaacagaaacgtaattctcacagttccagagtctggaagtccaagatgaggacaccagcaggtttgcgtctggtagggtctgctctctgcttccaaggtggtgccctgtggctgagccctccgagtggacgaacactgtgtcctcacatgggggaagggacagaaggatgaaaggggcccggcaggttccctccagcccttttatgaggtcactaatcctgtccatgaaggccccaactcttaatactatcacatcggtgattaagtttcaacatatgaaattcggggacacattcagagcagcgcaggggcttatccatcctcattccagccagagccaggcttggagtccatgggaggaaaacagggcctcaatgatggaggctgtgtctgcagccagaccccaggccagttgagcagcccctccaacacaaacactggccctggctccaccggaaggggcatttttcagagatgacatcagctttgctcttcttttcctttcttttattttccttttctttctttctttttttttttttttagacggagtctcgctctgtcacccaggctggagtgcagtggcacgatctcagctcactgcaagctccacctcccgggttcaggccattctcctccctcagcctcccaagtagctggaactacaggtgcccgccaccacatccagctaatttttttgtatttttttagtagagacggggtttcaccttgttagccaggatggtctcgatctcctgaccttgtgatccacccaactcggcctcccaaagtgctgggattacaggcatgagccaccgcacctggctcttttcttttctttgagatggagtctcactctttcacccaggctggagtgcattggcacgatcttggctcactgcaacctctgcctcccgggttctagcctcccaagtagctgggattacaggcatgcgccaccatgcctggctaatttttatatatatatatatatatatatatatatatatatatatatatatatatatatgtgtgtgtgtgtgtgtgtgtgtgtgtgtgtgtgtgtgtgtgtgtgtgtgtgtgcgtgtatatatatatatatttttttgagacggagtttcgctctttttgcccaggctggaatgcactagcgtgatctcggctcaccacaacctccacttcccggtttcaagtgattctcctgcctcagcctcccgagtagctgggattacaagcatgcaccaccacacccggctaattttgtatttttagtagagatggggtttctccatgttgatcgggctggtctcgaactcccgacttcaagtgatctgcccaccttggcctccaaaagtgctgggattacaggtgtcagccaccgcgcctggccattaatttttatatttttagtagagatgggatttcaccatgttggccaggctggtctcaaactcctgacagtgatctgctcaccttggcctcccaaagtgctgggattacagacatgagccactgcgccaggcggacatcagctcttaaagtcgtatgtttcctgcctacctcagcccagggaacagagtccccagagcccactcgcctgttcagcggcctgcttacccctgaggacacagccttgcctgggcactgcagggcaggtgcaagcagagagaagataccaacctcccaggtccagaaatacatctcagggcctttactcatgctatccttccacctgttccaatgccttccccactctgtgcctccacgaacgcctggcaaatgtctctgcatccttcgtgtcccttcgaagacagccccacacccctagtctctcagcgttccatccctccatccattacagcccggccactctgcaccacatccagaacctccccccttcccctccctgctcgcctcctgtcctcatgagacccccagttccagaggcccacaggccaagtcctattttactctggccagggcctcttggggactcaggaaatgtttcttgaggaaaggctagagggcagacaggtaggaaatctggtgggggaaatatccttattgacacacccccatccaatcactacatttttgtaagggacccagccctggcttctactttgagaatcactcctgtccccatgaatgcacctggggaacgtcagaatttgggaataaagatcttagtgccttcaccacaggcatcaccagggaaaccccaagggacctggccccgttcaccagctgggccccccagtaaagcagcctccccccagcctaccccccaggtgggtgggtctagacccccaccccacccaccccctggcctccctcagcaaacctccgcacaattgctaggtagcgaggcctgaaggagctctctagtttcctcaacctctaacggttccagtaatagcaccaccctcagagcagggccaccacgaggccagggtcagtccagacggggccggcttttgtccacacagccgtacaagcctgcccttgctggagcctggaacctcccgccccactgcagccgaagctgcatctattgccttgtctcaggggttgatgaatgaatacatgaaagcccctggaccttaggaagcacccagtcaacgttagccacggttaggttcattattgtactatttcgattttactcacattattaagcgtccactaggtggcagcactagaggactggatgctgatgaaccaggctggccgcctcccgcctcccaggaacctacaaaggggcaggggacagatacataaacagctgatgtggaagtgcagggtgggaggggtaaacgcaggctgtaggaaaacccaggaacagcctagacaacatagcaagaccccatctctacaaaaaattaggcatgcgtggtggtgggtgcctatagccccagctacttggggtgctgaggtggatcacttgagcccaggaggtccaggctgcagtgagccgtgaccatgtcactgtttaaaagaaaaagaaagaaggaaggaaggaaggaaggagaaagagagagagagagaaagaaaaagaaagaaaagaaagaagaagaaagaaagaaaagaaagaagaagaaagaaagaaagaaagaaagaaagaaagaaagaaagaaagaaagaaagaaagaaagaaagaaagaaaacaaaaaaagaaagaaaagaaaacaaaatccagagaacctagtctggcctgagggtgcatgaatccagaaaggcttcctggaggaggtgctacccattgaagacccaaaggaagagtacaaagaaattaaccaacaacaaagccataaggcccagttgagagagctgtggtgagggctcagctgaaggcagggaggctggaaattgagctatgtgaaggaggcctttctgatggggagggcactgcagggaagggagccacagcagatgagggcaagaggtgctgagactacagggtgggctgttctagcaggtggtgctggttgaatgaatgagtgaggaaagaaatgaatgagggatacaaagagagaaggccaaggtggaaaaaccaactctatcttttatggtgggttttttggttgttttttttttggcagctgggacaagtagacagagacacatggcaacatacactggtcctgcgccacccccagcttgggactcgaaggactggggtgtgctgaaggtggcatgtcaagcccagaagggtccaggaggaccaggtctcccccctccttggctgcccttctgtcccaggatggggagttgattgatagctcccctgcccccccgccccccacccagcgccaagctcccccagctgctgactcaggccctgccggccagctcagcattcctgcccggcccccactgaatggagctattgaaagtttctgtagccacagaccacacccccaaccagagccttcggctgtgctgtggctcctctctcaggggacagcgtaggccctgggggtcagttggagagggctctgactaccagcgactgctctgggggtgtctgcgatcaaggacgatcctgggtaagctggctgggctggcaccaaagaggggattccagagcgaggggtctccctcgtgtgcaggacagaggcactgggatgggcaaccccggcttgggggaggggtctgcgtgtcgttgggagagccaaagggccctgtgggttttcccacctgccccctcagactggagcttccctgaggtagacgtggtttcccccttagatagaggccactcaggggtatgggctgggtctcccccatcagacaggagccaaggtagggagaagggatagtttggagtcttgcccatcagtctcagagctccccaggcacggaaacagcatcagacatccagcctcagcctctgctgctgggtgcagatcaagcgccttcctttcccttcctctccccacttggcctttgccctaagccaagacctggccatcagcctggctgcaggggcctgcagagccagctgcactttttcaggtatgggggagggccaggcaccatgaagccagtgtgggtcgccacccttctgtggatgctactgctggtgcccaggctgggggccgcccggaaggggtccccagaagaggcctccttctactatggaaccttccctcttggtacggccacgcctctgttcgtctgtctgcctgtctgtcgtccacctgcccactttggctgacttgacaaggagtttggtgttcttgcttcctgattggcaggatgagaaacctacctttgtgtggttgttctaaaagctcctaacagatattttttttttgaagttactaaaaattacacagataatgtatgctaatcagagctaaaattgtgcaaaaaatgtttttaatatatcttcccctaccgtgcctcatgtgctcacactcctaggaagacaagtcc

SEQ ID NO: 6703 - DNA, 6000 bp, Homo sapiens
ccatgtatcctgcatcggtacttcattacttttgatagctaaataatattccattgtatggctataccacactttgttgatccattcatctattgatgaacatttgggttgtttctacctcttagctattgcaaataaagttgctatgaacatttgtgtatacttcttgcttgagctcgttattatttgtgttatataccacagagcagcgttggtaggtcacatgggaattttatgtttaacttgtggaaagcggctgggcatggtggctcacgcctataattccagcactttgggaggccaaggcgggtggatcgcttgaggtcgggagttcaagaccagtctggccaacatggtgaaacccccctctctactaaaaatacaaaaattagccagacgtggtagcacacatctgtaatcccagttacttgggaggctgaggcaggagaatcacttgaatctgggaggtggaggttgcaatgagccgagatcgtgccactgcactccagcctgggcaacagagcaagactccgtctcaaaaaaaaaaaaaaaaaaaccttgtggaaagccaccaaactgtttgctatagatgtatgccttttaaattgtatatagaagccccccttatccttgggggatatgtttcaaaatccccggtggatgcttgaagcctcggatagtactgaaccctatgtatagtatgtttgttcatctcaaaacaaagatggctaccaaacctcaaacagcctggtagcatatacggcatggatactctggacaaagggatgattcacaccccagacagagagcagggcagtaagatatttcctcatcctactcagaatggcacaaaatttaaacttatgaatttttatttctggaactttccatttaatattttcagatggcagttgactgcaggtaaccaaaaccacagaaagtgaaatcacagagaatgggggactactgtactgtgtgcatgtcctacctattcaagaataaattttagaatatctctctttgaattttagaacaatctttctttgaagattaaggccaggtgtggtggctcccgcctgtaatcccaacactttaggaggccgaggcaggagggttgcttgagccctgaagttggagagtggcctgggcaacatggcaaaaccccatctctataaaaaatacaaaaaattagctaggtatggtggcatgtgcctgtagtcccagctacttgggaagctgaggtgggaggatcgcttgaacccaggaggtcgaggttgcagtgagccatgatcacaccactgtactccagcctgggcgacagagtgagatcctgcctcaaaaaaaaaaaaaaaaaaaaaaaaaaaaaaaagattaaaaagtaaattaaatggggatatacaagtttatgacctttacaatctagtttacaatctagtatggggtctaacattactatgctattgtatgctatgtctctgtatctgactccatgggatataatatatacaattaatttaatcatatttcactaaagaagttaactgatgattatgtagttgacatgtaataaagttatagaatgaaaatttcttgaaaaacagtacaggggccgggtgcagtggctcacgcctgtaatcccagcactttgggaggccgaggcaggcagatcacaaggtcaggagctcgagaccatcctgccaaacacggtgaaaccccatctctactaaaaatacaaaaaaattagctgggcgtggtggcgggtgcctgtggtcccagttactcgggaggctgagccaggagaagggcgtgaacccagaaggcagagcttgcagtaagccgagatcgtgccactgcactccagcctgggtgacagagcaagactctgtctcaaaaaaaaaaaaaaaaaagtacaaatgctcctcaacttaggatgggactatgttccaataaacccattgtaagttgaaaatgtgcaagttgaaaatgcatttaatacacctaacctactgaacatcacagcttagcctagcctaccttaaccatgctcagaatactgatattagcctacagttgagcacaatcatctggcaacacagtccactgtagagtatcaggtgtctaccctcatgatcaagtggctgcctgggagctgcggctcgctaatgctgcccagcatgggcacatatgccagtatcatagcctgggaaaagagcagaatttaaaagctgaagtacagtttctactgaatgtgtattgcttttgtaccattataaagtggaaaaatcccaagtcaagccatcataagtcaggcaccatctgtatttatcagccacgcttatgccacatgaaacaagccttattttaggaaaaaaaaaacgcattaggagataacacagcatagtggttgcatgctctggcttgacctggattcaaatctggattctaccacttcctgcttgtgtgacttcatgcttatattttaactaccttgactctatttcctcaatgattatataatgtcatggggagcaagtattttataatccatgcaaaacactgtactcaatagatgtttaaaagtttttttttgtgggggccgagcatggtggctcttgcctgtaatcccaacactttgggagaccgaggcaggtggatagcttgaactcaggagtttgagatcagcctaggcaaaatggcaaaaccctgcctctaaaaaagatacaacaacaacaaaaaaaactagctggggatggtggtaagcacctgtagtcccagctacccaagaggctgaggtgagagggtgacctgagccctggagggcaaggctgcactgagccattaccctccaattgggcaacagactgagacactgtcttaaaaaaaaaaaagttttttaagcagtagtcacctcatgtatagtgaccaggctatcataattctggagaatctaatgatttgacaaagttgcccctctccttcctattatctcagtaactgagattcttggagacagtagtcagatttgcagaaactaacatatctcccgggaggagaaagattgagatatactttctttccttttaaagtttgtggtagattgaaaaaattgccacaaattttctccatctatgtacatgagcccctttacaatgtaactttgtagcttctttcatcaagagatgaaatctatttctccaccctttgaggctgagcttggccctgtgacttgtgccggggtagtatgactttaaagcagaggtatgaagagctcttgcacactggggcttcccctgttgttgctctttggagacagcaaagtgaggcacactcagggctgcctagtggagcctgagagaccgcacagagcagagagttgggctttactagagttggccagatgggtattgtgaatggagacggggcaagggagttcagggtgtatccacaggaatgaccaaaatagttgacaatgaaatttaagccgggaaagaagggaagccaggatatatatgatatatatatatatcatatatatctatatctcatatatatcatatatatctcatatatcatatatgagatagatctcatatatatcatatatatcatatatgagatagatctcatatatatgatatacatatatgtatataatatatgtgagatatatgtatatacatatcatatatatctcatatatatcatatatcatatatagatcccatatatatcatatatagatctcatatatatcatatatatcatcatcatatatctatatatcatatatatcatatatatcatatgtatcatatatatctcatatatcatatatacatctcatatatatatcatatatatacatctcatatatatcatatatatacatctcatatatatatcatatatacacatctcatatatatcatatatacatctcatatatatataatatatatacatctcatatatatcatatatacatctcatatatatcatatatatacatctcatatatatcatatatatacatctcatatatatcatatatacgtctcatatatatcatatatacacatctcatatatatatcatatatacacatctcatatatatcatatatacatctcatatatatatcatatatacacatctcatatatatcatatatacatctcatatatatcatatatagatctcatatatatatcatatatctcatatatctatcatatatatatctcatatatctatcatatatatatctcatatatcatatatatctcatatatctatcatatatctcatatatctatcatatatatctcatatctatcatatatatctcatatatatatcatatctcatatatatctcatatatatctcatatatatctcctcatatatatatctcatatatatcatatatatatctcatatatatcatatatatatatgagatgaaggccagagaaaaggtggtaagatctattaattgtaggtcctattggaatcaaaagattgctggacttgtggtgctggacaacccaaaagtagtggtcagagcctggaatgcttgaaatttagattatggaagcaggactggctacataatttgtggacccggtgcaaaatgaggatgccttattcaaaaggcaagtaaaagcttttaccttgcttctagccttctctctctggactttttgtgctttttatatgctacttatgaaaatttctaaataaagaaaaaatacaattttaaattattagcacgaattttaccatttatgttcatattgtgcaatgtggaatcaccgagttacacaattcgtatgttacggcttgtccccagagggtgctctgactagccagaagagacaaacagcgcaacaaagactcaggaagcttgcaagcaggaaaacaagatcctccctccctcacgccgcccctcccccaagctcggagccagaggcgggcgcgctccctcgggcacgcgggtactctggggctggcgcaagccctcagcgacgccgggcgcgtgcgttccgctgcctccagcccctgggcaccgctgccgtgcgctcgctggcggggagaggcctgcagaagtcaggccaggtgtctctctttcccttgggcccgcggcccaaccgcatggcaccaggcagcccccagcggtattgcgacctctgcgtcagtcgcgctcagtccctagatacaggtgtgccggagaagcccagggaagggatgcgtgaccatcactacaccctgccccacgacgcggtgggacgcgcaccctgaccctccccagagccgcgcccaggaccttgcctgggcggaaaatggcagccgttgccgggaaggagcggcgagcgagaggcaggccccggccagagacactgggagccatccctaggagggagggaggcgaggcgggcttgagccgagccttcaagccactggcgcaggcgccattgtcctgtgagacttcgctgagaaaactcaaattcaaaggtaaaaagtaagtttcaaggcaatgagagcagcgcattaaaccaagggcgaagcccttctgaacgtggggccctgtgcgactgcactgcccacacccctgaagccagccacgtgtgtggggatcccaaagagagtattgtaataacaaatactgtgatacaggagtgctataacacaagtattgtattggtaataacggctagagcagtgctgcccaacagaaatacagtgcgagccacatatgtaattttacattttctagtaaccacatttaaaaaagggaaaaatggccgggcatggtggctcacacctgtaatcctagcactttgggaggcagaggcaggcggatcacttgaggtcaggagttctcaaccagcctggccaacatagtgaaaccccgcctctactaaaaatacaaaaaaattagctgggcatggtggcgcgtggctgtaatcttagctatttgggaggctgaggcaagagaa

SEQ ID NO: 6704 - DNA, 6000 bp, Homo sapiens; identical to SEQ ID NO: 2811

SEQ ID NO: 6705 - DNA, 6000 bp, Homo sapiens
tcaattagagattttattaagctaaagaacatgaacacccccggtgccctccagaggcctccaatcagttacatccaatgaaggattgatccgtgaccaattagaggcttaagtggcgacttggcctgtggttatcacagaagtgaagatgtggcctgtatgttgcctaatcctgcctagaattggctgtacctgctgtgccttttgcttatgtgaactggctgcacctgctcttcttttgttcctaccttaatccttggttgccctaattccctattctcctgcctcaatgtggttaagttcccaccaatcagatatggttggactcgtgtgggactttgaggaaggggcttaaatgaagctggctcttcagggagggccccttttggtcttcttgagttcttccgccttctggccagcaacacggttaatgctccagcagcagcttggaccatcgggtggccttagaaatgccaaccaaatgtcttcgtggtgaagcaggaagatggagcctggcattttgctgggactgacacactcaccctggactgcccagccttggacatcctttatgggagagagaatacacttctatcttctttaagtctgtgatttggattttctgtttatccatccaagctgcctgcaatgaataaaatcatgttccccgtcctaggcaacgtttagatgggtctaaatgtgtacaccctctactctgagaatgataggatagttacagaatgtgggaggcaggagtgggaggagaaagcactataagtatgggcctgtcttgagagagccaagaaggactttggcatagccgagcactaggctaacctcacctagcagaggattcacttgcccatcgtaaggggcttggtgagggttggaccctaacttcccatcacttttgagagggtgaaaatttcagtttgggcactggcaagaacagagagagggagggaaaaattatgtaatatacacatgtatatgtgtaatatatatattttgaaatgtatgtatcattcattaatcttctcaatagtcctgaaacagccactgaaaagttttgaagcagggccagtttaatccactgagcttggaagctgatcctacaccctggtcaagcttcagggatggcagccgcttgtgagaaaccctgagcatgagccactcagccacccagccacccagtcacccagccacccagccacccagtcacccagaaaagctgctcctgggtgctgcaccctcggaagctgtgagataataaacatttattgttttaagccactaaattttgggataatttgttaagcagcagtaaacagctaatacattcagccttgtttggagtgagtgatgtgtttctggaagctctttcagagaagtgagggagctattctcccagaagccacagcaaacctttccctgtgtttcattggcccaaactgaatcgctggcctatgctgtgatgtgaccatggccattggagaggatgaggcaataacctccagcccgggccacttctggggaggcggtcagtgccccacaacactgggggaggtgcggaggcctgaacggaagttggggtggctgccaagaggaccacaagttcttccatgccacatcgattagggctccttctgagggaggaatgtggggctgcgtagaacaatgggattgactttaagtcagaaagttataaatgtcacctcagtgctgagacccttggaggaaaaactagtccttggaagactgcttttctttgtggaagctcatcaccctgccgctgctcgtgagacactgccttccttggctgatgtcattccaggctcaaggtcatcagtgaggcaaaacaggctttctccatactctctttatcagaaggttcatgactgatgaggtagtggtcactccagcgggaagagcaacaaccactcttgataagtactttttttttttcttctaaaaactgttgctctaaatttgttgaaagtggttcaacagtattggagtctggggtcaagtggctgtgtaaggacaacttttgccattgtgggtgatctatgggctgacacatacaacagaagaggccaggaggatgtcactcgtgtgtgtgtgtgtgtgtgtgtgtttggtaacagctctattgagatataattcacacaccatacaattcacccatttaaagtatgcaattcaatggcttttagtgtatcagagagttgttcaataattaccacaatatactttagaatattttcattttcatcatcctaagaatccctacacactttatgtcccatcctctaattcctctatccccctagctctaagcaaccaccagtctattttctgtctcttagatgtgtgttttaaatgccttatttgccagaaaataagattttggggaaaaaaagcaagaagttgtaccttccaatgataagtataaggtatagtgtagattgctgtcatgaaatgctctacatggcacatgtatgttttctgacctacacatttttaccaagtgggctgtaattttgttgaaatgacttgaaaactctacaggtgactgacccttgttgtttgggaaagtggtaggtgcagggtgatggggggtgggtgtgggggctgacctgggctggaaggatgggtctggggatatgatatgatgggagggggtatggaagcagctctgaggggaaagcagcacagatcaagtgtgtggacagggaagagctgacatcctgagttccatggcaaccagatttgccaaggtcttagagtgtgtccagagtggagcctgaccacagacctcagctcaagggacccagagcccctctgagtcagctgtactgaattacagccccaaatctgggtcaactggggagagacgacgaggattagggttccaaggtgaaactgtgccattgcgctccagcctgggcaacaagaatgaaactctcttaaaataaaataaaataaaataaaataaaataaaataaaatagcctaaggatgcatttctcagaacttatccctgttgttcaatgatgtgtgtctatacagtggggccataactaagacgtatgttgcccaagctggcaagatagctctgaccttctcttgggcccctcatttcccccaaacacaggttgtctgcagtcttgaccaatggctgccagggcatggactccgctgcaggggccagtgggaggccccagctcaggcaaaagcacaggcagatatttcaggagtctgctagggctggcactgagggcagagacagaggggtctccctgtcctttggagaacctcacgctgcagaaattccagactgaaccttcataccgagtaggggaggagctgtctgcgggtttgagcctgcagcaggaggaaggacgtgaacattttatcagcttctggtatggccttgagctggtagttataatcttggccctggtggcccagggctacagtcatcctagcagtccccgctgaagtggagcaggtacagtcacagctgtggggacagcatgctggccaagggtcttcccccacgctcagtcctggtcaaaggctgccagacctttctgagtgcccccagggaggggctggggcgtctcagggtgcccactggcgagggagctggcatctccacccgcagtcctcgccccttcaatgagatcccctctcctggtgacaatggctggctaaacctgtaccatttctggagggagacgggcacacacaaagtccaccttcaccatgtccagaatttccagaagtatggcccgatttacaggtaagcctggcagagggtgggagccgaagggacagggaggaggaggggcctgggtagccctgctgtagtccccactcccccaacaggctgttctctggttccaaactcctgtctaacttcttttttttttttttttttggtaatacaatacagaaatatatcagggatatttcaaaattcaacatttgaatctgtgaatgtcttaagtactctaaaccagacatctacttttgaaacaattggtggcaagaccgccagccatctgtaaggaagctctttaatgggtccaaaccccaggtctggccaggcatggtggctcacacccataatcccagcactttgggaggccgaggtgggcggatcacttgagatcaagagttcgagaccatcctggccaacatgatgaaaccccgtctctactaaaaatacaaaaattagctgggtgtggtggcaggcgcctgtaatcccagctactcgggaggctgaagcaggagaatggcttgaaccggagaggcagaggttgcagtgagccgagatcgcaccattgcaatccagcctgggcgacagagtgagattctgtctcaaacaaaacaaaacaacctcctcggtctgaggaggggagactggtgaggctaagttttgaattcctggccctgtagctgtcagcccagccagcgagttttaaaaattgggagaaggccgggtgcggtggctcacgcttgtaatcccagcactttgggaggctgaggcaggcggatcacttgaggacaggagttcgagatcaacccggccaacatggtgaaaccctgtctctactacaaaaataaataaataaataaataaataaataaataaaataaaaaaaattagccgggcatggtggcgggggtctataatcccagctactcgggaggctgaggcaggacactcgcccgaacccaggaggtggaggttgcagtgagccgagatcatgtcactgcactcccgccctgggcaacaaaagcgaaactctgtctcaaaaaaaaaaaaaaaaaaaaaatcgggggagggagatttgaaggtcagagcacagagtgaaaaggtcgcagcgtggtcaagtttggcgctagcgacagacccagcattcctcccagcgcacgccgccgcccgggccgcgctattccgaaattgggtccgccctagcgtggcccccggcctgctcctgcgctcttcgcgggtcgctcacctccgcctcccctcgacacagcccgagcccatccgccccccgggtcgacccgcgtttacctcagggcgaggtccaggcgctcggccccgcggaggcggcggcggccccaccgcaggtcctaggtcccagtcactctgccgccaagttccccaacacggactccgtgcgctttgaggtgttacgggggcgctggagcactggcttcgctggccctgccaggaggcggcggcgaagcagggagcgacccggtatgcgtttctctgcccggcctgcggccctgcagcatccactcctcgcctctgctggcctctgccctcgctcgctgcgttcacccgagctcacccgagcccaccggagccgacagtggcgcgctaaggtgacgtccgcgcggccggacctctcctgtccaacttctgatcttcttccaggcctgggatggtggtgggtaaaagggaaagtattcctagttcccaggcctgaggcctcaaccttccccagatcccactccctttgaaactctcggagagaggtggttagagaacaagccctactaaatgcctccctacatccgttaccctccgcacaccttgcaagcgaagtttgttgtccccatggtcagaggaggagactgaggctcagagaggtcacccagctagattcctgtcctgctggggtgctggatctcaccccttggccctgaggctctgagtctgtcccttccctttcccaagaatcgggcttgcttcctgctaggaggaaaggccttttttttttttttttgtctttgggcctctgtgcctccagggcttgtggctttttcctgggaaaactgctaaagctgttcccacggtgggcagcctttcagccacacctgggttctttgctaagagtccggttgagagggaacggaggtggcgcaggggtggttgggggctgggaggggagaccaggagggacagtacgttttc

SEQ ID NO: 6706 - DNA, 6000 bp, Homo sapiens
ataaagaataatggttttttaaaaattattctttctgtaatttcagacctcagccttttgcctaaatttcctttcacttctttgtaaaaaggatgaatatttttagtacactgtcctggcacaaatcctccttacaggctcagattttctcagtggtgactaaagcagttcagctgcttccaagttctacatttcatctccttttctgttgcacctccctcctccccagccccctcctttgcagctgctttattggcaaagctcagatcctttgatagatctcaatcccatcatggcccttcaaaagaagaatttaagctcaccttttatatagcttttctgatagccacaatttctgcattaaaaatctgagggatgacaaagtccctatgcatactagttaggaatttcttagaacctctcttccatttactatactgtttcccatgttcttttgggtgtttttcatattgatggttggatatcattacaacaattacttttggctgtttttaggtcttcagctgctactgggatacctcttctatattttcaaagtaaccagtgtcatttcataattgtttattatacagcttaagatataagcaccatatacagatttcagtaaaagcaaaatttgaagctgttttcaatttaggaaacacatcgtctatttataagcaatttgatgtgtatagtttcatatcagcaatccgtgcagttttctctttggtgtgtgcaactagtaagttcctttaactatatgttgccaaatagagctttgttatgttctcatcttgttgtgtgacttggatgttgactgcagcctgggaaaaaaaactgttgtagagtctatcagaaaagaagaggcagctttacaaatggcatctccccacagccctccattgcatttgttgtgcatctggttgtctctgttgctggtttttctgctttcttgtagtctcagtttcagatgagtgcctcttttaggggggagaggcagtggcagcagaggaaacatttcccttggcccacctccaagcagcactaagtgtgagtctcataggaacctctttagattgaaaactcatcaatttatatctaaaatgcaagtagttcttcagtgaactgtgcttcaggttgattgttaagtacatatggcctccagttttctcttattttcattcgaatttacataggctaaagctagtgaagtttcagtaggtgtaccgaaagctcagaaatggaattcattttaactcaagccttttaagaaataaatactgccttttagagtaaaaaaaacctacaacattaaaggatagagaaacgtctaataaaaacaaatgacaaaatttgattaatttgcacttcagattgcttctaatttagcgtgaggactgatactatttactttagcaaaatgtgtgtgtgtacatgtgtgtgaatatatatcacacaagtagtcaataaaaaggggtatttgggaagagtgttaagtagttgacatacttctgtaataaatgcacccaaattaaaattaagctatgtctggccaggcgcaatggctcacgcctgtaatcccagcactttgggaggccgaggcgggcggatcacgaggtcaggacatcgagaccatcctggctaacacggtgaaaccccgtctccactaaaaatacaaaaaattagccaggtgtagtggcgggcgcctgtaatcccagctactcgggaggctgaggcaggagaatggcgtgaacctgggagacggagcctgcagtgagctgagattgcgccactgcactccagcctgggcgactgagtgagactccgtctcaaaaaataaataaaataaaataaaattaagataaattaaactatttctcttctccactcccccccacttttgtgctcaccttcattctctagtaccatgccccaaaagcaaatatgtcagtgaactctgagaacctttgaacaggcagtttgctgtaagtacagtgtttatatttatgacatatttacgatatattaacatattccagatgtaatggccatcagaattcagcaagctggattcagttgccaaataattgaatagtgaactaaaagctataagcattgaactgaagagaaaccagatacaaaccaaatacaaatacaaaccaacgcaaatacaaaccaaagcttatgatagagttgggagggtgatttcaagggaaaggggtgagatgaggtgtactcaataaactttaactgatacctgctgtctgccaagtactgttctagatgatacaagggtgaaggacagatgggtacaattcgtgctctcaaggtgtgttgagacaggtatagctataattgcaaccgtttcgataaatattctgttagaaccatgcactgggagatgtttgtgtccaccaagggcagctaatccagcctgaaatggtcaagaatggcttccaaaaggaagaggtaacatttaagcttcatcttaatgagcgacaaggagttcccaggcatttgaagagagcattctagagagaacagcggaggcaaagaagtgagagaatatgtggtccatttgggtataacagttctatattgttcatagttcacaaggggtaatgagatctggggctgaaaaggaggaatagcttggttcatcggggactcacttgcctcatcctgattttaagtaaggctatggcttgatctggtttgtatttttaataaatataaccctggtagtataaagaatgtattaagatgcagggagagtcaataagtaagatttagggggataagataaggcccaaattaagacagaagcactgcagtggggttgaagaggagttgaggtattcgaataatgttttggaagtaaagttgaagttttgtgatttatgggttatagaggtggggcaaggaaagttaatcctcagatgtttgaccagaaaaattagatgtctggtaccttttgctatgataggaatgtaagggaagattagatgggctgggcaggaaggcagaaagggtttgagacaggttgaggatgacatgtctctggaacttgcagatggaaatgtgtagttctgagatgatagctcaggtagtgagctacaatgactaatgaagccatagctgctgtagcccacggagagcccagagaatgactaaagaataaggccgaagacagaatcctggagatcactaacatctcagagtccgtgaagagaatgaaaaagtgagcacctggggaagtaggaagaaaaccagcagtggggcctcttggaagccagaggaagagagttttaaaacaatgtttttaaaaattgccttcattattctagttgtcttctcactttaaaaagttcatgttacattttaaaaaatcaaattactttcccaaatttacataaatggagtctttttcttcctcatctgacagtgatcctaatggcctagtgtaaaaaaatatactgatgatccccaagcttactgaatttcataaacttaaatgatctgggttttcaggttcagagaagttaatgatatttccagtatcactgtggcagctgtttctagtttgaagatgatttatatgttaaattttaaaggatgatgaaatacttcttgtgaaagtttcaaagtactctacaaatgataactcattgttatccaagtgataaccaaatgttttaacacttactctgacactgcatttgcttgtttgtatatgagccagtggcattgggctgtcagcacagagctggtacccaaagatagcaaaattgacaatagcggagaaagtaagactctgcagctggagaatgatgcctggagcagcagctgaaataagacacacctatcacttgtctttgtgtgttcactttccctttaggtctttaataccttgttactcagagtgcgctccaagaagaagctgcaccagcatcacctgggaacttgttagaaatgcagactctcaggctcctcctcagacctcctgaatcaatctgcttgttattcagatcctcaggcaattcctattcacttcaaagtttgagaaccaccattctaaagaattgatagaggacttgcagtgttctttaatgactgagccctctagctttgccatttcactgtctctaggacagcaagatttttggaagtggggtgggtatcatgcttactagttggtgtattttcttttccttgaggtggggtagatagagattagaagtgtagattctggagtcagattgcctgagttcaaatccaagctctgtcatttctaccaaatttccccacttattgagggcaactgtagtgagcaaagatccccctaccaccatactgatccgtattggatgtggaattgagctacagtaagcctttagggatgtgtaggtgtgtgtcatcatcattgttattatttggttatggtttcttggtcctagctgaaccatcaattcgtgaaaagtaggtgaagtgtggataactttttaattttatctagtatagaaatgctcttaacaaggaatcatagaattttcagctttactgaaaaaagtctataacagttacggtaactctcattaaattataccatactaagcaataataggaaatttttaccagcagtgcttagagaccagtactgactttgttttctacagggggcagctggcattttatgctatgtgggagcctatgtcttcatcacttatgatgactatgaccacttctttgaagatgtgtacacgctcatccctgctgtagtgatcatagctgtaggagccctgcttttcatcattgggctaattggctgctgtgccacaatccgggaaagtcgctgtggacttgccacggtaagatgtgttgtgagaacatgcaggagtatttagtctatgctactctccttgaacatgagactccttggctcttatagttggaacagagttaacatttaaacttctagcaattatctctgataactttttttaaatcaagagtgtatttaaagttattttttcatttgtatataattttaaaccatgttttcttacagtttgtcatcatcctgctcttggtttttgtcacagaagttgttgtagtggttttgggatatgtttacagagcaaaggtatgttgtctactgtaattcacataatgccttaaaaggtggtttaagtgtttcaagtaaaatagaacacattcattttatcagagtaaacattttcttttgccttacttgtttaatctgtatttcaaatatctaaagttaattggcaaatatttacatgtcaagactccttacctcatttaatatagcagagtgttatatatgtattgttcttgattataggtatttatagctgcaaatgaataattagctgagaagtttgttcagatttcctcagcacacagattgcctatatgaggggaggcataattttctgatttctgctttagaagaaccaaactcagaattgcgttttccattgtctctttaaaaaatgctttggtcctaaacatagaaaaaggtgttgtgagttgtgatcccaccttccacccctgtcctgaggaacaaggggtcctgccaacttagaacaccaaggcagctggtgccagcactcctttcttgcccttcattctttttaatcatttcaccgttccttcctttctattttgcctgattttgctgtctacctgtagtactacttaaggctaaacaggctgctttaaattaattaatatgggtataattttagaggcatggtaaagacataatagactcattctcattataacttaatggttttgagtcaagggcataatatgccaagttaattttcagatcattgatacgtaaggtactgtaaagctgtgctaaaaaaaaaatgcaatggattatgtccctacctatgatctggttatcaattttatggacttatgatattactgttgtaattaccagataagtccagtcctccgagg

SEQ ID NO: 6707 - DNA, 6000 bp, Homo sapiens
atcccatcctatacagagctgctacatcttttaaaaccttggtctctgatgtccatagccactgggttggtaggcagaaagttcccatctctgcatccacctgacctgacctcaggcagcccccagcaaactgagatagatccttgtgggagatggcaccagggaagagccacatctccagtgtggcctatgcaccagcttgctgtgatatgcctgggccacttccttttctggcagggtcatagaggaccttctgcttctacccaccacttcctacattgagaaggtgaaggagaaactggtaagattataattatttttaatagagttttaaaaacatgaagtcaggccgggtgcggtggctcatgcttgtaattccagcactttgggaggccgaggggggcagatcacctgatgttgggagttcgagaccagcctgactaacatgccgaaaccctgtctctactaaaaataaaaaataaataaataaataaataaatagccaggcgtggttgcgcatgcctgtaattccagctacttgggaggctgaggcaggagaatcacttgagcccaggaggcagaagttgcggtgagccgagattacaccattgcactccactccagcctgggcaacaataacaacaacaaaaaaacccacatgacgtctactttgcttctgctggtagagacccttgatttgtacagaagtggttaaccagggctcaaccataatgacagaccttcctagcctagaatttgtgtatcagtttgaacccacttcttgttttgaataattattaaattctttgtccacttaccatttgtcatccattgtgacaacagctttatttatttatttatttattttatttattttttgagatagagtctctctttgtcgccaagactggagtgcagtagcacaattatggctcactaagggatcaactttcaggactcaatcgatcctcctgactcagcctcccgagtagctggaactacaggcatgtgtccccacacctggctaatttttaaaattttctgtagagatgaggcttccactatgttgcccaggttggtctcgaactcctgggctcgagtaatctgcccaccttggcctctcaaagtattgggattacaggcgtcagccaccatgcccagcccccaacagccttatttacatgtactattttgttaaatcctcaaatgacataaattcttttctattcctactttacacaccagaaaactagggattaaaaaattgctaactgagttgggcatggtggcatgcgcctgcagtcccagctacttgggaggctgagtgggaggattgcttgagcaatctaggcttcagtggtctaggcttcagtgaagggtgatcacatcactgcactccagcctgggtgacagagtgagactctgtctgtagaaacattaaattaaataaatttttttggaaaaagagttaactaattggtccaagatcaaacagctggcaattgatctgtgattcaaagccaagtgggtctaacttaacttctatactaagatgcttccttcaggggggccagcaggctctctgtaaaggaaaatgccagacataacactgtgattgacagggcccaaaagacttatgtgtcagaaagattgccatcccagtcggcagagaaaatagcatgtcagagtcccacatttggaaaattgaattccttaggctttatatcaagtctgggatcacctgtcctaaatatctgaattattttcataagagacaccgagcagtataagaaacctcattaagcctttgcagatcctcctagtttatatcactctcccctggtcccgttcctttctcatgcattctttttttttttaagacagagtctcactccattgctcaggctggaatgcaatggtgtgatcttggctcactgcaacctctgccccccgggatcaagcgattttcctgcctcagcctccgagtagctgggactacaggcacctgccaccatgcctggctaagttttgtatttttagtagagacggggtttcaccatgttggccaggctggtctcaaactcgacctcaggtgatccatctgcctcggcctcccaaagtgctgggattacagacatgagccaccgtgcctggcctaatttttagttttagtagagcagaggtctcactttgttgtccaggctggtcttgaactcctgggccaaagggatctttcccccttggcttctcaaagtgctgggattacaggcgtgagccaccgtgcctggcctgacaccctttttaagctccccacaagcctccccaactgaactgacttttgccacatctgaaactccacaggactttacgcctctcttagggctcttttctacacattacaagattgatactcatttaaatagttgctggcgctcacttttagatttgaattcaacattaataggcataggccaagggttctactagcgagaatttagactagaacccatatttaacatttattaacaaatacttattgagtgtctgctacatgtctggtactcttatggaagctggagataaaggggtggacaagacaatgtccctgtcctcatggagttcacatgtattttcttccacaagtcttcctaaattggataaattaggaattttttttcaactcaataagtgtggggtgcctagaggcagcagtttttggaggtgacaaaaatacacacacacacacacacacacttttaaattcaacaagtatttattgggtataacatgtgctaggctatgtgttcaccactaggaatttaacagtgagccagacaccagtggtttctttttctttctcataatagctttattgtgatataatacacataccatacaattcaccagtgtaaagtgtacaatttaatggttttgagtatattcacatagttgtagaactagcatcccctaaaagaaactccatacccattagcagccactccccattttccccaactctcccagccctaggcaaccactgatttccatctctgtggatttgtctattctagatatttcacctaaatggaatcatgcaatgctttgtcttttgtgactggatcctttcactaaatctgtttcaagggtcattcatgttgtagtatttccttttgttgccagattaatattccattgtaccagcggaattattagtacattattccaatataccacatttatttatcccttcattagttgataaacatttcagttatttccactttttagctattatgaataatgctgctgtgaacattcatgtacaagtttttgtgtggacaaacgttttcaattttcttgggtatatacctagcagtggaattgctggttaatatggtgattccatctttaacctttttttgtttgtgtgttttgagatagggtctcactttgtcgcccaggttggagtgcagtggcacgatctcggctcaccgcaaactctgcctcctgggttcaagcgattctcctgcctcagcctccccagtagctgagattacaggtgcccaccaccacacccgcctaatttttgtatctttagtaaagacgggttttcaccatgttggccaggctagtctggaactcctgacctcaggtgatctgcctgcctcagcctcccaaagtgctgggattacaggcatgagccactgcagacggcacatctttaaccttttgagcaactgcagctatttcccaaagtggctgcaccattttacattcccaccagcagtatatgagggttccaatttcttcacatcttcccctaaacttattattatttgtcttttttattacagccatcctccaataaattcaagtttttattttggaatgactttccatttaaagaatttcgaggatactacaaagagttccagtatatccttcattcatctttccctaatgggagagaaggattattttgaaaaaaaaaaaaaaaaaaaaaaaagagagagaaatgataccaagtaatccagctttagtctttgttgactgaagtgcgtattaggagctttggccagtcaaagcaaaaggtagcgaaaagatagtcacttcaaggtgtccaagttaagaaaaccaggaggtagaattcaaggagaccatgtcaaatcctgtcagcaaagtcaaggtcagaaaggaagccacttcctaacgacccacaccactggtggtctcatcacgctgttgcaccatttggatgttttctaattctcccgggctgttttctctccaattggactgtaaactcctggcaggctcaggcagtgctcggaaggtctctcacacggtccaaccttacgcgaaaagcacttattgaaagcacctcgatggccgggcgcggtggctcacgactgtaatcccagcactttgggacgccaaggcgggcggatcacctgagctcaagagttcgagaccagcctggccaacatagtgaaaccctgtctctactaaaaatacaaaaattagccaggtttggtggcgcgcgcctgtagtcccagctacttgggagcctgaggcaggagaatcgcctgaacccgcgaggcggaggttgcagtgagctgagattgcgccactgcactccagcctgggcgacacagtgagaaagaaaggaaagagagaaagagaaagaaaaagagaaagagacagacagacagaaagtaagcaagcaagcaagcaagcacctcaacagagacagagacgtaaagaaagagagacagagacagaaagaaagaaagcacctcctcagcttcccatagcgcaggagacttgctcgaccagagaacctacggtcagacgacacatccactgccacacccatacccaagccgggacgcggaaccgcttctacccgcccacaccggagaggttgctcgcgattggccgggcgggcacagaggcccgccttccgaaggtggcagagcagcctccccaactaagcctgggtcgccgcctcggtgaagggccgcggggccgagcgcgggaagtggcgtccagtcggtttttggcaggcgagagccagagcgtgagaaccctcccacggcgaggccaagccctgagactggactagcaaggtcgtgagtctctctgtcagctctccgcagcgaaggggcgcggggggcggggaccgtgcccgaccgtgccagctcccgccccggaagcggaagtgcaagcactgcggggtcctgtccagtgtgagcccgacccgagctccagtagttccgcccgctggtcatcgcgccctttcccctgccggtgtcctgctcgccgtccccgccatgctgtctctagactttttggacgatgtgcggcggatgaacaagcggcaggtgagcttgtccgtcctctttttctcctggctcttcttgtcccttcgaggctgctgctgcggggcccggcggaccccagggttctggtgtgagggtctgagctggtctgatacccgggtcattcgctttctttggagactgtggccagaggccgccttgtccgcctcattatttttaaccccgaactgattcagggcctaccgggggcggggcgggaagcggtgtcttcacgttccattcctcccactgaggcaggggagcaaatggaaaccgtacgcgcttgaagtgggagttggggttgcttattgttttagtcattttaaggcggcggactcttgatttctccagtcggagcgactccaggtggtttcgggagagacgaggtttagccggtttctggggcgctcaggaaggcgattggaggccccacaaaaaccgttttgctgctttcagctccttgcaaccctttagtagagctgaaccgtagcgggctgcaccgactttgacttggaccactctgggctccgagttggaacagttacactacttgcccttgcgtccgcttagcactaaggcggcagccctcggaatctatggttttacagtccaatatcag

SEQ ID NO: 6708 - DNA, 6000 bp, Homo sapiens
agatcctattttgcagaaggggaaactgaggcggagagccttaagtacattgctagggttcgatactagcgggtagtaaaccctacatgacaccattttagtcccattacagctgcttaccgcctggctccccaaggtcagagcacctcaagccggtgtgatctggagccatgctttatttaaaccgatcactttgacaaaccgaatgcatttccaatagctgtagtggggaaagatcagaaagctgtgcttttggagtatagggaaggaactgaggctttgctcagagaagagaggggcagtgagtagcctcctgggtggcttgcagaaaagaggtgagacttttccctgagggtctaggtggcagcactagcacgagggtggcagctttagggtgctggcttcgctatgtcaaagtcaaggatacccaaggaatggagctgtctgagaacagagtcgaaggctctggagtggctggtaatgagcttcctgccactgaaggtgttcaagcaggacaccaccagcaggtagtcccaacctcctggcaggtgtttgtccaagatattgggacttgagtgggagccctgagctggctcttccatggttgaattcttctgctttcctggaccactttggtgcttgactgtccccttttgtgggtgggctttcatcttccatgtatggtcaaaattctttccttggacccagagcttctggatagcattatacatccccagcctccaaccaggcccagacctgtctctttcccttgtaacttatgcttgggccacccaagaaacagaactcctcctctagcccaagcccagatctgccagctccagatagctcttttagaacagcaagtccttcaggacctagtattccctttgtagcccgctgtgctccccagtcacctcccagtatcacagtttcttgaccagctgagacttgcagaagtagatcctatttctgctcaaacttgaaagttgtgaagcacagctcttggattcagaatgacaccataggagcagggcatggtgggtgaatccatggacctgcctggtgtgtggcctacatcccggtaatgtggccactgactcaggagtatgggtcctttggaaaaagggatgtggctgggttagaaaggcagacaggtgaccaatagactggcagggctctgctctgagtttccactccctttctcccttgctaggtggaggggaatgtgggctgctggaaatctcccataaacagttgatattaatctcaggtgcttgcacgcctggaacatgccttttaagaaagacacgtgttcaatttctctaggtgtcaggggagttgggccactgtgctccagcaagtggtccccactctgacctgtctggtgaaagattgcattcgaatcttgggaacatttctgtcttctccaaacccttggtactggaaggtgtctgctcgcctgtaaagggtttctaaagctttactttctgttcaaaaaacaaaacaaaacaaaaaactttgcctattcctgcctcttattgatcagcaaggggcacacgggtgagtttcctcctttctaagactccagctggtagcaaaggagatgaggaggttggggggtgacccctggttggctggatgctgagcttggtcatgatatctccaggactccatgaagcgacaggcatttttccttttcaaccaggacattcttatcaagaggtgagacactgtaaatgctctggactcttactgaggggagggtgtctacgctggagactttcttctgctcccacatttaaatttggcctactgcagaggttaagaactagcaaactctgagtgtgcactattattgaccctgcactatgatttctgtgagcagtgcatgagcaggtcattctcatcttcttaagcttagaatgaaacttcaaatgtctttttctgacaaggcccctgcctctgagatacccagtttatttcaccctaacttcactgtaactgaataacattatgaggacccatccccatcattccccaccttttttttttttttctccctcaacagtccctttggcccagatccatgtagaatcagagaatcttcaagctgggagggatgactatggggctgcgatgtgcttatgaatcacctgggagcttgttctgatggacattctggtttgggaggtctgtgatggggcctcagatgctgcacttcttgcaagcttccaggtgatatggatgctactggacagagggccacactttgggttttgaggatctggtcttaacgtggtcattttacagatgggaaagcggagtcccagaaagcttgtcatttccctgtggttagaaatgaaattctgctcttccccactctagtctatcacctgctttttttttttaaacctttaagttcaggggtacgtgtgtaggatgtgcagctttgttatacaggtagacatgtgtcatggggtttgtcgtacagattatttcatcacccaggtattaagcctggtatccatgagttatttttcctgatcctctccctcctcccaccttctaccctctggtagaccctcatgtgcattgtcccctctatgtgtccatgcgtcacctgcttttgaaagggcttccctctttttcagctgtcgcttcctgctcaggcccagagtgtgagcataaacgtagcaccccatcttaatcccattttactgtcaggatgaaagacttcttgcccatcagggccccttgctccacaatctgcatttttaccaaatccagaggggtttttaaaggttttttgttgttgttgtttttgttgttctaacttatggatgtctcttcttctctgcttgacatgttaaaaatcctctctctctctctttctttctctctctctctctctctcaaaaaagtgggctgggcatcttttggacacaaccatttcagttccaggctggagcactgatgctgggctgaatccacttggcgttccctgcccaggagtggtctgagagaggctgtgtttctctgctgccacctgccacctcccaagagaggccaagtgttaggatctgactacacctcagtttcctgactctcagatattctaaagccaatcccagaatggcacttgaagtgacagggaaattcccagtggcctaaggacagccaggattggcctagggccagtagcaagtggtttgagagtccaaggaggtcttcacactctgtccccgcctgctggtgggagggcaaaatgccagtctggagacaaggccataatggcgacgggggtaaaaatctccctggggccaagggaaggtggaacgtgacgggaagtcgggaaaactgccttgtataggcatgttcttttcttccatttttttcgtccaagtttttactccaagcgacagtgccacccgaaggcgaccggcctgtttgtggttgcgcctggggcaggcggtgacaccggcataccccttcccccatcttgcctgcaagttgcatgacctgcatcggaatccacaggggggcgggggagactcctttcagatactggatgcagttgaattgaattcaatgtattttgcttcctcgcctgccctcctccaagctcgggaaggagaaccctgctttcttctgcgtgtgaatgctgtagtgtgtctgcctgctcggactcccctaaccctttcttctcctttcccacagcgaatgctcgtttttttttttttcagcaaacagctcacacttggcatctttatgttttattaagaaaaaaatccctaccagcgcaaaagcggggccccccccacacacacttctttcccggatgagatctgagctctcgtcgaaagctgcacctgctttgcgtccctaccaggaaggggtgcttgtgtgggagggaaggaggaggttctgcgcccccgaatccggagaaagcagcccgcccgccccctcacccggcagccagctcagctcacccgagagctgagcccgagaagccggcctctgacggtgctggcgtggcgcttgccaaaatatgccccttgcatctcaatttcccccggccatttctcttgcacgcacagctcgcccggggccacctcggctctccagcgcagccctttcgacccctgtttcttccttccccgatccatgcctgctcaaggccgaatgcaaaacccacctccaagaaagcgcagcgggcacggggggcacctagcgtgccatgtcccgcagtcccctcccagccaagaccagagccccagactctagattacggaaatgagtgtcattcagaccaaggactgcgcgtctgcggtcccggtccccggctctgggtgcttctctggggtgtctgtgcgctccggcaccccccgtcgccgtccgtgagcctgcgccccccacccacccaggcttgggagcgccccccacccaaggcttgggagcactccccaatcacctccgccacgttcatttcacttcctaccgcggtccggattgcagcaaaaccgggtagcgcgagggccaaaaagtggaaaggagagcgcctttccgtgtcgtgcagccagctcgccaactctccctccccagccccgaccctcgcaatctcaaatgcaactttttcccttcggtctcggtttcccccgggctgcggctagcgggcgccgcgctgcgaggcgtggagcgggcgggctgccgcgaggctgcgggtggcggtgccggctacagccgcgagccggcgagtgggtgggtgggtgggtggggaggagggagaggacaggcggggagagagacgggtgtggggaggggagggagggggagattccgctctcctgccgctcccagcccgggcggggggcggggggaggaggccgcgacgagggaggggaggagggagggaggaagggagggagggagccgaggaagacgctccgataacccgtgcgtttcgtaaggctcggagcacttgtacatttctgcagccgcgcggcgagccattcgcggcggctgctgcagctcctactgcatcttccttctcttcctttcctcgggctccgggtgtgtgtatgtgtgagagtgagtgtgtgtgttttgcaggtgcgtggtgtgtccgttttaattctgcccagtaggtgggacttggtgactttagcaccattttttccttttccttttttttttttgcctccccaccgtctgttgcaaccctgcaaagtctcggagtcggagagcgcgcctcgcttccagagcccccggacccggcgagtcagcgatcgccgagccggccaccatgcccggcagaccgcgccactaggcgctcctcgcggctcccacccggcggcggcggcggcggcggcggcgtccgcgatggtttcagacgctgaaggattttgcatctgatcgctcggcgtttcaaaggcagaggccccccctcccccttcccccctccctcgccgtctttgtttccttccccccctgctctccccactccccccaccccacccccctctcctctcctcctcctcttttttagaagcagcgatcggagatggatgtctctctttgcccagccaagtgtagtttctggcggattttcttgctgggaagcgtctggctggactatgtgggctccgtgctggcttgccctgcaaattgtgtctgcagcaagactgagatcaattgccggcggccggacgatgggaacctcttccccctcctggaagggcaggattcagggaacagcaatgggaacgccagtatcaacatcacggacatctcaaggaatatcacttccatgtaagtcaggcggccgctccccagcctgcctcccccgcgctctgcgtctccctcctgcccacccgcggccgggagccggccctccgcccgccccagctcgccgctgcccgccgcccgctgggcgcgcgtcaggctcgctctggctcgggagatgctctccggctgcgcattccaggtgactccggccctggc

SEQ ID NO: 6709 - DNA, 6000 bp, Homo sapiens
tgtcccgaggatcaaggctctgaagttccatccttaactgctgtctctcattcttgcactgatgccccattccacaagcacgtgttgccctcccactgcacgccaggtgtagaggatacggcacacctggtgctaccctcatggaggcacttggagggctgcctgggggcagcaccactgacttgtgtctccagggcaagtggggagtggatgaagcaaaggcaggaagctttccaggcccaaggatcagcttgtgtgtagggaggaagggagaatgaagcggggaaaagcaggttggatttgaactgaaagaggccactggggtggagcacagaagtgacaggggagagcgtttgagatgaggccagagaatcactgggggctggatcacacaggccctgtaggtcacggcaaggactgtgggtgttgtcattcatttggccaacatgtattgggctcctgccttgtgctgggcatggaggggcatacgatgccaccaggccttcctttgaggtgcttgggtgcagcagcaggcttttgaacacactggtagcatttttctttttcttttttttttttcttttttgaaacagagtctcgttctgttgtcgtccagactggagtgtagtggcacgatctccgcccactgcaacctccacctcttgggttcgagcgattcttccgcctcagccccccaagtagctgggactacaggcgtgcgccaccacgtccagctaattttgtatttttatttatttatttatttatttatttattttttgagacagagtcttacaccgtcccccaggctggagtacagtggcacaatctcggctcactgcaacctctgcctcccgagttcaagcgattctcctgcctcagcctcctgagtagctgggattacgggcacctgctaccatgcccagctaattttttgtatttttattagagacgaggtttcaccatgttggccaggctggtctccaactcctgacctcgtgatctgcccacctcagcctcctaaagtgctgggattacaggcatgagccaccgcgctcagcctcagtggcattttcctaagtgctgtgatagaggtgggaactggagactggggaagcgcagaggggagtgggggctggtgtgcatgataaggcagtgacattgagttgggttttgaaggatgagtaggagtttgacaagagggagaggaaaggcattcctggcagtgggaacagaatgagcaaagtcacagaggtatgaaaaagccccgatgatctggggagacgctggcagctggagccacagtgggcagtagaaagaggacaggccagagggtcaagttcacagaaggtattaaggcccaagccagagttaaggtttcactctgcaggttgggcaccaggtttgaatgggagagtcccacccacactcttaggcagagccctctgctgacgtgtgctggtggggttgggtgacaggggagggtagcatagccgccactgcccgatggggtgtggaggtggccaggcctgggctgtggcaggggactggacgagggaagcccttttgtgtgttcctgaaggtgggggctgcagagcatggctgtctctgtgcccccagcctgggttggcctggtgcctagagcagggacctctcattatagagccaactttgggctacctgctgcaccaacttggaagaccagaggccttgtccagaagagtaaagattccagccagctgggcctatggtctgaatccaaagcaaacaggaagagagtatggtgggccaggcagggcctctttctttgtttagaaaagggattagtccaggccgacttgtgggtctttctgctgcaaaggtgggagggggctgcaggctccgtcagggacatatcaaaaggcttttcaggggcaggcatggtgccccagtgccagcctggggggtgctgtaaagatgggctcccttggcgaattccatccaccctgatgggaggagcctggcagcatgtgctgggagccactgctccttctctcaccacgcccaagctggagcccttcctgacacctgatttcgcacgattgccccttggggtcatcacccaagcctaatggggtgtctgctagtcactgcagtgggaggtccatcctggtcccagaccaaggccccttggggaaatgccaaaggctcagaacaccctcagtctcaaaggtgggcacccaggactcccctaaagaccctgggctcagactcggcctccatacaccagacgagaggcggcaggtatttgtgttttgcttatgcctgattgaactaatccacgtgtcccttcagttcacacattgcatttatttaagaagccttcctgcaagctcaggggtggcaggggtggcaggggtggcagacgagtgaggccctcagggagcagagctgagggagcaggaaggcatgtggggccctgacatgctggggcctggcacgagtccggcctgcctgccatgcttggagaagggctcagaagaggcaggcacttcttctgggggcaggtgtggggtggggacaagctgggagacagaggccagaaagactttggtaaggagtttctcctggactgactcattcattcatttactcaatccttcgtgcatgtgcgcatccactcaacatctcagtaatgaggacctactgtgtgccaggcactgtgctaagtgctggtgaggccctgctgtcatggggcctgcagtccaggactcaagttatcaccacacagatcaaagggaaaaccacgctgagttctggggctttgcagaacaggtctgtggagctaatggagctcataggagcttgacttggtcagggaggtcagggcggcttcgctgcggaagacttgtaggatggaaaggaattaaccaaggcaatagggaagagaagatccaggcagagggaacaggttgtgccaaggccctggggcttgatgaaggccagagtggctggggtactgcaacaggggggaagaggccaggaaatgggcaggctgactgtacccgggcttgtgggtgcctttagaaggtctggtctggactctacaagcaaaaggaaggttttttttagcagtggcataaaatgatccaatttgtgttgagcaggttcaagcaggcccgaatggaggcagggagtccataggggcgctgctgtgtccacataaatgatgagaatggttttgaccaagtgcatcttgcgatgggggaatgtgggtgaattggatgtggagtgaggtcaggcggtgtcgaggtctgagaaactgggctggtggatggggaaagtgacaatgaacataattttcctgtaaggtgtgtattttattttgtatggtaagtaatatcttcatttctaccaaggatagaaagaggcaattgttgagctttgggtaagaaagaagggaacgatttttttcttttttcttttgagtctcactctgtcacccaggctggagtgcagtggtgcgatctcagctcactgcaatctctgcctcccggattcaagcaattctctgcctcagcctcccaagtagctgggattacagacgcccgccaccacgcccaactaattttttttgtatttttagtagagacggggtttcgccatgttggccaggctggtcttgaactcctaacctcgtgatccacccacctcggccttccaaagtgctaggattacaggcgtgagccaccacgcccagccgggaatgatttttaatcattctactatttggtgtttaatatgttttctcactaaatctgttcaacaaacctgagaggcaaatactgttatttatttatgaggagagaggttcagaagggtaaagttacctgctcaaggtcacagctggaaagaggtgaagccttcagcaaaaaaagcaaaacaactcatttcattttattccgtgagctgataatggaggaaaaagtatttggcaagaagcggcagggaggggaacctggaggaactccctgctcttgaagaatgcaagggaggctgggaccttgtcactgaggagcccctggcatccttccagagatgcaaccaaaggggtgaccccagtgtgttcttaataggagccgggaaccccttctctgtgcacctcccacctcttgcccctgggaagtccttccctgactctaacctcagttctgatgctgttcccaccctctcagctctcaagcagatcaatgcaatgccacctggccgcttgctttgcccactgggcctacagccggaagcctgcccttcagccctcgggcctgatcccaggccgcctgcagcctgtaaccagacactgtttgcttccagcaggcaccccccgagcccagctccacacaccgttcctggatctcctctccccaggcggagcgtgcccctgcccagtccagtgaccttcgcctgttggagccctggttaatttttgcccagtctgcctgttgtggggctcctcccctttggggatataagcccggcctggggctgctccgttctctgcctggcctgaggctccctgagccgcctccccaccatcaccatggccaagggcttctatatttccaagtccctgggcatcctggggatcctcctgggcgtggcagccgtgtgcacaatcatcgcactgtcagtggtgtactcccaggagaagaacaagaacgccaacagctcccccgtggcctccaccaccccgtccgcctcagccaccaccaaccccgcctcggccaccaccttggaccaaagtaaagcgtggaatcgttaccgcctccccaacacgctgaaacccgattcctaccgggtgacgctgagaccgtacctcacccccaatgacaggggcctgtacgtttttaagggctccagcaccgtccgtttcacctgcaaggaggccactgacgtcatcatcatccacagcaagaagctcaactacaccctcagccaggggcacagggtggtcctgcgtggtgtgggaggctcccagccccccgacattgacaagactgagctggtggagcccaccgagtacctggtggtgcacctcaagggctccctggtgaaggacagccagtatgagatggacagcgagttcgagggggagttggcagatgacctggcgggcttctaccgcagcgagtacatggagggcaatgtcagaaagtgagttccggctgggctgcccggtggggtggatccgaggtgctgaggcaaggctggattctgagggccaaggaaggacttagcttgcaggcctttgaaccctgtggagcccgagactggcccattgcttcacctccagctgctggcaaagcagctgcaaatgcaccgaactgggagggcttccccacccctcaccagggagctggggatgagggacagagcgtcccttggacagacaggaaaaccgaggctcagaggagagaaactcacccgaggtccctgagagcctgctggcaccccgaatccagaaggagccccaacccccacgagtcagctggcctggcagggctccggaggctcccggcgaggcgggggtgggagcaggagcaggggttaggctggggcagccttccatgtacccctttccctgcatgcctggtagcatcctcagagcccctcccacacccccagctctggcacaccctctaaccttcctgttggggcagggtggtggccactacacagatgcaggctgcagatgcccggaagtccttcccatgcttcgatgagccggccatgaaggccgagttcaacatcacgcttatccaccccaaggacctgacagccctgtccaacatgcttcccaaaggtgagtgggccctgcctgcggccacagggccagggggcaggcaccctgggctggggtgtggggcaggagggtacgtcctcacacacacatgctccctgcccaggtcccagcaccccacttccagaagaccccaactggaatgtcactgagttccacaccac

SEQ ID NO: 6710 - DNA, 6000 bp, Homo sapiens
cgttcagcgttttgtttttttctctccatacttaaagaccaaatcatttgtttgctctgaagaaaaagaaaaaacaaaacaaaacaaaaaaccacccaccaaatcatttgaaatcactacccgttaaaaaaaatcaccagtggaactaaacagttgagtggtttgggatgtgttcgccatttctgtgtttgacctacatggcctctagttctttggaccactgtaactgtgaaaccatggcttaatactgttaaagaccccaaggctcaactctgtagccagggtgtacctcaggctgcacaaatatcacaccagaatgtcacaatcattcattgctccagctactgagtgaacagggtgcaagacagcactggcttgggttgtatttttgcagccagttaactttgcatcaggtctacacagtccttgcagcctttgatttctccagttgtagagatttgaaatggggtgcccgggttcctctcgtttttccttcaacctacctagcatgcattttacacacattggaggagtcttatgcactgtttttctctgttgctgatggaggcaagaaggccttctaattagtctaacttaaacggacgggattcacctaacaaaagcaagaagaaaagcacaagaacaggtgtcttaatgcatttggataatttatttggggtgtgtgcgtgtgtgtgtgtgtcttggtggaggtgggggccgtgttctcaccaagccttttcataatcaagtttgctttgcaaactttatggccttacacccagcagaacagtccttgctaataaaaggaggatgccctgtcacagttctctgtaaattatcatgtgttgggaagttctgttgatgcttagtttgatcttccatggtggacacatctgttctgtatgtacaaggcattacatgtgtgttttagcggatgggaattgaagcctttccacagtccttgtgctctgagatggctgttgagctctgctcagctgtcgtagctgaattctttttttgtgctgaacactgggcagcctcaccatgttgtcaatgtgcttctggggcccctgtgactgctgccagatgccatgcacacaagcagagtgcctttgcaggtttgtgcaccccttggcgagctggaactgggagccctgtggggtgatctcgccttctcatggggggtcggggaggggagtgcctatttttaatcttgtctgtttgttgcaccatggaaatcactgtgatttgtatatatgccctaggaaatttttactgcagtctaatttatgtaataatgttgattccaggtttgtttaataaagctttgtatcttttaagaaaaaaaaaactgtagcatgtagaggaaagtgcactgggataatccaaggccaggctttgaggttccaccgctacattatgtgactcttagtctaaaccttttggtgtaatttctttggtctgattatttataagtagcagataataaatgaattttatactacaaacacaagtgacaagcttttgcctcttcttcctttttattaaagtaaaacatacataggtgtaacctcttaaataatttttcttgtcataaattacatatttgtcattttattgtagtgtttcctttgttttcttttgggttgcatatggattgttagtgatttgtatttctctcttatagttatttggaaaatatatctgctttaaatcattgcctttcttttttttgaaaccaagtctcactctgtcacccaggctggagtgcagtagcacaatctcagctcactgcagcctccacctcctgggttcaaacaattcagtctcagccacctgagtagctgggattacagacgtgcaccaccacacccagctaacttttgtatctttagtagagacagggtttcaccatgttgtccaggctggtctccaactcctgacctcaagagatctgcccgcctcagcctcccaaagtgctgggattataggtgtgagccaccatgcccagccaaatcattgcctttctatgcttttattttttagttttttggagacagggtctacctctgtcatccaggctggagtgcagtgacacaatcatggtggcccactgcagccttgaaactcctgcgtacaagtgatcctcccctatcagccccccgagtagctgagactataggtgtgtgccaccatgcccagccttttacatttgtttgtagagatagggtctcactatgttgcccagcttggtttcaaactcagcctcaagtgatcctcccacatcagcctcccaaagcactaggattacaggcatgagcctctgcacccaggcacttttctcctcttttcaaaaaatatgcttgaaaattcctttttttagtcatcaaagccaagactgaagtaaattatgcatgtaatgggcttcctgccccctccagctttctggccattgttaatttcacttgaatttataaaccaaattgctattcccaatgattttttacactatacatcttctccttaaattttattcttgacttttacactacatcttgttatcaccattatatttattatttagtctttactctatttcatgatgtgtctaatgaaaaaatcttaatttgtgttcctttctttggtaatgtttccaggaaaaatggctgggttatgtaagcatcccaacaatttcctaagaagaaagatatattttctgagactttgtatatcagagtatgtcttttggttgccattcttttggttaatggcaatatgatgtcttttataaacccatcccacattttttttttttttgagacggagttgctcttgttacccaggctggagtgcaatggcagaatcttggctcactgcaaactctgcctcccaaatctcagcctcccaggtagctgggattgtaggcatgcaccaccatacccagctaattttgtatttttagtagagatggggtttcaccatgttagtcaggctggtcttgaacccctgacctcaggtgatccacctgcctcggcctcccaaagtgctgggattataggcatgagccaccacgcctggtcctctttacttcttcatacccgatttgatcttcttccgtgtcaattcaattcattacatccaaaacaggttttactcatgagggaattagtgtgtcaaaaggctattaaaaagcactaacaaggctgggtgtggaggctcacatctgtaatcctagcactttgggaggccaaggtgggcagattgcttgagcccaggagttggagatcagcctgggcaacatggtgaaaccccatctctacaaaaaaatacaaaaattagtcgggtatagtggttcacgcctgtcgttagttactcaggaggctggggcgagaggatcacctgagctcagcaagttaaggctgcggtaagctgtgattgtgccactgcactctagcctgggtgagagtgagactctgtctccaaaaaaacaacaacaacaaaaaaagaggttgggcgcagtggctcacttctgtaatcccagcactttgtgaggccaaggcaggtggatcaccaggtcaagatattgagaccatcttggccaacatggtgaaatcctgtctctactaaaaatacaaaaattagctgggcgtggtgccgcgtggctatagtcccagctattcgggaggctgggggggagaatcgcttgaacccaggaggcagaggttgcagtgagccacagcaccccagcctggtgacagtgtgagacgccatcttaaaaaaaataataataaataaaataaaataaaatagaaaaaaaaagcactaaaaagcctgaagtcacacatcccaaagttagtgaatgagtggagtttaaacccagggctgtatggctatcatgcctgttttcccctactctgctacactgtctcctctgtaaatgttttgttttgtcttttggagacagggtctcactctgtcacccatgctgaagtgcagtggtgccagcacagctcactgcatgtaaatggttttcctagatttgtattttaatcaaatattcagagaaacaatgctccctgttctctctcgctggggatggtttcattgccttatcttatctattttctatttttccgtgtctgttaattcagcctcataatgggaaatggctgcagacctgggcttgctggctgagataatccatgggtgcttatggacttactccagaagggcttccccttcctatcaacagcctgtagacccttcgtgttttcaccttctgaagaggttgtgtaaggcgctgggttcggaatcacggaaggcccaggtgcaaacctcagcagtcccgggtaccagctgtgcagcgcaggtgagccgcttagcccctctcacccagtcacgagtgatggtgtctcgcgaggccggtgtaggacgagtgtggtccaggcgcagtacctgaaaagggcgcccagggagggagccggcggtcgttgggcgctctctcggcccgcacccgggcatccctcgacccgggctggaggggcagtgtcccgggatgcaccgctgcggggaccccccgcccggcctcgcggacccgcctcggcccaggacggaggaggaggcaggtgcggggcccggggcgggtgcggggacggcaggtggagggaagagggcatcgggccctgctcaccgcggtgtgtggggctgcccgaccgcgccccccgcaggtgccgcccagaccccggccgagggtcctcgtccccgcgcaggcccaggtcgaggccgagagagggcccgtgtccccgcgcagacctaggccgagagagggcccgtgaccccgcgcaggtcaaggccgagagagggcccgtgtccccgcggaggtcaaggccgagagagggcccgtgtccccgcgcaggtcaaggcccagagtccccgtgctcgcacagatggtgtcctggggcccagtcgcgctccccgctcgcggcagcccccgtgtactgggccttgcaaagtccgttaggagcgctccagggcgacagtgcccagcggttaacaagtttgtaattactttcgtgggtttctacgttgcaaattgagaagagggttgctgggttgggcccccctcctctggacgctaaccccacccaggtaaacagggatctggcccaggttcctgctgggtgccgaggtgggggattcagtggggagcactgaaatgtgctggaggcctggacgtgattccactgccaccaccccctttcccccggctacaaagcctcctgcggtgtgctttgtttttcccaggtagcagttattagccctgtatcatgactaaacgaacactaaagatacccttttacttattctcaaattcaaaacatgtatcaggggtccagaattatacatgctaggacctcaaaggtaagaaaggcacccacccacagccacgtgcggtggcacacgcctgtaatcccagcactttgagaggccaaggtgggcgaatcaccagaggtcaagagtttgaaactagcctggccaacatggtgaaaccccgtctctactcaaaatacaaaaataagccgagcgtggtggtgggcacctgtgatcccagctactggggaggctgaggcaggagaatcgcttgaacccaggaggcagaggtgacagtgagccgagatcgcgccattgcactccagcctgggcaacaagagcaaaacttctaataaaaaaaaaaaaaagaaagaaaggaaggagggagaggaagggagggaaggaaggaaggaaggaagccttctcttgtggtcatagttcagaggactgaatcactctgatatttgagcttaccctcaatttcaaaactctcattagaaaatgtttttaaatcacctgaaatgagaacaaaatctaagtagtatgtggagtgtagagatggtaaagcagtccagttaggttggtttgggcagcgtaagtgtgcatcgtcatgcattaaccaacagagaa

SEQ ID NO: 6711 - DNA, 6000 bp, Homo sapiens
aactagtgtctttgctgtaatgatccagctttttgggtgatgtttttgttggcagactctaggtatctatggtactgttcaattgatccaaaagactcttccggtttcctgcttggggtggggagtggaataagttttctgggacacaagtgggatatgagggcagggtcctgctcaagtcccccaatttccatttccccattatcagacttgcacctcaccaccttgtgcttgggtgtaatttctggaaaaactaaacttcagagttatgtatttatcaaggaagtaaacccagaggactaagatgcagcattcattcataactgtataaaacaactgtgatacatactctactcctgtagtgacttcatagctgcctcctgttgccactgtggtgagctcagctggtgcaaatgtaggcttgaaatgctgggtgacactaatcatccccacctgaacagttcatcactccagaaaattgcatattgcagtcaaaagcgatctcttgcagttcttatatttttcgtcagatttagtgcaatactgtgaacctcgaataacaccgtgggacccatatgaagtaccactaaccatgctgaatggttcccaagaaacagaaaagtcataatattacaagaaaaagatgaattgcttgctaggtactgtagattgaggtctgcagctgcaatggcccatccatttcagatacagacggttgattttgtaaacagacaatgtaaactcacagtattaatacatacagtgctgtaagtgtatttactcttccttccatgccattttcttaataacattttcttttctctagcttcctttattgtaagaatgcagtatataattcacacaacatgcaaaagatgtgttattgattgttattgataagacttccagtcaacagtaggctattagtagttaagttttttaggagtcaaaactcatacatgggtttttgactgcatgaggagtcggcactcctaacccccacgtcgttcaaggatccactgtatttgggaagagaggagaaaatcatgtcagttccaccactcctgttcagccataagtctccaatgtgtgttctaagaatacctctgtgctactgtcttgaagcactgttgagggaggaacagaattctgcaagcagacccatggggaacctgtggcatgacccagtggggctggagagagaagggtcggagatacatggggagatggaattggcagcacgagcttcctgcagggcaaagaaggaacagcacatgcttcagactgttctcacctcactgtagaagacagcttgtaaggccaaattaatgtgtgtttacactcttggaaatggagagaccttccacaaacgatattatggttcttcgtgttcattgttaagaatttggaaattatgagcagatgaaatggaaacaatttatacttgaaacaaatacatgtagaatctctgccggaattgtcatctagctttttatctcacagcagacagtcatgactctgctagctctcagttaggcacattgtgggcttgtgggtctctgccgtggaagagccttccttaccatgagatcctcaggtgcagtcagcggtggggtctggtggcctgcgcagttacttaagtcacgttacaaaggctggccttggtggaacaggaagcatggcttcccagaccctgggagcgtcttctgaggcaccgtagcaggtccttgtaactgctgtgcctccgagtgccccaacaggattgtaaaatgactatatttgcttcaaggttttatggcctgcaaataacctttctcaacctttcttctctttgagtccccacatgacatttgccaccttgtagccctgccgtttgtacccaagaatcagcccagctagaaagtgaacagtaaggatgctttgggcaggaagtgcatcaggcttcttttgttgcgacccacagaaggagcaaagtaaaaagagagataagttaacgtggttcatccaagccttgtggcagggcctttatcttcatgttgtttgtatctggcccgcccatcagggcttgaaggagtcccggtgccagtcgcctactgccttctctcagcaagccccaggttacttctttgcttcagtttatttaaaacaagaatttgagatttgctttcctgtagttgatagtaaagttgatagtaggtagcagaaggggcatgtaaaattccatataaagtgtgccctgtgtgctgcatgggggtcagagtcggagtttctcctcctagcctagggaggccctgcttcctacccccacagaaaacctcaccaccttttctaattaattagaaaagtgtgccacagtgtgggagtgatttcagtggtaagtccatgcgtgcacctgccatgtggggagcataagcggtgtgggaaggaaagttggaaacagcggcggcactttggaggacctgtaattctgctctaattcttgctctaagaccggactcacgggtgcccaggaggtagaggttagccctcatcagaccccagctctgtgcggggcctggcaggcatgccagctccctgtttactttttaccttatgagaaaaagaagtaaggtataaaagtgcccatttatatttctctactattaaacggtagttgcagtggctcaggaaagagtcagcatatgattgtccagaggcaaataaaccagtcagccagaatgcgtgtcatcccttaccaagagttagtctttaacaatatgaacaaaaaacaaccatgaacttgaaagaaacaggactaatttaccagataccaacctcaaatgctttcactgaacattttttgcaaactattactctgcattccaacatgctttgtaaaaacgttcatctccttgcccagatgtactgaggcattaggcacattcccttcctaacttgagggaacccattttggctgatggcccgtaagcttatgctgtcccaaaacctgcgccacggggcggaggcagggttggtggaatggtgagccctgtgcgtcctgcatgtttcccatctgccagcattttctgatcccccaggcaccaagctccgtgctggtgccggagaccccgtgctgagcaagcaggcccgctcctgcctccacagaagacctgggagaggggtaccttcctcgtacgcaggaggccagcagcgtgaagagggttttcagcgtgtgcttttgcttccagagacctcagcagagccttgattcatccctgcagcatcctcgcagggccaggccgcctcctgcctctgataggctttcccttcccttagctccctggaagcagggtactccttcgctcaggttgtttgcctggagttcttctggctctcaggaggaagtttattcccacagatagaagccgcaggatctgctattcaggtcttcagccagggacgcatgactctgtgggtccctttcacaggcgtagtgggacgggggtggctttatctttcaggcatgctcctgtggtgcactgtgatctcaattttatatgttttcattatgggacaactttttcataattctgtttgcctgtgaaagtatattggccaactttggttattaacccttacttccttaagcagtttctatctgtgaattcttctaaccacattggactgctgttgatcgggccttatctagggccttttgtgtgctgtggtccattcagaaacatttctaatatttgcattttctttagcatgtgctggcactcaatcatacaatactaaatttgtgatctcttttttttcctgtaacagatgcagcagcttttttatgagaattacgagcagaacaaaaaggggtacattagagatctccataacagtaaaattcaccaagctatcacattacaccccaacaaaaacccaccctaccagtacaggctccacagctacatgctgagccgcaagatatccgagctccgccatcgcacaatacagctgcaccgcgaaattgtcctgatgagcaaatacagcaacacagaaattcataaagaggacctccagctgggaatccctccctccttcatgaggtttcagccccgccagcgagaggagattctggaatgggagtttctgactggaaaatacttgtattcggcagttgacggccagccccctcgaagaggaatggactccgcccagagggaagccttggacgacattgtcatgcaggtcatggagatgatcaatgccaacgccaagaccagagggcgcatcattgacttcaaagagatccagtacggctaccgccgggtgaaccccatgtatggggctgagtacatcctggacctgctgcttctgtacaaaaagcacaaagggaagaaaatgacggtccctgtgaggaggcacgcgtatttacagcagactttcagcaaaatccagtttgtggagcatgaggagctggatgcacaagagttggccaagagaatcaatcaggaatctggatccttgtcctttctctcaaactccctgaagaagctcgtcccctttcagctccctgggtcgaagagtgagcacaaagaacccaaagataaaaagataaacatactgattcctttgtctgggcgtttcgacatgtttgtgagatttatgggaaactttgagaagacgtgtcttatccccaatcagaacgtcaagctcgtggttctgcttttcaattctgactccaaccctgacaaggccaaacaagttgaactgatgagagattaccgcattaagtaccctaaagccgacatgcagattttgcctgtgtctggagagttttcaagagccctggccctggaagtaggatcctcccagtttaacaatgaatctttgctcttcttctgcgacgtcgacctcgtgtttactacagaattccttcagcgatgtcgagcaaatacagttctgggccaacaaatatattttccaatcatcttcagccagtatgacccaaagattgtttatagtgggaaagttcccagtgacaaccattttgcctttactcagaaaactggcttctggagaaactatgggtttggcatcacgtgtatttataagggagatcttgtccgagtgggtggctttgatgtttccatccaaggctgggggctggaggatgtggaccttttcaacaaggttgtccaggcaggtttgaagacgtttaggagccaggaagtaggagtagtccacgtccaccatcctgtcttttgtgatcccaatcttgaccccaaacagtacaaaatgtgcttggggtccaaagcatcgacctatgggtccacccagcagctggctgagatgtggctggaaaaaaatgatccaagttacagtaaaagcagcaataataatggctcagtgaggacagcctaatgtccagctttgctggaaaagacgtttttaattatctaatttatttttcaaaaattttttgtatgatcagtttttgaagtccgtatacaaggatatattttacaagtggttttcttacataggactcctttaagattgagctttctgaacaagaaggtgatcagtgtttgcctttgaacacatcttcttgctgaacattatgtagcagacctgcttaactttgacttgaaatgtacctgatgaacaaaacttttttaaaaaaatgttttcttttgagaccctttgctccagtcctatggcagaaaacgtgaacattcctgcaaagtattattgtaacaaaacactgtaactctggtaaatgttctgttgtgattgttaacattccacagattctaccttttgtgttttgttttttttttttacaattgttttaaagccatttcatgttccagttgtaagataaggaaatgtgataatagctgtttcatcattgtcttcaggagagctttccagagttgatcatttcctctcatggtactctgctcagcatggccacgtaggttttttgtttgttttgttttgttctttttttgagacgga

SEQ ID NO: 6712 - DNA, 6000 bp, Homo sapiens
agattgatgcagtatcagggctcatcaagaaagcaggaatgatctcgctacagagagtattagtggggcattcacaaacttagaaatctaaaagactccagtcattaggatctaaaaggatgtgatgtgggtgtgcctaacgtgacatcttgtgaccacacgttcaaatgttagtgtccccactagcctacagggttcttagggtctaagtccttacttaaaaaaaaaaaaagtctaccgccaggacatagcatagttctagaacctggaatataggaagcatttcacaaatacttaatgaggaatattagtacccaatctccccccgaacgtatctgttccacttactagggtatggttgtaaaatcagagctttctaaagtgtggtctggagacctctagtggttgtctgcagttcagtataaggtcaaaatattaaggatgacaaattaggaaagagccaaataataggtcacaggttaaggcctgagatgagtgaaaaaagtgggtgctatggtagaggaataaactaaagaagtttaaaaatgaaagattcatttaaagtgtctaaattagaagataaaaatgcaatctttttttctccaacaaactgatgccaaaagaaaaaaaatgcaatcgttttacccgaatgtaatacatatgaagacagcaactgtttcctaataatcaactgtattgcaaagtacaaccactctagttcatatcccccctcataccactacttagttttaaaaaaaaatttaatagaacataaatgaatagtattttaaaacacattgctatttgagaggccataatacaattttggaaagaaaaataaatcaccctttataaattcaagacatagaaacaagaagaacacattccctatatattaaagacagtcaactctccaggttatctaagatctccaagaaactgcagatttcatttttgtagaatgttagtcatgctggagagacgccactctttcaacattatactgggagtctcacgcttaagttgaatgatggttattctcagtaggcaatcttactggactttaaaaccacctaggctgggttcataccacagttcaacatcttaataacagggtaaacttgaacaagttacttaaccttggtgtacctcagtttccttctttatagaagatgaatgataacagtctgcctcagagctgttaaaaattatgcattataaatccaaagaaccaagtgcactggtcttgtaccaagtaaggagtcaataaatgtttattattacaattaatgtgctaaaaatggcatggcatgactcacgtaagtcaacaaaggtttgatttcttcaacaagaatttaaaagcatatttattttagaaacagcttccataagtccacaatactctcttaaaatgcaactttttctcttcatttattaactgaaaaataatcacactcaattgagattatacatattgaaatgccctaaaaggaagccgttgccatggaagaaatcattaaccacaaatcctactcatctaaaaactggagagcataaaggagagactttttttctttataaaagtatttataattttgtaaacagctatgagcataactctaggtatggaccaaatgttctagcaaaaaaggaccttgtaaaagaaaaaatcatttatcttatacataaattcatttgaaagtctgtgatgcctctgaagttgtttagccaactttacagtgggcaatgggagagttcagtttaaatatgagaatacatagagttgtaaaaagggagatgagagttgagacatctgaacaaaagaaaaatgtgctttattatatgtatcaaagaaaacataaaagtccatatccctaagactttcctcctcctcctcatatttagggtggaaaaacaagccatccacccaactagctactcaacctattagatctctgaacaatacagttcatgtagacaactccttgcttcaaagcagaaagttcatcctgtagaaagtaaaaataaatacagctttttattaaaaaaaaagaacaacatcaggaataccaagagcaaagtcttggagaaaattactttccacaatggctgaagtataatttggaactgtacaggccagtacttaagtcaatgtttttccattaattcagtttatagctaaagtactgagagataatgatatgaaatatttgcacccaaaatacactcataatctattattccagttccctctataaccactttttcacccaccctacaaagttctccagcagaacctgcatatttgcaaagtgttctcctatgttgacattgtattataaatgactgagaaaaatttcagagacaacttggaaagagaatggaagcatttttgctcaccttttcccattcagcttatctgtattaaatggtgataatcagtaactatttactaagctttcaaaaagtgattggcacatatagtccttattcagcaagatttaaaggacaaggtataatttgagaacataaagtgtaacacaaagctcccaaatgttcatgccataacatgacgtatgacaagagatactcaagagtgagcaccttgggagagaagtattctattgccctccataaaaaatgggagcacggtcctcagcagtggctttgagcttagatggaaacagaaaattataatttccatctacacccctttaatggctccccatattcaccacccccattctctttcatccagccaatttgaaagatgagataagagtgagaagagacagagaacctgaatgagaatgaatttcgacaggtgagggtgtggcacacaagttattttcaggacctcatgctattgtattcttggaaaagttaagtggacagccaaatgttatgctttaccagaaaggagctaggagttcaaacttcatagaaaaattaaaatccattgggaagaaaccttgacattaatgaaaaacatatataatattatagtcatcgatcctcataaacacaatggccccatttgatagatttttacttctctcattttggatctccactgaactctaagtcacattcaatcattgaaatggcttaataatcagtggcttaaaacttggggtatttattatagaagtgaccagtatataatgaccaatcattaccatatgaaattacaatccttttcagtatcatgcaatgttaagtgggaaaagttcaagaaaatattctaaagatatgttctcttgcataaatattcctattacaaatgtgtgtcaaagaccactataaaactaaaattcacttctttctcatacatgttcatctgtcagtgtttaaaattctattggctaacaattaaagtgtatactttgtctggattctcactcagaaaaaacctacataaagacatagtttctgagacacaaggaatttaaaatgaactggatattatatgactccagaggattatagccaatgtgttaggtgtgataatggcacagggtcatgtgaaaaagtgtccatactttaaaaatatacatactaaagtacaaataggtgaaatgagatttgctttaaaatattttagcaaagaattgaatctgacaattgttgaatcttggtaatgagtttctggaggttcatgtattatttttgtattatttttcagagttttgtgtaagtttgaaatgttccataataattttttaaaatttaaaaacattatattgtctagatacactcataaagaactcaggcagggaaaaaacgtttaaatttaaaatttaaattttaaactgaagtgcagttttaaaaatttgaattttaaatttaaaaactgaagtgcaaaaattatgaaattgacatttaaaaatctattcttttatacagctaatatggatttcatctaacttaaggaaaagctttaatgaagaccctgttaaaagtttgtatcaaatgaggacttataatgctttactccaaagcaacaaaacgcatatgcccaaaagatgtataaaaacaggcatacatttaggaaaaaaaaaaaaggcagccttttctctgctacaaatatttaaaactcacagtatactctttctatctcaaagacttttaaaaattattttccatctttagggaaaaccatatgagaaaataactcagcaacatgtctgtgaataatgcctagcaaagcttaaaaaaaaaaaaaaaaaaaaaaaaaagcttctagccaaaaagactaacaggaaaaaatgaacattttcaaaagcattttggaaccttattccagctacctccatgctaagccctctttttcctcccaaaatacgtcacttaactgtctgtcaaataactcttgcccattctacctgatcacactctgaagctgcagcttttcctggattctcttctcaatgacaagctgttcaaacagagaacacctatcaaaacgaatatcatcatctgctcctttctttcttcctttcaggatatactgctgtccagcaggggaagtaattaatgagttttttatgtatggcagcgtcatcccatcagtttgctgtctggtttgaatagctcctatcagctcttcattcatgccaagtacgctcaccgtccagagacatgataaagccgtacttccttctggatttttacctcactattcaaaaaacagggtaccagaagcatgggttacaaaagcatgaggaggacagaagaaatgccttcatcttctacagaaaggaagctgatggactgaaaagttcgtatggagaaaggaaagcaagagtgcaagaacatccatgcttctagtccagataatgttttttaaagcagcttgatttggaagcgtgtgtaattctgaaatacgaacaagcagaacttttccagggggtcaaatgcatataggaacaaccaggatttctcattgctgaagcattcaatgaatctttaataagttctcaacactcagattgtttgtgatcagatcaactgctgttaccagataaaggcaaaactcacccttctggttctataatcctatccaaatggagtcttcatctaccgcatactatcctaactaatgctacaggattatcaggaatacagatataaagacactgcaagaaataaaacactggcaaaataaaacatgaaaggaaagtagagaaggcattttgggtctcgaagcttactatttccagccagagttcaaattactgagcttcaaacaaaccactgccaggtaagatttaattttataaccttaatttatatcttgtctactgaaattaaatctgctcgtgctgtgaatgagatagtggatttgaatttcttgcaacccttccttaagcttttgcagatttaagctgaggtaaacgcttgtttttacttatgctgcataaacaagtcactcagaactagataataaagcatccaaaactcccattcatttttcattgaatttgtctcatctttgtctttatttttatcccaattttgttttatttaatagcttgaaaaaaatgcatgaagagagccctgaatggtgcataagagccattcacagataatgtttaccaacaatattcaaatgaacttagtttcccagagtacttgataaaacaaagaaaaattaataagcattttaaatatttttattcatataaaggaacaaaagctcaatgactgatttctattgttactaagaaaaaaaagctgtgatgtcatttcattcatactaaagaaaaataatctctactaaatcgaggtataacactcttgtaggatagggctaatttatcctaaagatactagacatttttataacagactaaatgaagacatttttctgattcaacaagaggataaaaagatgaaagatgtctggtaccttaaaacctcaaaagctttgactcaggtcagtggtccaaactgtaaaatgcaaagcactagtgaagccatcaaaggattttaaaagat

SEQ ID NO: 6713 - DNA, 6000 bp, Homo sapiens
aattaatactattgtatctggccaggatctgggatgaaacaggtatccagtcagttccttctccctttgtcagtttgaattttgaggttggcagaagcaaataataataatattaggtggggaggtttgtttttaaaaaccaagttttaagtatatatttttagaagtaaataaacttttaatttctaccacttttaattagtttcattatctttctccttggttaagacagtctaacatttaataggtattattcagctccaattcttcaaggtcagaggcttggttactgtaaatttgtagagagaagtctgtcaggaatttggagtctcagctttctttttgttgggatataagctggcattccagtatcctaagtattccttttcaaagtacagataagcacaatttagtgactgactgagttgccagctttttgtatgacccacccttcaaaaagttcgttttgcttctgtttgttcaaatatctttgataaaatgatagtcttcatatctcttgtctgtttgcaaaagagctagtgttattaaaggctgtttgctgttcatctttcttatggaaaaacaatatttttttaaagccttattcttatttcgcttgggcactcagtgtccttccacacagtgacacctacagagtcattagcaaaattagataagtaactgatttattagttccataaatgcatggtgtattccctttcctcagagtgtagagcaaaaattattcatgctgaggtagaataatcaaaatgactttaaaaagcacatttttatcattctaaacataagcactgctgtggtggtatactatcatactacataataatagaaatgaattatgtcagtaaaatcttgaggcttaagatttactgtgataaatatttttcattaaagtgaaatatcttggcagagtcactttcatatgcagactgttgacacaaggaggccagctgtgcctatgcagatgccgagatttgggtctatattattaatgatttatcatgtcatggagagcttagattagttttgaaagcaatcccttgccacaaaagcactttctataatgtgcgaacgcaaggaatactatatgtgcattccaaatcaaagtaatcacagaagctgcagcaacctttgaaatttcaatacctctttttattttgaaacatgaaattctacgtcctaaattttattattcattaaaattcatacaaaatgttatttcatatcaactggatagtgagtggtgtgtgtatcagaattaatagacatatacacatagataagaaaatgaaggagatggaatggaacaaacatttattgcaaacctattgtgtagcatggacttttgcccttaatctcacatttaatgtgaggttggattaagtttcaaattcaattctgcaggattcccagattctgctgcctttggagaatctataaaagcattgtttaatatttattcagtgcttgctttgttccaggtcagatgctaaacactttacatgcattaccacattctgtttttataaaatcaatttgaatattattatcatcatccctgttttccagatgagaagactgaagcatgtgtggctaaataaattatcccaagtcacaagtctagtgagaggaggagcctgggtttcaatccagactaatattccaaagacttcattatcatctattgctattaactatgacctcactattattaactactattacaactaagtaaggggtagaattcaactcctacttgcttactactctgtgacattaggcaattcacttaaactctctaagcttcagttttctcatctataaaaatgataataataataatagtacttaccttgtagcattgttgcaagttaatatttgtaaaatgcttagaacagagtttgggtgcatattaagtactgatgttttgtttaataacagttaagaagttgtactttctgatgactgatgaacttttattaacaattacacacacagattttctgtaattttcagatgaccgttatgcttcaaactggactgtaaacaaaatgactactttccactgatgggaaatgtatgtagataatgtttaagcataatcactaaccatgtaaagcattgagccctttacaatttcttctggtgaaaacactcaattatctccattcatccataccttccttcttttactcatttaacaaacattctcatgccagtactttgctgagtcctggggacgcaggatgaataaatggagaaggatccaatctagagctgactgtattctctggtttagcacataagggagtgtgagaaagtcgtaggttccattgttagatctgtttaacaagtatttattgggcgtccattaaatgccaggcactgtggtgggcactgggactgtctaggtaaatagagattgctgctgttaaggagtgtcgagtggggaagacatgctaaatcggtaatttgccttcaatttacttaattacgtaagtgaactggttaggggagcacagaagaaaagcacttatgcccatggtaggggctagtgggatgaggcaagttttgacatttaaacaaattgttggctagaagtcaggaaaagcagaaattaaactacataccaatatggggatggagtacccagaaagcagagacaccatgaaacagtgtggcacagtggtgaaccgcaagtttctgggtaatgctagcatctaaagcataaggtagggagaggggggagttagactggagaagtagcaaagttaaaaggttaaaagtgtgtaaaatcaactgatgagaccaaatgctaataaaccacaacaatggtagctgcataaagagttagcagttttccttagacttctttccactaaaatccaaataaaaggagcgttgttttcctatcaagattcttggaaccagggaaatgataaatgcttaaaagtaatattttggtcttgaccaaaaggtaaaggataccattcgtaccatgccacagtgaagagcctacttcctacctctcatccccagcaagccaaatatagggatcgactccgaagtcttcactgataatgtagactgaaaacacggctaatccatggcttgaaacgacctaccagcatatccttctgcaatctaaaagtttattttttcctggatttaggaactcagtctagggcaaattgcactcttcaggtggcactctggaaagctgacgattgtggaattttagcaaggaatttaggaatctccagaatttaattttttttccctctttgctgctactgcagatgcaggacaactcaagagctttctgtctccaggtgggtggcgatttgactcctcatcaagccaatggccacccccttgcaatctttatgcaatgcacagtatcctctgcctgcaacgggggcttgctcccttgatggagaaaatacagaataactggacgccaggaaacaggcacagctttctgggtcagaagttggctggggaagggccctgactgccaagtaacttgcaatgatgtcagagcccagcacaaccagaaaacaccaactagccggccaacaaaagacctaataacaacaggaaaaaaatcacagagctgtgttgccaaagctgttctttccgccccctactcttttcttctaattggaagaacagcaggaaagagtctatattttaaaagactcctcatccttctctccccttctttccttgggttacacagtgttaactagggaggaaatagttctccggatgagtcctgcagcagttgcttggggtgtcttttttgagttccttttcaaggctgtccttggaagtttcagaaacaacgaggaccagggtatttttcctaaatgtaaacatgtaactgtgtttgggagaaagcaggaaccattgaggaaaggaagtcctttctgcgcccctctcttctctctttcacggtaattaaccatactcaaatgaaaattaagtttggcggaaaaagctctcttctttttctttaaacaggggcatcatggttcattctagccatttagagccctcagtgatccataattcaactggaaattaataaaacacagcccgttcttggaaatgaagtttgaattaaaatcctcttgttttggaatatgtgactttttttttcctttcatttgtgacagtcaattttaaatgatgtcacttcaaggacattttcatttctcccacaacatattacatgaaacacttgcctgtaaaaccgggtcattagcctgcaaaattatactgtacagaatggctttcattcaaagtagaaatgggatttttagtaggcaatttctgtattttataaagataaagcaatgtttgattgctttcttcccagctgttttgcttagtggttataaagagaaatggggggcgggggggtaatgtgggggcgggtttgtaaagatgtgcttaaaaaataaatcttacactggaaaactaaggcagaacttcacggaacaactgcgcccgcagctctcctgggctgcagtgatttgtcctctgggttctggaggaaagctctgaaagaagtgagcgagagggaaagagggagggaatcgaaaaggttgcttcgcaggctgcagcacccactgcgagctggatgactgaggcactgggagttgctagaaggagcagctactcagaggtggggagagggagggtgcgcagcagagcgccggagaggagggacgcggaggccaccgaggggtcagcagggccgcggcgccagggtgggggcctccaggcggcgctggccacggttcacccgcgagggcgagcgcgcccggccggccgcgcctcctgccgtccgtgcccgggggtgggacccgcgccgggagctgccgagtgcgtggagggagccaggctccggctcgcctgatggattgacttggagatggatcgaattacaccatttgccgtgcatcggtttgttttgctcctgctctgtcccgctgctgctgctgctgctgcaaggggtggtggcgagtttcaggattctatcaaggaagccaagacctaaggagacagagggatatctatttttacaatatttttctttattttctttcttccttgcgcgtggcaagcttttttttttctttttcttttttcttaccagcctccccccaatgaggtaagaccgttttcaacaatttgctaatgctcttgtggcgcccggtgggggtcggaacctgagatcccgaatcgctgtgtgtgtgtgtgtgtgtgtgtgtgtgcgcgcggtgggggtcggaacctgagatcccgaatcgctgtgtgtgtgtgtgtgtgtgtgtgtgtgtgtgtgtgtgtgtgtgtgttgccactggacagttgatttattttccaagctgctctctctgcctgccgtgcaagggacgcgcaaagggctagagaggtttggcggacgcgtcaaaactggcaaagctggcggcttagggggaggggcaagtggacttggaggccctcctccactgtgcacccccttggaaaaaaagcggagggggcatcaagtaaaagtttcttgccaggcagagccagctcggcgtcccccgcacatagctggggttagcaggggttgcttctctgccgggcacagcgtctccaggagccagccggggagagctgagccaaggccgaaggagccgcctgcgggcttagccgccccctcccgcccgttggccccagagcggacgctgggacgcccggggtctggcagctctgcgcccggctaggagcgggcgggcgagcattagcctgcgtcctggagaaggggcgcagcgccgcagttgaggccggagcagcccctcgcgggcgtaggatacctgtcagtgagcgcccggattgcacggcccccgggtagtgcctgccggcgaggggcgggagctcgggtgacttggccatccccatccccggcccaggcccggaggg

SEQ ID NO: 6714 - DNA, 6000 bp, Homo sapiens
tctatgagtcagaatggaggaacatagcaggagataaatacaaaaatatttatgtcctttgaaaacacagaactgcaaaacataccatgaaggaacaagactaatattaccaagaggtagcactaagttagttactttcaatttatttgatactcttataaattctttgagttggagactactatttccattttatttttaatcttaattttgcagaagagaaactgaagctaagagaaattaactagcttcccaaggtcaccatagctagggaatggttatgttagggattgaacttgggcagtttgatttctgctgtatccctagacactgtcctcaacacttctacatagcttataggcatggttactgctcaggtctatggaattccaaaaccagctgtctctgtgagattccttgatgctttccatctcataatagatttagaacatatctgttattagctatggatcttctggaccaaatcctcacctcaaggaggctctctgtaccccagttggttcaagagtgtaggcctggtacacctcatagccagttagtaacttggcccaagaacaggccactgggccaagttcaactgaacatactgaaaattgtgtgtgccaggaaactaggtctctttgttgaccaaggcttttaaagtaccagatgtttcatttgtctcccagagaagacacccaccaagaccctccattttgatgactagaacaaaccaaggccagatctttatttcaaaggaagaaagacctctacaaccaagaaaactttatgaaatatgagcattgtttctggaagttcaactcccataagcttttcaagtatattaactctaccataatattatttccaaatccactaaagaaaaattctattaaccaaaagtgtcttcatctgtggtttttatttgtggtctattgggtgccttagtttttttggggggtggggtggtttgggggatagaaaagtcagtatctgtattttcagaaacagaaagaatataaaaaatataaaaggctggttacaacatgaaaacaacatggaaatttcatgaaatgttaattcttctaggaatagatgttcagtgtcacagttggatcagcctctagcttccccttcccaaaagccttgtcagagaggacagaggaaagatagaggagcatacctcaagatagcttgctcctgttacctttcccgcttgtctgaaaggcctaaatcggattcacctttcaaggttggctttatggatggtgttatttcatccatatcccccaaaactgtctcccatttgttccaggatgcctgaatccccttaaaagagaacaaagactttcatttcacagtgagagataaaaggcttagaatgaaaatgtctggttgatataagaccaagactaaaacaaattcataccactctgaagtcaggcagtcagtcagcaagaaaaaggaaattgactggtatcagaggtattcacagtcattggtagaggaaaaaggttgtagagtaaataagtggctccaaaaagggttggaggatgccagcttatggctcctgtcctggtctggtgaatagaacttattttgggtgccagccccatcctagctgttctttgtcttgatctaaacaaccagccccacccagctgaatttgaaatcggacactcctatgccaaaacactttctatatgaggaatcagaaccctttgttgaacagataaatgccttgtactggtgacctttaagagtggaatgagttataggtatatacttgtaattctgtctctatttctgatatagcctcacgacattagcctgactgattagcatgacatttacttaacgaagaggatctaaagggttttacttaggtgtctctagacacttctataatcctgtatcagttcactaacttacctttacacttattttttatagacaaaatatctatcccaatctctaatgattcacctcacaatcttgtatgtgctaagtaaaaatccccagctaattgtaaatagcgctaaaatagtgaaagcaagcactaggtacaaattgttgctgttctaaaccccatacacaaactaactcatttattcctcaaaataactctacaacaaggtaggtacaattataatccacaactgcatttgcagatgagaaaattaaggcacagaaagattgagtaacttgactgagttcacacagacagcaagtggcagggccacgacataagttgggccttctgacttgagtcttgctcctagccactatattacaccacaaccgagctactcagacaactggaaatcacttaaatcgtttcttataagaaacaaagaggactcattcaatcatcctgattgataatcagtgacagacttgagggaggaattgtttgcagtgttaataatcacctacttgcagatctgaaaaagaaaaaccttttcctcaacaaaactcaaaaactgagttggacaaaaaaatgtttttctagttggagacagaaaggtcatttagtagtgccactgagatgcttacccacagtttggttcctgcttaaaacagttttccctgctgggcgcggtggctcacacctgtaatcttgacactttgggaggctgtgccgggcagattacctgaggtctggagttcaagatcagcctggtcaacctggtgaaaccccatctctactaaaattacaaaaaaatttagccaggcgtggtggtgggcgcctgtaatcccagctactcaggtggccgaggcaggagaatcacttgaacctgggagacagaagttgcagtgagctgagattgcaccagtgcactgcaacctgggcaacagagcgagactccatctcaaaaaaaaaaaattttcccatatttcccaaaatagaaatattttcaataaatcattgattccactcttaatctgcttacttcccatgcaaaagagtcaaggtaatgtctactacaagcaagataaaatcatttcagacactactttctagttacagagtatagaaattgtctctggagaactatattttgatacacatgctaaacaataggaggtcactaggactcatctgtaagacggtggaactcaatttatctattcccaaatgactaatggcaatgctcatattttttggacaattgctgttaagggatccaattctccttatgaattaaagaaactctatgttacttcctgtctaaaaggattaatggtttactactagttaccagttgatgtggtacttaagtttcctcagggctaatgacctggtggggcttacagtactattccaggccaatcattgcacagtcatctctttcaagaaagtttctaaccaataagcagaagcctaactttctggctgaaagctaagtgtcccatatattcctgggtgacgctgaagcaggttacatttcctcagaagaaggctccttggtggtaagttgaacatttctgggcagggtaaaaatcatacttaatattatgtcataaagtagattctgaggagtaggtgagggtgtcaaggactatgaagagaagtgttttgtaaaaactaaaacgataatagcttcatttataatttccccaggaaaggttacttgagaaatgaagttgagggtttttttaattcaaatacacagctttaataactgcatgagagagacaagtttttatttatatttatctcatttttctagaacttcccttgaaaagccaaattttaaggtatcaataaggaaatataattctaaagcaagtgttttaagacaggccagtactatgaaattgcgaaaattattgtgaagtctattcacctcacagtcaaatataaacctctcaattattgaagacatttcattaaaatgagtcagtagagcatgattattttacctaaacatagcagaggacttttttaaggtatatgacttatttcttatagatatatgacttatttctatattcatatttttttaaggtttcatgttagtatttgcaaaacaaacaaatgtatgagcaaatgaaacatttggatcttgtaaaagatctaagaattcacagagacatcatcttgatgggatgtattttttaaatgcatattctaaaacataattttttacttgttgcataggtaacaaaatttggaatttataagttgaacatgtacagatttttataaactagcaagaatatattttttagaagttttgtttttcattttatatgttgtatagtatatattcctaacaatcaaaatactttgcagtttcagcatttagtactgtcagtgaactgtgtcttaggctgagaatattctcatcagctcttactgtattcaataagtaaagttacatcttttctaaagtcacagtgaactccagtgcactgaattcaagcaaatactacaaacacaggtaacattttaatgactgcattggaagttctgtttgctggaacagttttccagttatttattatcagatttaattactcacatgactaaggttcctggacagataaattttagtgaaatgagtttaaaattgtatgtcttgtaaaataaaactgttcccttatatcccacccttacctaaatatatttgtattacttggaacaagtttaattttctttttcaatgacagctttgaagaacatcctgaagattatatcggagacaatatatcaagaatctatttattgaatcatctagaacaaaagccaggagctccctaatggaagcacattagtgtttattttgatgaagaaatatatagattttttaaaacaaccacaaagtagatagctcagtaaaaaatcaattttggaagatgtcactgaacaactcttccaatgtatttctggattcagtgcccagtaataccaatcgctttcaagttagtgtcataaatgagaaccatgagagcagtgcagctgcagatgacaatactgacccaccacattatgaagaaacctcttttggggatgaagctcagaaaagactcagaatcagctttaggcctgggaatcaggagtgctatgacaatttcctccaaagtggagaaactgctaaaacagatgccagttttcacgcttatgattctcacacaaacacatactatctacaaacttttggccacaacaccatggatgccgttcccaagatagagtactatcgtaacaccggcagcatcagtgggcccaaggtcaaccgacccagcctgcttgagattcacgagcaactcgcaaaggtaagcttgaaggacacaagcaagtctcctcccttattcataacttcagataatttccttctctttcattacactatgaatgaatgtgaaacagtcaaatggagaggtctattccaaacactatccatcttacttacaaaactgtccctagttcccagaaaagtgtttcacagatgctttttctttggatttttttttttcttgagacaaagtcttgctctgtcacccagcctgaagtgtggtggacactgcagctttgaactcctgggctcaaacaatcctcccacctcaacctcctgagtagctgggactgcaggcatgcaccaccacacctgactaacttttttattttttgtagagacagggtcttgctatgttgctcaagctggtctcgaactcctgacttaaagggatcctcccaccttggcctcccaaagagatgggattgcaggcatgagccactgtgcccagctccacaaatgttttctgacttaggatagagaactaaagaattaactctaaatgttaggcaatatgttgtaccttgtatatgattatagtccactcaattcacacttggttaaacacgtcaaactgaataccaagctggtttcacgtcagtattaatgtctctatgtcaatcgtataaaaagcaaaacacttgtgcttgctgtagttaatactgtgggtgacagcctttagtgtgtaggggtattt

SEQ ID NO: 6715 - DNA, 6000 bp, Homo sapiens
gtggaggagggaggatcacttgagcccagaagttcgagactagcctgggcaacatgatgaaaccccatctctacaaaaaaaaaaaatacaaaaattaactgggcatgatggtgagcacctgtggtcccagttactggggaggctgaggtgaaaggattgcttgagcccgggaggttgaggctgcactgagctctgactgtgccactacactccggcctgggtgatagagtgagaccctgtctcaaaacaaaaaaataaaatttctgagatcatccccaaaaatgctgattcagtaagactatgttggggcccaggaatgtgtatttttataagaaaccccaccgccaaccctaggtgattttgaaacaaatggtctgaggactaggctttgagaaacagtctagtttcccattgtttttcattgttgtttgtttgtttgtttgtttgtttgtttttgagacagtctcgctctgttgcccaggctggaggtgccgtggcgcgatctcgactcacggcaacctccgcctcccaggttcaagccattctcctacctcagcccctcaagtagctgggactacagatgcccaccaccatgcccagctaatttttgttattatcagtagagatggggtttcaccatgttggccaggatgatctccatctcttgacctcgtgatccacctgcctcgtcctcccaaagtgctgggattagaggcgtgagccactgctactggccttctcattgtcttatagctgtataaacaaaggcctagagggatgatatgaattgcccatgatcaagtggatagttaggaacagaaaggtagagatagaacccaaatatttttttctcacttacgaggcactgtttattctatcacaccatcttgaacatgatacataaatgtcagtttgattccatattttgagtttcagcccagggcttgtggactagtaagagctcttgagctccatctgtcagtcaaattctgcagtatatgtaaaggaccagcacagaggcatttatcatgaggattgatccagttgttatgaatttgggggtttctttataacacttaacaggactcaaccctatcaggaatttcagtactcaattactcttttcaattttactatagttacagaaagtcaagactcataaacacttccctgaatcaagcagcagcactgtttcccagagaatatgactttctctctgttgtacatttcaggatcgttctccagggcagggtatgatctaggtaatcacatgggaaaattgtctccaaggataagaacctgtatcaatgttgtaactaataaaagccacatggctgggccagtagtttttcacccaactttccaaatacagaatatgggtaaaacagtaaaacatattttatttcacacaatatgggatattttataaaaacctacaaaagaggcctgaaattgtacatttgttccatttccatttatcctagcatcaagaccatcaataaactagctcttccactgggtagataacccaggtctcctgagggtcccttcatcagctcactggcagggtatacactgcctaactcaacacagccatgcgaggctcccacagtgtaggcactactcttatgcaaggctttagtaacagttaaagatactctctgttgcaaaactgagtcccaggtaagttataaaacgttccagattacctttgacctggttttgcaaggttgcagaaaacaaaatttgacctcctttaaacaatgtgataaaggaaaaatgcttacaatagctttcaaaaatattgcatcattaaaagctataagactgaagaacttcattacaaaacaagtgttgggaccaaggataacccttgtcatccaaacttttgagattagattgagaaaaactgatggtacaacaatttgattttcaaagcaagaaacatttagagggaggagaggccaccaaaaaaaaaaaaaaaaggagagagagtcccaacaaggtacaagctagttttctctgtgccatgatgggatggagaaataagatgaattagttcaaggatcttacagtccagtaaaagaactaaaccgcatgcacaaatgattgtgacacccagtagaatgtgctcagtgtgctgggagggctacaagtgctgcaggaaaacaagcagaggtcaagagaaggctttttggggcactgactattgagctgaacaaatgcagtgggggagggggcattccaggcaaaaggagcaccagaggcagttctgatcaggtgcttaaaacagtgagatgcttcattaaaggatattgcgatgtaagaacaatggcagtctggacctaataatagtcatttttttaagctgtttcctgaagggacaggaaatggaaaaaatagggactcagagagtccaaagaatggccaacagcagtggcctcacttccacagaaggaaatatttaattttctaatgccaactttagtccagaatcaaggcacagaaataatctaatctacactcttcccaactctttggactgcccaaggagtaacttaaatgagttgtttcaatgcactttgtctcaaaggcttagaattctctcatatatctttgaataattccctagtaatgtctagcacatagtaggcaggcagtcaataagtgtctgttgggcagggcacggtggctcatgcctgtaatcccaacactttgggaggccaagatgggcagatcacctgagttcaggagttggagaccagcctggccaacatggcgaaaccctgtctctattaaaaatacaaaaattagtcgggcatggtggcgggcatccgtaatcccagctactccggaggctgaggcacaagaatcacttgaacctgggaggtggaggttgcagtgagccaagatcacactactgcattccagccgggatgacagagtgagactgtctagataggtagatagatagatagataaatagatagatagatagatagatagatagatagatagatagatagatgcatacaaacatacatacatacatacatacataatggatagataatgtctgttgaattaatgggttccattattctggttgattgtgacaggctttctctcctgaagcttaaggaccactgggttgggcatgagggcctgaaaaatgatgtaacaaaatcagatgtgaaaaaatccatttaaactcaatctaccccaggcccagccttaccctaccacaggcttacttacctctcaaaggtcctcctaatcaatgactctgtccagctctctggcagtacatggtaggacagcggtgctctccttgggtctcagtgcagcaagtaagcaggtggtgagcacaggatgggctggaaaggacctgtgagtagggtggtggaggaccctgtacaaggacagaaacccagacaccaaatgattaatatatccaagggctgggattcccagcctagtagcccaaggaaagatagcttaaagatattctctaagatttttcttctctccctgctcttaactaaagcttgcaaaggaggtgattgtacatctccatccaagaacaaaactagcactttgctggcatatatgggaatgcactttattttcttcagaaacagggactgaagaggtaaaaacaaactctgaatcaggtgttgttattgaatctgaaagagaaggatagagttcagattattctatataataggtgctagtatttgaaaaggaccttcccacagcctctgagaaaagggaagtagatcattggtagaaagatgacatggttgcttacagatatcaaatgctaacaattatgtaaggccttatgtgacctggtaactcatgataaggaattacctttgattccagggctatttagaaagcaagagttcatataagcaagaactttaacttggagaaataaaaattaacatcaaggagattactacttaattacctaaatgtaaaatgagtatgtatttccttgttaaatttttgcttactcctggtggaacttaaacatttttatgacctccgggtgatttgtgtggggaagaaggaggagcacatgcatgtctctctctctatatatagtattataatgtgcatcatcttgctgtacaaaatactgtcattccaaactgccaatgattgagatgcaaaattacagttacaaatggcattttaggaactatttttaggttgtcttcaaggactatgttattaatagcaccagtttgcatttcagttgcttttctgaatgaagaaaagagataaatcttcaagcttgacttgctcatcaaccaaccatttcatgatcagagtacatttcctttcactaccttccttttggaccttaccttcttggtaaatatttctggggtgttttgtttaatccagtcagttactcattcactgaggcagtctagtagcagaacaagctactagactgaatgttttcctattggaaagctgcaggtttagcctgagcacctgacaccttagtaatgaagattgattcagctcaccacctacccaatctctctgccttctagcaatggacttgtttattcagaaaattcttcctttttccttaaaaaaaaaaaaaaaggcaggggcagacttaatatgctaccttaattttttaaaattttctttgaacagactttaaaggggatgggggagtagtgttgtaatcacttgatttttcaacacccaagtgtgtgctctttctctgtgggtttatttcagtctacaacttaaaactagactgatgaagaaccgactgatggagctgctctacacccttcaggcaactttctgtgaccactgtttctcatactcaaacttttaataaagcttgaggttttgctcttcaagaaaagatcatccatgttactcattaaatgcagatccacatgattgaacaagcactgagcagaaggccaagcagccagcctcttccaagaaataaggcactttgctagaacttaatctgaatggctcatacaaggaggtgggaacctcagaagcccagaatgattcttttcattttgcatgtgaccctccatacactgacttggtgagcctcttctcatttgtagaaataagattactggtatctatatcacagagttgttatgaaaattatgtgaagtgatgtatgtaaaactataccaacagttctatgcaaatgaaaattttaaatgtttgttattagtaaagagagaggtgggtgcatgctctgatgtgccacccagatccctgctttaggactgacggactcactcttcagctgctgggagctctcagctgagacctctcccaggacttctccttggttgaagagagacactttgcccaaggttaagcaccaccaccccagcctgagtccattggactggtcaatgggcaggtgtgaaggcacagcctacctcccttaatttaggaggtaactctgaagggcatcccaggtccagagtccccttaggattagaggatctgctgagggagacttctgttgtgactgcattacagttcaatgtctccctctatccagtctgcttcccttgcagcctcacaggtcccattcccaagagcactcctgcatgcacatctcggagtctcagagaacccaaccttgacaaatagaattataggagcttacatgttctgattgatagatgagcagactttacaataaaaattataaaaggtagatagatattttatgcttgcattagaaaatatgtaggccaaccaggcagtggctcatgcctgtaatcccaacactttgggaggccaaggtgggcggatcacttgaggttgggagttcaagaccagcctggccaaattggtgaaaccccatctctactaaaaatacaaacattagccgggcatggtgacagccgcctgtaatcccagctactcgggaggctgaggcaggagagccgcttgaacccaggaggcagagattgc

SEQ ID NO: 6716 - DNA, 6000 bp, Homo sapiens
tatcctctcgcattacttctctgagtcagagcctcttctctctaagtcacgggaactgcccttgctacttgtgacctgccctttactcagcagtttttgttctgggaagccctgggattctgctaatacctatcactgtaggtgctgaagggaaacagatgaagaacatgacctcaaggagcttcctgtcaatgagaagaccaagctgacgcctggcaaaggtaaatgccaccataacaaattaagtaaaagtgtgcattagctaatttgtaaattcagcttaagatgaatcctgcttcttgggcccttctctgacgctggtgttgggactgtaggattcctcgagcctccgtcaaggttaacatcaaatcccactggcttctctcagcaccaccttgatgaccctagcttagtttctctgtttcccatgactggaactcttagacctttccacaaacatacaaggatttataattcaaagctcaagcgatgaagttgaagcttttggcccataggaagcctgaactagtgattaggagaaaaagattgaggagtctgagtgggaagagttagctatttgaaagacagcattatagtagtagtcattgtaggaaaactcaggactgggttggacttacttatattatgttgctttatattttggttactgagggaggtgaaggtcatcctttcagttcttgggatgtctaaatagcttcatgactcctgggctgttggataaatttgctttcagcatcatctggctgtaccttttgtccttagcaggggtaaaaggaaccctgtgaaaagcatcataccccaggtttcagtttttgccttgaaatgtgcccgggatcccaggcagtctgggactgcgccctttctccctcttgccaagtgtcctgtatgttcttcagggctagcatggaattaaggtgaggaagctgctggccatctttctgaatgcttgcctgatctctgcaggttgcctcacccccgatcttcctgtgcccttccgcagccattctgtcccctctcctgtacctccctggggtcagttgcagctcatccctggtcttattctgcctgaggtgctgagggtgacaacttacaatagagtctctccacagaacacagagatggagggcaattcttagtcctttccctcactacatcataaacattaacacttctgcttggtccagagttcaggaatgctacttgtaaccaccttgagttattttgtcagtaaaataggtctttgtgggctagcactggatctatttcatgataaccttcactgaggggctgtaagtaccaggctatatttgcctggtccttcatatgtatcttgtttaatcttctcaatagtagtagaaaacaaatattagcattagcttctattatgcaaaagaattcactaaaatacagactgatgaatgaatttgttgcagatcattcagcttgaatgtggcagagccaggattcagacctagcttttttgggctgagtcccacgctgggctttattactaggtacttgacgttactataatgtagaccatctcaacaaaatagagccacgatttcttaatgtgttattaacaaatacttaacacataaccaacttactttggttaccttaaaaataaaatatttggctgggcatggtggctcatacctgtaatcctagcattttgggaggctgaggcggggagattgcttgagctcctgagttcaagaccagccaggggaacagcaaactccatctctacaataaataaataaataaataaataaataaataaataaataaataaaaataaaaataaatcagctgagtgtaatctcagctactcaggaggctgaggtaggaggatcgcttgagcccaggaggcagaggttgcagtgagctgagatggcgccactgcactccaatctgggctgtacagccagaccttgtctcaaatgacaacaacaaaaatattcaggcccggcacagtggctcacatttttaatcccagcactttggaagcccaggagcttgagaccagcctgggcaacacagtgaaaccgcatctctacaaaaaaaatacaaataataaaaattagctgggcatggtggcttgtgcctgtagtcccagctacttgggaagctaaggtggaaggatggcttgaacccaggagttcgaggctgcagtgagctatgatctgccactgcactccagcctgggtgacagcgagaccctgtctctgaaaaacacatacacaaacaaaagccctcaactattcaaggtgttgtctcttactgagggaatctataatgcagtttttatgggaatgaaggtgagacttgaggggggcaccaaagaaaagtaagatactaataaagtggaggagtttttctagattagaatactgaagcaagtgcttatcccataatcattcttgtcccagagattttatactcaacaatggaaagtcactgagaatcccagtaccgcagaaaacagcctgtggagcagggcccacgtaggggtgcagatgaccctgttaccagaaaggggtcccgatccagaccccaacagagggttcttggatcttgcgcaagaaagaattcagggcgagtccgtaaagtgaaagcaagttcattaagaaagtaaaggaataagagaatagctactccatagacatagcagccctgaggggactactggttgcccattttaatggttatttcttgatgatacgctaaacaaggggtgggttattcatgcctcccccttttagatcaaatagggtatcttcctgttgttgccatggtatttgtaaattgtcatggcactgggggcagtgtagcagtgaggaggacaggaggtcactctcgtcaccatcttggttttggtgggttttagctggcttctttactacaatctgttttatcagcaagattgttatgacctgtatcttgggcctatctcctctatctcatcctgtgatttagaatgccttaaccatctgctaatgcagcccagtaggtctcagcctcattttacccagcccttattcaagatggagttgctctggttcaagcacctctgacaaccctacatgactttcttgtctttgctgtggcttcatctaagtcagaggccggtgggcagaggaccaaaaaataaaatacctaaattctctgcgctgaaaatcttggaggtgtgtgcatgtaaacaatttgtgcaccaagaaggcaactctgactcatctccattattgcctcattatcttcaggagaaatccacccttctcaactctactttgtaatgctggaggttattcatgcctcttgcaaaccacgtttctgcttaaactctgccaataaagggcactggagggagacagccggctggaggagggacttcctgtttgcttcctatctgcttcctggttctgtgagcatcaccatgtcaacgcctatttatgtctcagtggctgttcctttgtgtagctgcactaaattcagtttacagtagctatcggcaaagatttcatttgcctcctgagaggtctggatctcagcccagagggccctcctgtgagctcagagacctcagcatttgttgagtggtcaccactcttcagagccatgagtttcagcttcttcggtgtctctccacccaaaatttcaatttaataattttcagttcctcccttaattccctcaatctaggagtggtagctatgtccaacaattgctagtgccttaatagtgactccttccccaacactttatatcttaactttatacctagttgagttctttatattaaatttgccctgttcaggctgggcgtggtggctcactcctgtaatcccagcactttgggaggccgaggtgggaggatcacttgagcccaggaatttgagatgagcgtgggcaacatagcaagacctcatctctactttaaaaaaaaaaaaaaaattatctccgcatggtggtgtgtgcctgtggtcccagctactcaggatgctggggcaggaggatggcttgagcccaggaggacaaggctgcattgagccgtaatcacaccactgcactccagcctgggcgacagagccagatactttgtaaaaacaacaaaaaacttgctctgttcagatatttggttaggagtgttgctttttaggaggagcagttgggggccgggttggggagaagctaacaatgtcagcagctttgaagaaggcattttgtaatctataccatggccaaaaccaccccatggggctctcactgaagtccaacagcccatagtgtaatccattccttagactgccaacagctctagactcatagacattagtgagggagctctacaaactggaaccctgtgggtatttctacaacttacagattattaatagtcgtgcaaagacaggcaaatggatgttttctggtggggtaccgggagggagcagttgcatttgaagaatgaactatggatttcattgatgtgctttttttaaagaaaagtaaaataacaaaagaaaaatccttgaagagtatttttattcccacctcttgtaatgttcagggaacatgagtgacatttggactcccaaacaaaagaagggaggggcatatctctctgtttctatggttcctcgttgagggaaaaaggctttcaagttcttgcgtgagcactgacaggcttttatgaatagttggtgacacaggtacaaactgggctgttctggctgaaatatctgtttgccttgtcggatattgccagcattcttcctgcctcactgacctccctgaatgacttgggcttgagaatgtttctgcatgatttctctgagcttgctgtcttacctgagagcaggaagtcaaaaggagagtgatggagccacctgctgccctctactttgcagatattaaagaggagcctgaaactgttccttggacatcttatgaatgtcagaaaataccttttggagggttagaagatcaggggacatggttgttcacatttgctgccacggaacaccgccagtcttcacttggaaacagaatcacgccttgtgaagagatcatccctaagcaggagagaagctactaaaggtgagaattttcttcatttttcattttccttcctcttagattcccataaaagctattactaaagagaatacattcttgtgtttaggaagagctacaacaagggaaaataatcattgcttgaaggatgtggcacattttgtccctctccttatagggattattttctataatatctggttttctttactgatattcagtaccctttattgtatttattttttcttttttttccatattcatcttaggatttcaatgtacaatgttttttctttatttttcttttgttttctttctttctttttttttttttaaaggggcttcctggtcttcatcggacagtgaaatttgtttgggagtccaaacaaaatataaaagagctataatacttcctgtattgtatttcaaaggtagctgtggtttgttggaacaagcattaggcttgtagacaaaaacactgggggagaagagagagtggagaggagtcctggatttgcttcttaaaacatgtgtatttggcaagttatttagcttctgttttcctatctataaaagaggcttaataatacatttcagattggttgtgaaggttattaaatgggacagtgtaaataaatatttctcacccacaaaaggtactcattaaatattgtatatacacagcttgtgtgcaagtatattttaaacttggatggatactctgaatgatttcaatgcatttttggataatatccagttatttttacttctttaagaacattttttaaaaagtgtggctagatgtcacatctgaccaatgaattatatatggtgaaaagcattctaatgctatataaattgccaaaatagaagcaagaaatgttttgaaaggacctttaggtt

SEQ ID NO: 6717 - DNA, 6000 bp, Homo sapiens
aggctgaggaaggagactcgattgaacccgggaggcagagattgcagtgagccaagatctccccactgcactccagcctggcaacagagcgacactccatctcaaaaaaagagaaagatctggcccataggttaacaacccctgtcctgacatgtcctttccaccatcatatctgtgttccagaaagaggaatgaggaagtggaggggttgaattttctcacaaaaacatgatccacaggtagaaatagtgcagcatagtcacacaatagaatactacgctacaacaagaatgaatgaaccacaactacacacaacgcggatgaatctcacaagtataatgtagagcaaaagaagctgacacaaaagattgcatattgattgattacatttatataaagtataaaaacagacaaaattaatctatggtattaaaagtcaggttgcctttgtaagggatagtgacaagagaagacttctgagatctggaaatgttctatttctttttctttttttcttttagagacagggtcttactctgttgcttaggctggagtacaggatgcaatggtgcaattgttttatttgttgatctggatggcatatgttcccatgcatgagtgtgtccacatgtgaaaattcactaagcttaccatttgtgtactttcctatatgtatactccaacaaaaaaaagtttgtataaatttcaaaaaaaaaaaaatagtgattctgaagttgcaatcacttctcaggtctctttcggccaaaacttagaggaccacttatgactgcagggaatctgggaaatgcaggttcattaatttttttaattaattaatttatttatttattttaagatggagtcttgctctgtcacccaggctggagtacaatggcgtgatctcagctcacgccacctcccaggttcaagcgattctcctgcctcagcctcctgagtagctgggattacaggtgcacgccaccatgcctggctaatttgtatttttaggagagatggggtatcaccatgttggccaggctggtcttgaactcctgacctcgtgatccgaccacctcggcctcccaaagtgctgggattataggcatgaaccaccacgcctggcctgggaactgcagtttccagttgggtggccatatgcctctaaaatttagaggattctcttattaaaaggaagaagggaagaatgtaatctagggggaaattagcaggctgtgctacagtccacacagcagcacaggcccatgacagttatcaaatcctgctgggcatgagctgtgaagacctccaccctggcagtagagtaagttctttggttagcccacctggctgcccttgctactgttttctgggaataactcccttgaccttagttctctgtattatctgagtttactctcagataggttattcgtttactatagagcatggtcacacctttttgtccttcttcccttttgcttttttttctgcttggaacttggatataatggcaggagctgcatcagccatctaggggccatgagggagtcttagaaacctcagccctgatttccttggtcttacgacattaataactggctacttctgacattcttctatgagaaaataaactcttatggtttaaaccactgacattgggtctttgttacccagagccaaacacaattctcaactgatatggaaggcctccctaagaagatgacatttaagctgaggcttgaagggttagcaggtggcagataccagaatagcagaggaaaaccaaaagccctttccactccactacactgctgactgtctatcatcctctaggtagggagataagagactggagaagtcaggagaggagatttcaaggtgggattgattggccaggaatgatagtgatgctgtgaggaaaggagggcttggtgatgtgctctcatctccatgtgtacgtttccttcatggcacttgtcacacagaagttgtgatgacatgatgaacacccgtctgtctgttctgctagactggagtctccatgagggcagggacaatcctttcgactgtttatcactggcataatgcctggcacatggcaaccatggaacaagttattggataggccgtagtagaaagagctagggtaagaggagggagagaaaagacacagaagcagaagagtggaaaacctgggattgtgcaggctccttgttaaggggacaccatcccattagagcaccacaacactcctcagaggcagacaagggggattgaggtcaaatggttccttcaggcacccacatggcatgggctgtccagctcacagcctgtctctcctggctacccaacaggcatgatgagctctgagttggctatcagtggtacccccctccctagccataacaattgatccaagacataggtacatgactcaggctggacaattagagtcctttccaagaatttttaaacaagagctaagaaaagtagctacttcctctgcagctatgagagcatgagcctgggtttcctatcatctggtcaagcttcccggaggtggccagcctggggtaatgagcctggcacccagagaaaagcagggaaagagccacagaaacaaagcactacgggtcgtcaaatccctggttcccgtatgcctcaggtcagctccaccctgcccttcctagtttatgagccaataaattccttttgtgtttaagagagttagtgttgagcttctctcttgaaatctatcaactacctttctctccaaaatgcaccctgaatctgaccacttctcatcatctccactgccaccagcctggtccaaactactaatatgttttgcctggatgaatataacagcctcccaatggtctccctgttcctctcttgctctcctacaatccattttccacccagcaggccaagtgatcttagacaaatgtcaattagattatgtcactttcctgcctaaaccctccagtggcttctcatcacttttagggtaaaatacaaactccttaccctgttttacaaggcccaccatgaggagtggatactcctgtctgtcctctgactttattccatgccacttccccctcatcactatgattcagctatattggccacctttttgttccagacacattaagctcattatttcttcagtgtctttgtacctgcttgctttcttttcttttctttttttttctgagatgaagtcttgctctgttgcccaggctggagtgcagtggtgcgatctcagctcactgcaacctccgcctcccgggttcaagcagttctcctgtctcagcctcctgagtagctgggactacaggcgcctgccaccacacctggctaatttttttatttttagtagagacggagtttcaccttgttggtcaggctggtctcgaactcctgacctcaggtgatacacctgccttggcctcccaaagtgctgggattacaggcatgagccaccacgcctggcctttgtacctgctttttcaggtctttgcatggttaacccctcatcattcagtttttagtgtagtaatatagtaatcatgtctcccccacctcatccctttctatcttattatgttgtttaagatattcacagaaatgatcactgctataattatcttttaattatgcttttgcttacttttttgttggctatctcccctggagtttgagctccaatggagcagggccctcacctgtcttatttaccatgtatctacacagtagatgctcaagtaacatttattcaatgaataaatgaatgcattacaaaatgaggaggagctggagttccaggcagcccctagattccctgttgggtcttctttcctctgccccatgcacacacagtacacactgttgactaatgtttaactcatagaggagtttgggcttgacatgtgacctcactcagcctctgtttcatttgtgaagtaagaaataagagtgggcggctgggcgtggtggctcatgcctgtaatcccagcactttgggagtctgaggtgggcagatcacgaggtcaggagatcaagactatcctggctaacacggtgaaacaccatctctactaaaaatagaaaaaattagccgggcatgatggcacatacttgtagtcccagctactcaggaggctgaggcaggagaattgcttgaaccggggaggtggaggttgcagtgagccaagattgtgccactgctctccagcctgggtgacacagcgagactccatctcaaaaaaaaaaaaaaaaaaaaaaaaggagtgggcttatttcacataagcccactccttgctaaaccaacaatgattgcctaagatgcacggagccagttggtggaaaagtccatagactatcagagttgaatggtgctggtcaggtgggaggagcacctcattcctgcttccccatcaagttacttgccttggcctgcttcctactctctgggtcactggtgctcacacagcctttcccaacccccacctccaaaggtcatattttacagctccttgtgaggaattcacatcatgccatgaccttcactatgagaaagcacaggctgtaaaaggccagcctggctccctgctccgtggttaaatattgatgatattgggcaatagagacctggagtgggcacactacatatccccctgcagtgatggaacccacagaccgcaggtcctctgcagtccattctcctgcctgtccagaggatccggatgttttctctttacttgaggccaacacataacaatgaaagcactgggctactggtgctttcggattgtgaaagtcaggtggagcctgtttgcactctgagtgcactcattcaagaggtcagtcaccctggagtgatacagaaggctccaggcctgggcgtgtgctaaggccagagctaccagatgggtccagctgccgcaggctctccaggcactgtcccctaagtgacagctgttactgcctgggagagctcaagtgcaaagactatcctgttctcccataaagaggaggaaaaggaagatacagaaatcggtgctgctcccaacagcagatcaaggcagtcgtcaggaactcaggatccggggtgagtgtcctcatcttgccttggggatgggtggcccaggtctttggcagaagtcacagtccaatggcacgatggttaagccctgtttaaaatgcagagatctcccagaggggcttaaggagacaagacaactaaatgcagtatgacatcctaaatgggatcctggaacaagaaaagaacattaaaggcaaaactaacaaaatgcaaataaggcataaagtttaatttaatcatgcaaatgacaatatgatgctcactttagaagcaaactggatacgtgctttgatagaaatatgtctttggccgggcgcagtggctcacgcctgtaattccagcacttttggaggccgaggcaggccgatcacctgaggtcaggagttcgagaccaccccggctaacgtggtgaaaccccatctctactaaaaatacaaaattggccgggtgcggtggctcatgcctgtaatcccagcactttgggaggccgaggcagatggatcacctcaggtcaggagttccgagaccagcctggccaatgtggtgaaatgctgtctctactaataatacaaaaattagctggatgtggtggcgggcacctataatcccagctactcaggaagctgaggcaggaggatcacttgaactcgggaggcggaggttgcagtgagctgagatggtgccactacactccagcctgggcaacaagagtgaaactctgtctctaaataaataaatacaaaattagctgggcatggtggtggatgcctataatcacagctacttgggaggctgaggcaggagaatcacttgaacctgggaggtggaggttgcagtgagctgagatcatgccattgcactccagcctgggcaaaaagagtgaaactctg

SEQ ID NO: 6718 - DNA, 6000 bp, Homo sapiens
ctttctacgtgtggctagccagtttctgcagcaccatttattaaatagggaatcctttccccatttcttgtttttcaggtttgtcaaagatcagatggttgtagatgtgtggtgttatttctgaggcctctgttctgttccgttggtctatatatctgttttggtaccagtaccatgctgttttggttactgtagccttgtagtatagtttgaagtcaggtggcgtgatgcctccagctttgttctttttgcttaggattgattgtcttggcaacgtgggctcttttttggttccatatgaactttaaagtagttttttccaattctgtgaagaaagtcattggtagcttgacggggatggcattgaatctataaattactttgggcagtatggccattttcacgatattgattcttcctatccgtgagcatggaatatttttccatttgtttgtatcctcttttatttcgttgagcagtggtttgtagttctccttgaggaggtccttcacatcccttgtaagttgtattcctaggtattttattctctttgtagcaattgtgaacgggagttcactcatgatttggctctgtttgtctgttaatggtgaataggaatgcttgtgatttttgtacattgattttgtatcctgagactttgctgaagttgcttatcagcttaaggagattttgggctgagacaatggggttttctaaatatacaatcatgtcatctgcaaacagggacaatttgacttcctcatttcctaattgaataccctttatttctttgtcttgcctgattgcaagtgttggccagaacttccaacactatgttgaataggtgtggtgagagagggcatccttgtgttgtgctggttttcaaagggaatgcttccagtttttgcccattcattatgatattggctgtgggtttgttataaatacttcttttactagagacagggtcttgctatgttgcccaggatggtcttgaactcctagtctcaagcaatcctcccttctcagcctcccaaagtgctgggattacaggagtgcaccactgcatcaggcaaaattcaaagtttcaaaatagatgaagtgaaaaataagcatttgctttcctagaagcaaccatacatatctccctgcctcaagtatgattctagccactgggttggagaagtgaaatatcagcattgttgtttgtttttgtttattctatatctattggtgacagaagtatagacattcttacatatgctttgcaaaattgtctctacgtatgtatgtatatatgtgtatgtatatacatattatatagactatatgatataacatatataatactttctacctaaatgcaataatgttatatatactgttctgcatcttgcttttattgttattgatttattaatatatcttggtcatcaccttcattccttttaactgctgtatataattgactattgtaaagatgtgccattatcatttatgtaatcagtttcctattgacatttagatttcagtttttgctactacaaccaaagctggaaagggcctggtagactaatataggggctttttctccaattgagatgggaagccactggaaattctggcatataggagggacattatctgatttacagtttaacaaggtcacttgggctgctatacccgatttacacatcttcaccggtatcttcgatggcactgggtgttatttaaatttcttactctttgtcagcttacagggaaaaaaaaggtatcttgctgtgcctcaatcatcatgcctttgtaaagtcagatttgacttgggagttttacttggtgggctgtttctcttactttgacgggtgttgtgaatagtgctgggactgtgtggtttcctgcttggccacactgaagtcctctgaaatcacctctctgaccttttctgtaggcctctggccgctccagaagggcacttgactgtaaggatgaaatcctgtctctgagctgcactcagtgtgaagtgccaccacctgcatccccctgtctcaggtatggttctagccactggcttggaaagatgtgtcataggatgtttggggacttattttgttgttttccaccagtgacaactgtacagccatttttaatcctataaacaatataatatgcacaaataaaacaatataaacaaaaggtcttaggccgtgacattgtacaggttggacagatcaaagtgcttttccacagattctctcactgttactctaacagcagttccataaggaagcttgtctttcctggtttcataaatgaggagcctgagaatgagagaccttaggcttgctcctcatcagacttgttactttattagaggttgcaaagcagtacctgtaggttaaattcagccctcagactcatttgtttgcttcctaatatttttaaattgtttgacattggaatacttattggtgggtcatttattctctgtccagacatagcccccagcatgctccagttacttagaaaatgattgatgtaacttaattttatctacccgggacctaaaggcattaaaatttgcaacccatcaatgcttgctgtctgccagattaaaaaaaaaaaaagaaataaaatttgcgacgctttcaaatcttgtctactttctactgtacaactgtagagtcagctgcaactcctgatgtagacccagaaataaaccagccttagccacaaaccctccacatcagatgaaaagtctcgttccctcttctttctgttttaataaaagttaggaaaggcctagagctttggagggcaaggaaaggcctccttgccgtcctgccaaagctctaagatctgccttcctcacccccttatcttatcgtgagggtcagagccagatctaccccatctgttcttccatcctgttccaggggagggtataaaatgaggcaattttgtagagcaaattagatcagcttcctcttctcagtggtgctggccattctccatccatttgctctcaaaagatcatgagctttttgagtgggcattctcctctccatccatgtgtagctcagggcccccatctctgagcatcttcctcactgggttatgctttttatatttaatatatataaaatgtatttaataaataactttatttataatattaataaataaataaactcatttatttattaaatacattcattgcttgccaagcactgttctgggctctggggattcagtggtgaataagacaggcaagttccctgtcttcttggagttcacccgctagtaagagttgcacacattaatcaggtgattgcacaaataaatacacggtagagtgttgtaacaatgaaatgcatggaaacctgctgacccctctaacacaatctgattgtgatacctaaaagcagaaaaacaacaatagtacccggcactattaatatgttttacaaattaattaatccccacaacaaccctatcaaacaggtaatgtcattatcatcctcattttacaggatgagaggtttataaccactgagaagttaaataacttgtccaaactcacatggctagtacagaggatgcttccattcttggttgagcagccaaatttcctgctgaatttcaaaatgtgccagaatcccatgataataagacagaagaaactgggtttacccccagcgggtaggatttaggttagacaccaggaagaactccttggcaacatttatgaacatatgagagaaaggaatcacttttctgaggatttccttctcccctgaattttttatattgaataaacaacattgtaaaaatagaggagttatttcagaaaaaagatcactcattttactttgtgaattatattccttttttcatctttctgggccagattgagactgtgttacatagtggcatgaaaagggaaagaactagattttgttctgcccacagcagcataaaggcaaggacatgtaactagcagacctcaggtcctgatcccaggcttccaacatccagagtgaccccagcatactcagagatgaagccagctcttccacagtgggtgggcccttctgtgggcttcagcagagggagctcgtgaccttcttactgttccaggccactcaaggtgaagcagggtagaggtgaggctgtgaggattaactgctatttcagatgaaagtaacccaaagcatcatgcacccaggtactctggaggaaacaggaaagggagaaaggggcagtcagtaaatgtcaggccgagttagctgaatgattgaaagggcttccagatcaatggttaggatcacaagatccccactaccttaccctactcccactttgatcagctccaagtcatgggctggaggcgcggggggctcagggcaccaactcctcaggtatcttgggatgtcccagcctgctctggggagatccattagtgccctctacaccaaggatttcctttaggcctaataaaatagatttcaggtatgaattgctttgaagtttgcttggtgttttctctataatctttgttttttattttgattctcacattcaccttacaaataggaaggacaggtattattatccccacatttacttttagattacattagaatcacacagtagcaagtcgagcctaatgctaactgaggtcttctgatctcttaagccccagtcactttcccttcgttttctcagagcgccttctgaatcttttcaaaactttccaccatctaagcatggaaaccctagaccacctctcattctcatagcttagaaacaagtttgagaaatctccccagttcctccattgactttgtgggcccacagtgagcccctctgtgtccctggtggaaggcccactctctcaggcttggtcaggtgtaccgggacccagaacttgtacaatgccctgataagcttcttagaggaggtgggtattagccacgatcggatattcttcccctgagctgcccttcacacccgaccctgccttgaattaggattccataggagagctgggggcaggagaatggggtgttccctgctgtccagcttcagacccactctttgagatattggattctgacaagtttccagagctgagaagacagccagatgtcaaggtctgaaggtaaatgatgtaattaggtaggagggatcagctggggtgccagttcagctctgttacataacacaggaacattagaaagagagagaccctctgaaatttctgctggggatacgagtgggcttgctgcaaagtgttgagttcatggcaaggatcggggggctgcagggagatagtggaaagaaaattatagaaatcagggacaaagaaggaagttcacttattcctacttttccttttgcttgtccctctcttgctttttaagacaagtacctttgcatctctgattagtgtggcatgcaagaaagaaaggggagttaggaggctcatctgcttggctactcactagctgtgtgatgttaagcaagtcacatctcctctctggacctctgtgttttcatatctcagatgaggagttgtaccagacagattccatgggttactcagctcacttctaatatatcatatgcaaaactaatcatttccagttattgttttgtagtagtttgtggacattaattagagatttaataaatagttacttgggctgggcctcaatgcccttctttataaaatgaggattctttgagggcctttcatgttcttccctccttcattcttgtataaaactaacctttctgttcagtgcttttcttttttttttttctttgagacagagtcttgctctgttgctcaggctggagtgcaatggtatgatctcaactcactgcaacctctgcctgccaggttcaagcaattctcctgtctcagcctcctgtgtacctgggattacaggcatgcaccaccacgcctggctaacttttgtatttttagtagagatg

SEQ ID NO: 6719 - DNA, 6000 bp, Homo sapiens
gaagggatctcccaccatgtaacctgagagaaggggggatgggacaggtgtgggtaagtctgtagatgttgggaagcaaatgaagaagttacctctgatggcttccattttttccatcaaatatgatgtagtgtggagagtgggctcacaacgaggccatgtttgtcgacggatagtgaggacactctccaaagaaacccggcccctaagatttctgggccacacacaaggttcatttgacattggctgatgtgaatttacagtcttcctcatggggtccccttttttcttagcaacattcagctcaggtacagatgagaattatgttcatctagggtgagtgtggccagaaggcagggcaggggagggaataagaaaatgagtaatgaattatggaatctaagctggataaggagaagagtgaagacagaaagaagctgatggctagagagagagaggggctgagctcatgggtatccattccagagaggaagcagaataattgcagcagaggtgtttgagcaagggagctggggcaggttggactggggagagatgtgaaccaatataataggttagtgtcttttctatataaagagcaaataaaatcagttttaacaccaagcctccaggagattttggggcaatgaacagggatagaggaaatacagctgaaatgtacaggaagaaatgcccacccatgaggggccctgagatgggtgacacggtggtcaggccaggcttgtaggtcactgtgtctgacctgggctctgggaactcaacttctgggaacatctcatccagaagctggatttaagggctataaatatctccttaagtcctcactaggcacccgcaggtgctttactcccaaggaaatgtatataacccttgaggtgcttaagggttctattcagaagacaggaccacagatgcctggctgtttgaggccacggttgagccctccttcctttgtttattcagcaggtctttgtggacttagctttgttttcaaggaagggagtgccctgatgttagataatgatgtgctgcacagacccgcatgtgtgttagtaccagcatcacttttatctgtaaatctttgaggtccctgctggccgtgactcagtgacactgtgcctcctagttcagctagatgaggtggggacagaggggggggggcctgggtcctgttcttggggaacttttagtctggttgatgggctgggatttatatctggggaaccttgagagcagcccaggtctgtagaaggtcagagggatgggagatgatgaggttgcagtagcaaaggaagacttcttcaaggagctggcatgagtgttatctaagaaatagattagatagctgggcactgtgactcacacctataatccggcactgtgggaggccaaggcgggtggatcacctgaggtcaggagttcgagaccagcctggccaacttggcgaaaaaccatctctgctaaaaatacaaaaattagctgggcgtgatggcaggcacctgtaatcccagctactcaggaggctgaagcaggagaatcgcttgaacctgagaagtggaggttgcagtgagctgagatcgcgccactgcactccagcctgggcgacagagtgaaattccatctcaaaaaaaaaaaaaaaaaaaaagaaatagattagataaagactgagattccagccgccaatgcctgccccatttaagtgcaaggtagatggcacaatggctagaagagatgtttccacaaggccttttatttttccctttccatgcccatatctcgaaagagaaagtgtaaggtcggtttcccatgtcttgggcttggtgattgctgtgagtctgggagggtcaggggctgaagccattcttgacaaggacaagagcatttctaccaccctgaggctttggggcccttcaaaggggcttgctgggcagaagctctgggttctggaggctgtgctctccagatttctcaggagtgggtgctggggttgaggggtgggggttggttcgagctcccagcttgcgttcttacagtctttactcctctgcgtgtgtatgtgtgtctcctgtgtctctgtatgtatttgttggtacgggttgtgggtcttttgtgtgggtgtgaatctgtgaatgtgtctgcatctctctgtgcttgtctgcgctgttggcctggcttgattgtgggtctctgttgcgttactggtgtgtgtgtgcccatgtccgggtgctcatgtgtctctctatgggcctgggtgtctgtctctatgtgtgcatgtgctcctgggcctgcagtgaacagcgtcacgctggccgtgaacctggtgggctgtctcgcgtggctgatcggaggcgggggagccaccaactttggcctcgcctttctctggctcatcctcttcacaccctgctcctacgtctgctggtttcggcccatttacaaggccttcaagtaagtggttggtgctatccgcagtgcctagccgtctctgcccatctcccctgtctcttctccatatcttttctcacttctttttttttttttttaccctcccccaaactcactttcccttgctcacctttggctcagattgctaggtagggcctgggctttctgggggtgccaagttgaggtgagagggctgagagttagtttctttcctcctcactctacccttgggtgggggaaatatagacagaccaggcctattttttcttctgtcatccccttcctcaggcagctgcatgttaaattttgcctgtggggctgcctgtcttggtggagctgcccatcctagtacctgtggggctagccgacttggtgccaaggacaccatctatccatgtgccaatgggaccagccagccatgtaccattgacactgttcatgtgcaatgaggtcatccaactgtgtgccaaagggaacacccatccacatatcagtggggcttgctgtcttggtgccagtgggtgtctacctagtgccaaatggcattttcaatctttgtgccaatgtgactattcatcaatgtaccaaggctatctgtcttggtgccagtagaatatccatctcaatgctaatggggccttaaatctctttgtgccaatcaggccatccatctaagtgccaattagctactgttttggtgccaatagggtgtccattctagttccaatgagactttctatctctgagcctatgagaccatccatccatgtaccagtggagctagctgtcttggtgtcattgtccatccccttgacaatgagactatttattcctgcctcagtggagccatctatttctatgccaatgaggccgtccatccatgtaccagtgggtggtctgttcatgggaaatccctccctgtgtaatgttgcaacacacaggtctaccacgtggaaacttgcaaagatgtatgggtagaactaaccccttctgacctctcaattaaggcctttaaatgtcttctgtccattatgcacttaaacttggaagggcttgggggccttgaaggcagggaagccctggccctctgcccaggtgacgggagccacctcctctgccgcaggactgacagctccttcagtttcatggcattcttctttaccttcatggctcagttggtcatcagcatcatccaggccgtgggcatcccaggctggggcgtctggtaagaggcaggggtgtggcctggggctggcaggggtggcgttgtgggtgtatcttttgcttacctttgtgtgctaagctgtctagcctatggggcctgagtgatgggttgttgggagagtgagaggattcgggatagtgtagtagtacaaccatagcatcagagggaaggagaacctggcagtggtttcttgggggctgaggggtgtcagggattataggaaaacctgggggaagaaagtgttgtatctgaagagcacctctgagccacagggatggggtcttcttgagccactggcacaggttctttgggtatcagtaagatggtccctctgcatccagtgatatgtttcctccctgtggcaatgagacggtcccttcctctagcggggggctcctgggcacctcttatcctgcccgcagccccacactggcctcttcctgcagcggctggattgctaccatctccttcttcggaacgaacattggctcggcggtggtgatgctaattcccactgtcatgttcacagtgatggccgtcttttccttcatcgccctcagcatggtacgtggtcccctcaagggtgagaaggtggctttgggaaggggccatgttctgaaacaagccctcctccaagttgcaagaggatcccgaggtcttccaagggactcactctggaatggcctgcaggactctcctacagaggcattcatggggagggagcactgttttttttttacagatgggtcccatctatttcctggatgggctgccttttctctttgattaacccttctttacgctctttttcctacaggttcataaattttaccggggaagtggggggagtttcagcaaagctcaggaggagtggaccacaggggcctggaagaatccacatgtgcagcaggcagcccagaacgcagccatgggggcagcccagggtgccatgaatcagcctcagactcagtattccgccacccccaattacacgtactccaatgagatgtgaaccagccacgcctaccaggtggcagagctggggccattgggacagggggctcaagccacatcgtcatttgtggttaccaagcagggttcccccttcccttttctccttccctactttgtacaaaggaccagagttatatatatatatatatgtatatgtctgtaccccagcccccacctttcagattctgctcttggcactcagctgtgggctgcacgtggagctgtcccgtgcggtagtagctgtgtctgtgtcccctcgtgaaatagtgtgcagtggaggtctcttgtggtgctagatgtgtgtttagagctaaaccagcccccacccccaccctccacctgcccctcttgcctctggcccctctgaccctggcccagggacccctcacggggccaggggaggcatagcagaaagactggccccttcctagggttatgagctggaactgtttctactttcagtcttcctgggaagtaacagtacttagcactcttggtggtgggtgggagggtgggtacaggccagggatattcccttgctcttttgatccctccaggcctcgcctccttcagcctcctcctccctcatctgttccctgatgtcacattccctgtgcaatcttcccttgcccatggtctgtctatctctttcctatgtggcttttctttgtcttccccaaggctgagtgtcccagttttatctgctcctgagactgagcccagatccccaaatctaatctgatttacagttcaaggaagctgatggggagctgggccttacccctgatgtaggaggggcacacagctgggggtgcagagcccacctgggtacctgacccccaggggatgaaaatgcaaggatgagtctgcttgggcctgagagtttgatctgcaggggcaggctcatcttttctctcccctgccttctcctccttctctccccagagcccccttgagcccctctgcctatgtccctctgcctcctccccatgcccccagttgctgtggcttgattctgctaccctgaccccaccatgtgccaggtggcatctgccttactgccttccctgaggagctgggacatgctgggcagttgtcagatgtaaaggcacagctggagcagagggcatgtcagtaatgattggtccctggggaaggtctggctggctccagcacagtgaggcatttaggtatctctcggtgaccgttggattcctggaagcagtagctgttctgtttggatctggtaggacagggctcagagggctaggcacggagggaaggtcagaggagaa

SEQ ID NO: 6720 - DNA, 6000 bp, Homo sapiens
ttccaatatccaccagcctattcctgttttcaaccttcagattctttttcttttctttttttttttttttaaagagacagggtcttgctctgtttcccaggctagagtgcggtggcatgatcatagttcaccacagctctgaaatcctggcctcaagtgatcctcctgcctcagcttcctgagtagctagaactataggcataagccataagcctgacctagattcttttgatttgttctatttttgtttttgtgtttgttttaacaaatagagactgggctgtgggtctcactatgtttcccaggctggtctcaaacttgtgggctcaagcagtcctcccaccttggcctcccaaagtgctgggattacaggcacgaaccactgtgcccagccttggcctagattcctgtagaatctcttttgtctggtatggagtgcacttcattttccgctcccatgatataaactgaatgaatatgtacataattcattgcaaagtcatttcctaaaaggagtggctaatctgaaacactctgatgattatcaggaagctttcttctacacactcctgctttcagggcagtaatcacaatggcagatgtaactcatcacactgccagagaatacaaggcgtccttcctgtacctgttcagcaagctgagctgtgaccctcttccctttgcttcaaaaacatgtccagcagtgagtttgagccttgaatcgatggggtctgaaaatgggaatcagtagtttaattctgctttatgttcttgttgcagatttatgttcctctcatgctggttaatgcagctgacgatccgttggtgcatgaaagtcttctaaccattccaaaatctctttcaggtaagtgtttcttcctgctgccctctcaacagctcagcaagttgccacagtaaattctgtcaccttcaccatgctgtcatctcctggagaccaccctctttagggaaagacatctcatagcagtcagtgttcttattctgtgtagcctgatagtcctcgggctgtgatggggcttgggcatcaggcctccctcgtgttcctcccagggcatgagacaggaccaccatgtatatccatagccagtagggctttggggagtcacttgaggttctatgagattatctcagggttagggttcccctaagtttgaaagtttgacataaagagatatttagatttaaaattcgagactaggtgtgttggctcacacctgtaatcctagcactttgtgaggctgcaatgggaggatcgcttgaggccaggagttcaacaggagcctgggcaatatagtaagaccctatctctacaaaaaacttaaaaattagctgggcatggggaggctgaggcaggagaatggcgtgaacccgggaggcggagcttgcagtgagccgagatcacgccactgcactccagcctgggtgacagagtgagactccgtctcaaaaaaaaaaaaaaaaaagaattagctgggcatggtggcacatacctgtagtcctagctactcaggaggctgaggcaggaagatcacttgagtccagaagttcgaggctgcagcaagctatgattgtgccactgcactccagcctgggcaacagagcaagattctgtctctaaaaataaataaatagtaaaaaataaaataaaatttgacttgaaaagcaaaacaaaaaatccggttctgctatctcttgtgacagcctctccatctgcttgaaacatacaaatagaagcaactgggccaagtgtggtggctcatgcctataaatcccagcactttgggaggccgaggtaggcagatcacttgaggtcaggagtttgagatcagcctggccaacatggtgaaaccccatctctactaaaaatacaaaaattagccaggcgtggtggtacatgctactggagaggctgaggcatgagaatcgcttgaacccgagagtggaggttgcagtgagctgagactctgtcccaaaaaaataaaaaataaagtcaagctctaggttattatttctcaggatggccacttagcatgtggcgttgagagcttgggcatcttttaacacaacgtgcagctttaaggatcttgaagataaatgtctgtagtgaaaactcattgactccattgaattctcctcgttctctagtaaaaatactgtaaatgccatgaatcgctactcagagcctggcccccaccactaccatgggcatcacctgggaactttttaaaaatgcagaatctcagctcccacttcaggcttattaaatcaaaatccgcattttaataagatatcctaagtgattttgatgcacaaagttaggaaacacattgaatcacctggggagcttgagcaataccaacacttgggaattcccttccctcactcctctcccacctcccacccccagagattctgatttaattcatctgggccagcctggggttaaggagctttaagaactccacaactgattctaatatgcagccgagtttgagaaccctttagagttctaaggctttcttcagctggtgcccattcagctccaaagccaagctgtactctaaaacctgctagatgccactgtcttgcctgccccctctttggtgaacaaggcagagtgagtagaggttggatgcccacttaggtgaccctgcggggacagccaggctaccctagccagctcacctctgcacctcctgtcctggagcaaactagagaacagtaactcactcagctgcgtttcccctgcagagaaacgagagaacgtcatgtttgtgctgcctctgcatgggggccacttgggcttctttgagggctctgtgctgttccccgagcccctgacatggatggataagctggtggtggagtacgccaacgccatttgccaatgggagcgtaacaagttgcagtgctctgacacggagcaggtggaggccgacctggagtgaggcctccggactctggcacgctccagcagccctcctctggaagctgcgtcccctcaccccctgtttcaggtctcccatctccctcagtgacctggatctgacctcacaccatcagcagggggcacccaccatgcacacctgtctcggagtaggcagctcttcctgggagctccaggctatttttgtgcttagttactggttttctccattgcattgttaggcatggtgacaagtgacagagttcttgccctctgtccagtttcagcatctggttgcttttaagccaagtacatctagtttccctattaaaaatgtgtctgaatagcgattttgctttgccaccaaaaggcttttccctgagaacagtgaaggatgtatgtcattttgtggtggttgtatgtgtccttacatagaccttaaaaagagctcacccttccaggccaatgctgaagacacagctccgcttgggagcctgagaacccaggcttcccaggccagagtgtggcttcttaaacggcaaaggaaattcctttgagtcacaagccaagttttcgccctgtctcctgagaccatttccctacgctttgctgctgctgagagttacgtgaggcacttgttaaaaattcagcctcccaggtccctcccctcggagaggctgattcactgggtctgggaaggagcctggggattttaatttttcacaagtgccccagatgattctcatcaccaagcaaattttggaaatgctgttcaacagcgcccttaaattggaaacatctttgcagctcgttttattgaaattcataatcaggggtgtcctctagctcccacggtctccagagcagcaaggccggctatggagctgccgtcgtgtgaccacagtgtgatgtctcagaagggctctgggtgggctgagcatctgggctgtgccctggctctgcttttcaccctggacaaagtcgctgtggacttcaatttcttcacctctaaaatgggggacttggaccaggtagattgctgagctcactaccaggttcaaagttcaatgacaaactcagtttactgaggtttgagagaacatccctccaggggagcctgggagctgctctcccagtctaagcatgtagatatcatcgtttgccttttgtgtgtgtgtgtcccttatttgataaaaagatgttttgagttgttttttttttaagcactcacttgtaattttagtttttaaacccaagtccctctaactttgcctttgataccaaacaattcaaaagttggatctgagtttggagaaagatatttccaacctaagtgggtattattttgaaaccagatttttaatttaatagcctatatttgtagtctgttggataggtgtttccaaagtgtgtcttctcaagtgaaaacgcaactctaggtttcaagtactccttttctccgatcctgtggtacttgaatatccaaaaaccctgcactttgaacaatcagctgttgctatctggaactaaacagaactatgagtaaaattgcctggatactttaaaaagatatttttcctccttcatctcctttgactccaggacagactggaatataagtagtgggtctgcatggatgtttcagggatcaaaggagccacctgggcgcctgagtgccaaccctcagggccacaggtgggtgtggtttgggcacgggtccaagtgactgtgacgggacccgtgggcatgggtccaggtctgtaacctgaagaagttgttttctgacaatcaccaaatcatccgaatgacatcaaaagcagcccttatctcagagactgagatttctgtggtctcaacttcgctttggtataatttctggcactcaccagcctctatcattatgactttccccccagtgtattatttctctaataggtttccttttcacgttcttttagcacagactggcactttaccctctcagtttggaagttagcccctctcctctgttacttttcccttcacccaactacagctgtgatctagaacattcatagtcatatttctgctactactaccttcatttatcaagactttttatgagaataggtaaaccaagcaataacttcctaggactgaatcaccaccccagaagagcgagaggctcctttcatatgcctgaggccacaccccttaacctgttctgacaaaatagtggctggcccatgtaccagctccattcagaaattcaggaagagaaaagacagccctgttgtcacacaaaccggtgtgggggagggtggagcctggtctgcacggcagtcctggtggcccctgtggaggacaggcagggctggcagcatagcctttgttgccacacaaccggaatttgctcccccaggactgtgggagccagtgtcccagctgaaatctttttagtgtgtggctctgaatggcactcacattccattttggctcacatgaaactaactgaagccctttgttcaagcttcaggctcttaggcatggaaatgagaatgtgactgtggctgtcttacaggaaaattcttgtttgtccctgaatgagagcacagaggcattgaattcacagagctgcaaacttgcctgataaatgagggagtggcagtttatagataggtcatcttttttccttcctccaggtgtccttgcctttcttcccaaagtcattcatttctgatgagtatatgaatccccctcttgctagtaaggttctatttgggctaaaacaaggctgaatttttaaagagtatttgaatatattttagaatcaaattgaggctataaattgcatcaatctggacaattccattgcaggaataatatgttaaaaaccaatggggagaagcacccacatctctcctgtagcactccgtgtctcataagcaatttgaagacacttacaagtaactgattccagtcaaattaggattaactgactcaaaaaatggtgtcaagtttctttaatgtttttatgttagaagtgagtttaacagacttgaagaaaactgtta

SEQ ID NO: 6721 - DNA, 6000 bp, Homo sapiens
gagtgcagtggcgtgatctcggatcactgcaacctccgcctcttgagttcaagagattctcctgcctcagcctcccgagtagctgggactacaggtgcgtgccaccacgcccagctaatttttttgtatttttaatagagacggggtttcaccatgttagccaggatggtctcgatctcctgacctcgtgatccgcccgcctcagcctcccaaagtgctgggattacaggcgtgagccactgcacccggcctcttctacattattaaccagcattttttggtaaagaaaagcttccttttcaccccttattttttctctctctctgggtttcactgtggactaatggattgtttttaaatttaatgtattaatccattacttcattatgttttaatgctcagattggtcatcaagctggttccgatgtcctttggacatggcctcattagtttctgatcattgctttctggcccaacaaaatgtctcatgtttatgtcgtactttcccttacattcacccaaagaatcttggttctcttattagagagtaggattaggaaaccaagattggccaggtacagtggttcatgcctgtaatcccagcactttgggaggccgaggtgggcagatcgcttgagtccaggagtttgagaccagcctgggcaacgtggtgaaacccctttctctacaaaaaaattacaaaaattatccgagtgtggtggtgcatgcctgtagtcccagctactcaggaggctcaggtggaaggattgcttgagcctgagaggtggaggttgtagtgagctgagatcttgccactgtactccagcctgggtgacagagtgagaccctctctcaataaaaaagaaaaaagtaaacgaagatttaggtgctagatctgctcacccaatttttgtttttttgggacggagtctcgctctgtcccccaggctggagtgcagtggcgcgatctcggctcactgcaagctccgcctcccgggttcacgccattctcctgcctcagcctcccgagtagctgggactacaggcgcccgccaccacgcccggctaattttttgtatttttagtagagatggggttttactgtgttagccaggatggtctcgagctcctgacctcatgatccgcgcacctcggcctcccaaagtgctgggattacaggcgtgagccaccatgcccggccctgctcacccaatatttttatcaatagcttgaataaaggcataaggaatggttatcatgtttacagatgaccccatactggaaggggaagccaaatgtatgataatagaatcagttttcaacatgacttcagtgggatgacatctgagccagaaccactagatttatttattttattattaattaattaattaattttttttttttttgagatggagtctcgctctgtggcccaggctggagtgcagtggcgtgatctcggctcactgcaagctccacctcccgggttcgcgccattctcctgcctcagcctcctgagtagctgggactacaggcacccaccactgtgcccggctaatttttttttgtatttttattagagacggggtttcaccatggtctcgatctcctgacctcgtgatccgcctgcctcggcctcctaaagtgctgggattacaggcgtgagccaccgcgcctggctggtaaaactctttattggaccaaagttgatataaaaaaaatagttctggttgtcagctgacatgagtcagcagtattctgtgactcaagttgcattcattcattcattcatccagtacttactgaagtcctgcttaccatgtgccaagcactattctagaggcttgagatacattacttaacaaaccaaataagcaaaaatctctgccctctcagtcagcattctgggggagatgggatgtcagacaataaagaaaaaccataactaatatatcgtatgttattcagtgatgagtgctctgaaaaaatatctcaaggtatttttaaggagataaggggcatattaggaggaagttcagattcttcaaggtgataaatgagcaaaaggaagcaagggactcagtcctgtggttatctagggggagagtgtgccaggtgagggagcagccaggtcaaaggccctgctggttcgggctactatatatgtacctggtgtggatgagtgaggggaaaagtagtagaggatgcagtggtactggtggtgaggatgacatggagggctttgcagaccactccaagtaaggtcattgtgaatgagatgggggaacccttggagggttttgagcagaggaaagccctgatctggcttgtgttgtgtgttgttttgtttaagatggagtcttgctctgtagcccaggctggagtgcagtagcacaatctcagctcactgcaacctccgcctcccaggccccggttcaagcaattctcctgcctcagcctcccgagtagctgggattacaggcacacaccaccatgcccagctaatttttgtgttcttagtagagatggggattcaccatgttggccaggctggtcttgaactcctgacctcaagtgatctgcccgcctcggcccaccaaagtgctgggattacaggcgtgagccaccacccctgtcctggcttgtgttttaaagactcactccagctgctgtgttgagaatagattgtaggggaaccaaggaggaaacggggagaacagttaggaggcccttgcagtaaccaggagaaagagggtggtgcctgggccctagggagctgggaagtggtcagattatagattttctaatggactggatgtgaggagtgagataatgagaggagctgagggttttggcctgagcaatttaaagatggaattgccattaaatgaaatggggaaggctgtaggtggagcacatttttgagaagggggagagatcaggagcttagtttgggacatgttgggctcgagatggttttcagacagccaagtagaaatattgaggccgggtcaggtgtggtggctcacgcctgaaatcccagcactttgggaggccaaggcaggtggatcacgaggtcaggagttcaagaccagcctggccaacattgtgaaaccctgtctctattaaaaatacaaaaaattagcggggtgtggtggcataaacctgtaatctcagctactcgggaggctgaggcaggagaatcacttgaacccagaaggcagaggttgcagtgagtggagattgcaccattgcactccagcctgggcaaaagagcaagactctgtctcaaaaaaaaaaaagttgaggccttttggagttaagggctgagcagggctggactaggcggcagataggggtttgggtatcactggctgtaggtggattgaacccatttagagtaagcatccaaacctgggcaatagtagcactgtgggtgcttggtgctgtccatatcccatgtggaattctgtgtccagttctgggagcccctttaaaagggatgctgctagcctgcaccatgtccacagaaggtgatggaggtacagaaatcatgcagcatgaggaaacttagctgtaagaaaggagacctgggaccatgtgggtgctgtgcccaccctcttgacagcatccctgttgtgggagcagatgtggcagaccctgaaagtcgggaggagaggaaaagaggtgctctgaggaggctgattttggctgggggtgaagaggagctttcctgcaattgcagcaaatttatggagcgatggtctctactgccatggaaataactagcagaggctttcactcttttggactcttaactacaggaggaactactacatttttctgtaatcctgtgcacacttaggaaaagttgaagtagctttcccaaaattacttatcctttgagattattgcttagatagtttctatgttttgtttgtttcttaatgctgttgggatccactaaattgatttcagaatctgctaatggtccaggctgcagttggaaacccctggtctcagcagagctgaactccacccgtggagatgttaggagccaggaggattaggggtgggtgcctctgggcttccactccagtcttaggggttcccttcccctgccgggtcacgtgcaggttgtgaaggttttacctcctcagcagtacattaaatcctattatcccacttaagctaatcttgcccttcccccacccgagggcttcgcgtggacagaatattaagcggacaagcccgcagggtgcctagactaagtgctgagcttgtagtgaatgcccagccatgacttgcagtggattgacctgtgcaaaaattggactctcaagctgctagccccagtgtcagcacgagctcggccgagttcatttggtcgcaggaacaagggggtcgccaggagcaagagcggagggggcgcctaaagggaggagaccaaggcctaatcaccatccgccccctaactccctaggcgcatagcggggacgcagcgtgtccccaaaccaacgccactagcagagggtcccagaggagccggaaggggccagggcctgggcggcggtgggagggtctgagcagtgggggcggggagctgggggtcggctttcgtccgcgtcccagcgctccggcggccgccggggctactgatcccgggcttggcccctgcggcagcgccccgagctgccgcccctcgcgctgccagcgcccgggaaggaggaagggggaagggggcgggccggccgggctcacggccgacttcctccttcagccccgccctccgccgcttgcgggtgagctctgcccaagccgaggctgcggggccggcgccggcgggaggactgcggtgccccgcggaggggctgagtttgccagggcccacttgaccctgtttcccacctcccgccccccaggtccggaggcgggggcccccggggcgactcgggggcggaccgcggggcggagctgccgcccgtgagtccggccgagccacctgagcccgagccgcgggacaccgtcgctcctgctctccgaatgctgcgcaccgcgatgggcctgaggagctggctcgccgccccatggggcgcgctgccgcctcggccaccgctgctgctgctcctgctgctgctgctcctgctgcagccgccgcctccgacctgggcgctcagcccccggatcagcctgcctctgggtgagtgccggggacccggggacgcgggccgggggaaggaaggctgccggggacgtgcctcgtgcggaggtggccgtgacaaaggaccaaggaggggacctgtcggaggcacgggatccattaggaccccttcttttttcaaggcgctgcgcggagggagggagaggagaggggagctgtggggccgctggcccctttcttcagttttctttctgcgtagggatggggtctagcccgctctgtcgtcccccctagttcccttaggaggatgcactttcggcggggtccgcctgcccatctacttgtctttgatgctgaccagagccgaccgcggtgccgcccccgagggcggctcggggtagagggaggccactgcttgcagtcctataaacactggggttctggtattcccagcaagtcgcagcagggccgggagctgtggtgggcgggcaggcgcccgatcctccctctccgcccctccatccctggcttgccagtgcagccccaagccccagcatggagagacctccaggccctgggagcgaccagactgcggatgggggcagctctgggcgctgacattcccaagtcctgggagcgaacagactgcggatgggggcagctctgggcgctgacattcccaagtcctgggcgcgacccctcctcagagtgacctgggagtagcatcctggttggctgggttcctttcctggtcctcacatctgcttctgtggccacctcctgtttcagccctccgcccttccctctccttttcccttccatccggttgcttctccagc

SEQ ID NO: 6722 - DNA, 6000 bp, Homo sapiens
atataggtgtgtgataaggtccagtggggtgggcagatggttgggtcctggcattttgtagggttggatgagtcatgtcatatctaagacccttgtttcttttttttttttttttttaatttgagacagagtctcactctcactcaggctggactgcagtggcgtgatcttggctcactgcaacctccgcctcctgggttcaagcgattctcctgcctcagcctcccgagtagctggactacaggtgtgaaccaccacacctggctaatttttgtatttttagtagagacaggatttcacgatgttggccaggctggtctcaaactcttgacctcaaatgacccacccactgtggcctctcaaagtgctgggattacaggtgtgagccactgcacccggccatagacctctgttctcatttgtcaagtaaggaaagtaggtcaagtcattcattctcaaattttaagcatggtaatctgtttcattaaatgacaacttagctaaaagcccagtatatagagcaggtactctgctactctggagctactctgatagccagcaatagggcatctgaaatccagccctataggactctgtgatgcctctggcaaactcttgaggctgcacagagaactatttggaaaccattgttttcaatgaagtctcagctgtcagttgctatgactgattactgattagatatgtgtgaaaggcaagtaaggacatgtaaaccaatacttgaaacatgttgaacctagaaagaaatttgaaataaggaaggaggagccagtctttattgagaacctagtatgtgtttggtgctctcacctctgttctttaatttaatccttacaatattcccatgagtcgagtcttttcatccttattttgcagatgaggaaaccaagacccttacaggttaactggctaagatcatcagcttgcagtgacagaaccggaggtggatccagttctgtctgcctccaaagcttatgctgtttacattatgtgatgcagagtagtcttgacattagaaaaaaggggactattgggaaagggaattgctccagttagggggaattacaagtttgaactatgagccatcccgaatgtaaacatcccagtacaaacagctcagaatatggcaccagagccatggtcacaaagatttaggatctgtcaacacagaggcagtcaatgaagtattgagagtaaacagagagaaatggtcacagatcacatagaagtaccaaaccatgcatagagcaagaagacagtgcagagaagatgagcaaggtgacagaaaaggctttggattttggacaggggaatggtaattggtgataagagcagtaaagaagaaagtgctgaaagaacgaaacagtgagtgtagatcatatgttggacagggacagacaatggacggtgactatgaaggatggcgactatgaaggatggcagtatcaagggaaggtgtttccctgttagattgtggtgtctgcagaatgtttgaaagcagaggcaaggctcgagcatgattccaccttgtgacaaagtgacacaaagaattagcaaggatttactaagcactggtcttgttgtattagtatagttataacatttatacagctatgtttttaataaaattaaatggcttccatgtctcaaaatgtggtagagaaaaatgactttgtagccagtagagtccagtctcggtgattgtacctggagtccaggaaagaagccctaagcacctaagcagttgtgtgatttgtttgtttgcttgttttttgtttttttgagacggagtctcgctctgtcgcccagactggagtgcagtggcgcgatcttggctcactgcaagctccacctcctgggttcacgccattctcctgcctcagcctcctgagtagctgggactacaggcactcgccccatgctcggctaattttgtttttgtacttttagtagagacggtttcaccgtgttagtcaggatggtcttgaactcctgacctcatgatccgcctaccttggcctcccaaagtgctgggattacaggcatgagccaccgcgcctagcccagttgtgtgattttgtagatatcatctcttctaggtggaaagagatgtgcctctgcttcatgcaatttttcatctatcatttggcagggggcagaatttgtttccttctgtttcaaggttggagtttaagaactgtataagttcaggtgcaaatgtgctatataaattcaagtttaggattagtgtggtaaacttgctaagaacttctttttcccatccgtaggaagcagaacatcagagagccatgcagagacgtgctatccgtgatgccaaaacacctgacaagatgaaaaagtcaaaatctgtaaaggaagacagcaacctcactcttcaagagaagaaagagaagatccagacaggtttaaagaagctaacagagcttggaaccgtggacccaaagaacaaataccaggaactgatcaacgacattgccagggtactgcattcgggggacagaggggacccggccttgttcaaagctgagaggctcgagagacagtagctgttcacataacagcatagcttcagttcatgggcaaattagtgccctcctctatgagaaaccatatctgactctccagcatgagggccttgcccgacctgaggtggcttattccatggcctaaattactagggagaggaccttaactggagcctcctatgaccttaaagaatttgtcttcagccttaaagaattcttccagatctttttcatgattactgtgaaatataaattcacatcaagctgattaaatcgttgatttgtatgaatcatctcaagcgaggggctttggtgaggactaagagtttaggtgttctgtgctgttgcactaagataatattatgcacacctgagaactggtagttgatgtattatagttctctttttctccctttcccaacaaaatatttaagaggtccaaaccagctttgcaagtaaattctaaaaatgtgtaagtctaaatgtaacacatttccctgctagaagatacaaatgggggaagaaaatttgagatctgaatttctctgttaatttgtgaaaacaaattactgcctgttgaatgtatggttaggtcaggcaccgtggctcacatctggaatctcagcactttctgagaccaaggcaggaggatcgcttgagaccccatctctacaaaaaaaagttttttaattagccagatgtggtggcatgtgcctgtaagtcctggctactctggaggctgaggtgggaggatcattttagcctgggaggctgaggctacaggaagccgtcaaccactgcacactcgagcctgggcaacagagtgtctaaaaaaaaaaaaaaaaaaaaaagtaggtagtcatatttaaggcagagttaagcattgctgggttgtagtgtgaaatgataatgataactgtcgttatttttctaactttaataattatgtctcaggatattcggaatcagcggaggtaccgacagaggagaaaggccgaactagtgaaactgcaacagacatacgctgctctgaactctaaggccaccttttatggggagcaggtggattactataaaagctatatcaaaacctgcttggataacttagccagcaagggcaagtgagtattttttctttttaaagaatcaatgtcagaattagagtgaggaaaaagcagaggcaactgaaatgacactggaaatttttacttaaaatacactggatctatttattgcattagtcttttattttacctctaatcatttgtgtaattgcctaattccatttgtaagtgtatgatgtgaatagtgggtgggggatttcatggatgcttatcgctaagtattccttttgcaaaatatcttcttggggcctgtcaaggtggctcacacctatcatcccagcactttgggaggccgaggcgggtgtgtcacttgatgtcaggagttcaagaccagcctggtcaacatggtgataccccatctctactaaaaatatacaaattagctgggtgtggtggcacgcacctatagtcccagctacttgggaggctgaggcaggagaattacctgaacctgggagatggaggttgcagtgagccacgattgcatcactacactccagcctgggcgacagaacaagactctggaaaaaaaaaaaaatcttcttggccttagaaattaaaatcatgaaaggagatcatctgctggtcccagaatcacttaaggaatattatacaaatttgggtccccttgctcctctctatacttcctggggacaagatcacaggctctgattttttttcctgggtgctgaggaaagtctgatccagccttcttggcactggccacaaactatcagcatgcccatgttacagggagggaattgaaaacccagagaggtgggtgataagagcaggttttacttgcagggtagtttattatttattcctaactttttattttaagagttttcaaatctcagatcgaatgaatagaacaataagcacccatgtgcccttcacctagattcacccatttttaatattttgccatatctgcttcccatttccctggctcttgcatgtcctctgtttctctctttccatggaagactctctggggtcaggcatgggtgatggaagggatgaaaaacaggcccacctaaccctgcttgcagatctgactcctgtgagcttttgatgtgttttcattgttccttgtgcacttcctgactttctgacacaagatgtttcatgttcaacctgtagtttcccctccccagggccagaatgaactgtttctccaagcatgcctggtttctttgaatgaagaatggtatttagaaaccaagatctagaactaggtgtgttcactgccagatttgtcatggcctccaggccttctaagcagacagacctagattctcatttttttttaatgctgcatattattccattatgcagatagatataacagttgacttcagcagttctccattgatggacatttaagttgtttccagttgtttgttattattttttaaattctgcagcaaataacctcttgtacatatgtcattttgcaaatgtgggcatatttctgaagttagcacttcttgccttgattatcctaatagcctcctaacctgtttctttttccttattttcattcatctgtaattgctgtgctggcttaaacgcttttaaaaagtatttgatgacattttaattttttccctacacagctgaggggcgtagagtaactccttcactcctgggattcagtaccattccctcagctggcatacgaagctctcctagttacttgttaggtacttaagttcccagaaggacatgggaggattaagacactgttaaattcatgggagtgttctcaaatataatttaaactaaaaatagaagcaatttagtaatatttcccctgttttgcagagatattgcttaggctaattctaacatttgtttgccattttagagttggtatgttacttatgcttatgtctggaagtttggtttctgacatgtttccttcagttaccaatgatgaagattcagagtagatggttacttatagaaagtgacatgatgtgatttttacagagtctccaaaaagcctagggaaatgaaaggaaagaaaagcaaaaagatttctctgaaatatacagcagcaagactacatgaaaaaggagttcttctggaaattgaggacctgcaagtgaatcagtgagtctttgctttttgttttataagttgatttttatttctacatttatcacatctttgcctttttgtcttcatttctcttttctggatggttacttttagtattttttatgtatttatatatttttatgtgtagaattaggcctcatactcagagttaatttgtcataaaagagtttttcttttccttg

SEQ ID NO: 6723 - DNA, 6000 bp, Homo sapiens
gacagcactcacactcctccaggtattaactgactttttccccagcaatgtttgttttagggattaaagtttgtggaggagcctataatttccagactcatctgttcctttcctggcagccagcacatttgtcattctatttttcccaagtccctgataataccgttccagacatgttgatttgatggcatcagtcaacggaaagactctctggggcctgccgtaggccagaggacaggctctccgggccacactcaggggcgactgagccaactcttcacgccattcctttccttccctgcctaggacgaccttacagcccatgatcgcttttcttcttcttcttctgtttgttttttcttcctgttttctttttaagtactacagtgaccccttatttattcagcaaagaaatggactactccacagtagtgaattttcaaaataatgcccttcaagcactaaaactttaaacaacacatcttcaaaacagctttgctgaggtataactgacacactataaacggcatggatttaaagtgtacaacttgatatgttttgatatatggacacacccatgaaaccatcaccacaatcaagataatgaacatgtccatcattcccaaaagtttcctcccgcccctccctgcccccttccccaagcaagcactgatctgttttccaaatacgtctttaatgctacaagggctcacacacctccccaccttagaaaatggagtatgatcaacatgattgatcctttccttgattcagcattatcaccaacacgatggaaagtgatctcagatgtcatgaggatgcatgattgtttgccctgatcactaaacggcccattgttgtgctggcatactgggcagtttcaagtttgggagttttctccctcactgctagctgtctcagagcttagttcccagcagacaactcttgctgcctcgaaccctggcacactaaccaccatcctgtgacgttcccactcctcattctgcgacagtggttctttgctgggagagatttttgtctcccaagggacatttggcaatacctggagatctttttggttgtcatcatgggagcgggaatgctactagcagctaatgtttagtgactagggatgcgactgaacatcctgcaatgtagagtgcagtgtcccctacagagaattatccgacccaagatgttgataatgccaaggttgagaaaccctgttcaggatgacaaactgattgaaaactcaacaaggggaccgggcgtggtggctcacgcctaataatcccagcacttagggaggccgaggtgggtgtatcacttaaggtcaggagtgcgagaccagcctggccaacatggcaaaaccccatctctactaaaaatacaaaaaaaaaaaaaaaaaatacgagtggcgtaagcctgtaatcccagctacttgggaggctgaagcatgagaatcgcctgaacccagaaggcagaggttgcagtgagctgtgatcaggccattgcattccagcctgggcaacagagcgagactcttgtctagaaaaaaaaaaaacaaacccataaaacaaacaaacaaaaaaaactatgaggattgagtgattcacatttctgaatcgagagagagaaggatgggcagcaggcttgttgaagctggaaggccagggaggtcgcagactgaggaagaccctggtgtgtcccaggtacctccatgcaaccctactagagaggtggtctctggcttcctatggacaagctctaagggacccagctatggggcaccagagcccagcgttcagcagctgctcaatgaatgtctgccaggcgagactgcacccaaagcatttattaggtacataattgtggcagcactggctggccatggaaggcaaggcagaacacaaggagctggagctggcggaaggaagtcattaagtcagccagtggctgggatgcagcaaagccaggcagaaggtaagtgcagacccaccccaataaatgaggaaaatgagaagggctggctggccatgttaggatccagttccagtgcgaccagatatgtcaccaccacatcacttttagctcctccccccacccacagacaccctgtttgcctgtcatataaagaaggttttcccaaagtggtttagccagaactggaagggccccgccctgtgaagggataggagcctgactgttgcagctgcagtgagtggcggggaagcagcagcggccaggatgaatcccaggtgctctggagctggatggtgaagtatggacatgctttattcgattttgcattgacttaaaggtttaattattttaggagttcttgtagacattcctgaaaaatgcaggtaggcaaaaagaagaaaacaaagatcgcaaatgtgaccctttcattcggagagaacaccaatggaattttgttgtgcacccttctatgcacgtctgaatgttgtgtagacattctgcttacaactaggtgtgggtgctgctgccgaaggctttatttgctgtgcctgaggtggaccagagatttcagagaagactcccagagcaccccaaggagacaacaggagtgcttggagtcaggatgactgggtggatttaggactatgtgattctcaggagcctctctggattagccccaaatcaaggataaagagaggcctagctggactcttcctcccagagccctgctgggaaaatggagcccctttacagcccccacttacccatcaggccctgctcctctcactcatctccagacttctgtcacatgcccaagtcctgctaactgctgtgtaaaactggtaaggtgggatccagaggaccttgggcccctagggccccaggtcaggagacctgggctccagggccagttgagagtgataaagagaacaatacctgcccacaggacttgttgcaatgagataaaggcagaagtcaccagttgtggtcaaatgggatttttttccagagaagtctcacagagagtggctttcaaattctttttagcagcagaattgttgtaaaatacaatctcatgtgaaaccctaaaatgtgagacactctgggtgaagcagagagaggtgctcaactgcccaatcctgtcctcattcctccctctcagggaggcacctctgagaacccactttaaagaattttgccttatgcagattgaagaggcaagctggctggaagaaactgggaagctccacttcccaccgcctctgcctgggtggcagtcatctgagcctaggctagcccctccccctccaaagacccactgcgggctcccctggggccagtctccaggatgggtggggcacctgaagcagcaagtattgctatttttctgggctgacctttcttctaggcctgaggacaagtgggtaggtggggccagccctgtccctgtttcccctcaatggagttctcttgctcacagcctaaggaagaagcgtgagtcacttcctgcctcagtctgactgctggagtattgttctcccaactgtggctggcgctacccagtgtggcccctacaagtcttagttccttggcggaggggaagtccccactttgggacaaggccaactggacttatcttcccgctcaactttgaggacccagcattgttcctccagtttccagttcttgcagtgtttgtaaaggtgcccgaatcgtacctgatcccattcactaaatattatctccattttatagaggggtaaattgaggaagtccctgagaaattaacttgtctaaggtgtcccagcaaaaaatagtgccccagggatttgaaccggtttgctgattgatttttcaccagttgccttaagaattatcatgatttaacctctctgggcctcagtttcctcctctataaaatgcagacagtgatacatcaaaggtacttaaaggaaaatgtactgtacccacctcatggggcatgtggtgaggataaaacgggttgacacaggaaaagagctctcaatggtgcctggctcatagaaaacactcagtggattttttttttcccattacccgggaacctgtgttaaggaggccacaggctgatcctgtgcagccaggttatctcacagggagcgagaagagatgggcacaggctactctgcgaccttggaataacccagcctgggaagctcctggccacattttccttcttttctttctcagctcaagcagcgtcggcctcagccaagtagcacaaacgttttctagggcccagggagggagaggctccggctggtatattgcaagtagcttggattcaggctctgccaaacaccccagtctcttgcaggatctgaggtctgctggttgtgggactttgcgcaaattatttaaacgttgtgcgcctcagtttccttatctgtaaaatgggattaataatctcagcctgaaaggattatgtggattaaatcatgtacataagaaggagataatgtaaagtgactggcctggtgcctggcaagcggttggtgtctaaaaagaaaaaaaagctaaaaatattaaaaggaggtgggctacttctgctcatatatccacctgtctatacaaatgcagacgaagtcgtgactcctctaacagtaggccaagaggaggctggtcctgccgccgtgcagtcctccctcgacctgggagtggaggaccccaggtccgccgtccctgggcacttaacccggtcaggctcaaattcgtcgcccaggagtggggaagcgggggacggagagggccagtcccccaagagtccggctgaggcagggctcggagtgcctcccccaagcctttccctttggttccgagttcgggtctccgcggccgtcttcccggggagctcgcggggcgaagagccgagcccgggggcgggggcacggcagcggggcctgagggacgcgccgggcggccgcgaggactttgggatcgcctgccccacttcctacctgcccctaccaggagccggaggcagcgggcgccccagaaggccccgcagggccgccgcgcggggccggacgcgctggggcccacggcgctgggaacgcgggcccgcagtcgggcccgggcggcatgggcggccgaggggcgcccgagccgccgcggcggtcgcctggaaaagtttccccgccagggctccccagggtaagtagcgagggcgcggggcccggggcccggggaaggcaagcgcgtctgggagccgggcccgaggggagccggccgggccgggccgtggagctctgccccaggagcgggctccgcggcccgggtgctcgggccggggagggtcggggcactggcgccggtgcagccctgacccgggtcccccggggcccggctgcccgccggctttccggaactggccccggggccggccccgagggtggagctgccgggagcagacagggcgctccgcagcccacctgagcgcgccgggcccgtctcggccccccggccgtggctggtacttttccgcgtggggccagggcgagccctctgacctcaggaagcgcctgcggggcccctgctgggggcgggatggggagaaaattccgcaggcgccgggtgctccagcctccccgccgccaccggggctgccgccggctcgcccactccgcggccgaggagggcctgcgttccgcccggggaggggaggagcggccgggggcgaggcgggggctccttcgcttgggcctcgcccccgcccgcacacctgtgcggccaggactcgggtgcgggatccgcgggcgccggcggccggcgcaggtaggtccctgggctgccttctgccgcggcctggccgaggcccctgtgcccccgctgtgtggctggaccaaggggcggcctgcttgccagacaggtctgacggcagtcacttgtctggtcagaacccgctttcccatcatcctctaccccctggcccctggggtgcagaccctcatccaccggagagtgttgggattcctattc

SEQ ID NO: 6724 - DNA, 6000 bp, Homo sapiens
cacttaatatgagcctctgcctgacttgccatctggctgtcctttccagagccctacttttaacacacagacagtcagagcttgagtctgacctgctggggctgtctggctgtccagtgtagaacaagggcaggagagcctgtgttttagtcacaacctgcccaacctgagcaaacctgccccagattacggaggtgtgcagcaacactaccgatggctgttgatctaagtttttcatttctggtttattttgttgtatgtaacccgtcctgattcggtttcctgcctgggcccctaggcccgttccctactcctgagtcccagagcgtggggggtaaactgccagggccagccttcccctttctggacctcatgcttcctcatctgcaaaataacggcccaggacgagcccctcatcaggttccctcccagccgtgggaacccgtgacctctcctgagtgactcagcttctgtctctcgagctgcgcttttccgtcagggcctgtggcttgggattctcctttgaaaggtcagtgcctgcttgggggtgggggcgggccagcactcactgtttgcttccccaggccagctggaggtgatcttggaccggcggctgatgcaggatgacaaccggggcctaggccaagggctcaaggacaacaagagaacctgcaaccgtttccgcctcctgctagagcggcgaaccgtgggcagtgaggtaacatctggggctgacgcccagggagccaggtctggctagtccctgggggtggccggggggtccagcctagggctcgaggagcgtagttggaggtgggcaagagagagagagtagggctgaattcctggggtggggggaggcagtctggcgttttgtgtcccatctcacgcagcctggcaccttcctctcccagcagcgctctgtcacctgtgcccctcatgttcgtctcccactttcctctgtgctgccctcctctgccctgtcccagcattctctaagcctgtgctccaaccccgctcatctcatggctttctttgccccaccagcctgactttttctccaaactggcagccatgtttaggggcttgatctttcacagcagcaggagcggtaaccgagaggtaagggtcggctctgggagcggggaactagtacgagcaaggtgtagctgcgccagagcccaggtgacagagcccgccactcagtcactcgtgcatcagatagatattgagcacctgctttactgtgaggacccagagggacataagtgcagacagtgctgactctcccaggagtttactcgtgagtaggggtggcagagaagccatgtgtgtaaaaatgcaaggtagaaagggctttgtctcactgatcctgaggagcaaggtaataatgtgggctaaggagatcgaggtcaaggaggtgtcacccaggtgtggctttgatgaatggggtgtgatttgaagatatgaaccagggcacaggataggaggcaggaaagacaacaggctggggaatagcagtgagttccttagttatgctggagctatgctatccagtacggtggccagtagccctatatggctatttaaattacaactaaatcaagtaaaaaatttgctttcttattcctactgaccacacttcaagtactcaagtggctaagtggctgccgtattagaccatgtggtgtcggatatttccatccttgcagaatgccctcttggctggtgctgggctagagtgctagggggagatcagggcagacggcagagcaccttgagtgcctgctaagggatctggactttatcctggctaggaaaggtccaggctaaggaaagagctgagcaaggagggacaccgtcagaactctggtctcagcatgtcacgctgacagtacggagcaggttggatctgtgggaagggagactggaggagggtgacagcgggaggctgttcaggcaggacatgctggctgcttgaactaggccagaggctggagaagttgccggtggctatgaggacactgcccaggtgcgacggaagagggtttagcattacctgggaatgcagagggaagtgagagatgctgggcgcttggaagaagggggatgccagggacagaagtccagaatattcagcccaggcctgtgagtctgacgtccaggtgagctgctaaggagtagccctgctggcagagccccggccgcgctgggcctgagagccaggctggcactgtggatgtggcatcgctcgtgaagccgcagattacccagagcactctggattggaggtccgtgctccatggtgaggcctgcgtctgcctggctgccatcctccctgcactgtggatccatgtgtgaggggagacatggctgatgggagtgggttgctcatgatagtgttatgtgagcaaggaactaaaaagtagagaagaaacagcttagtgaagtagccctctgcgttaggggagacggcaaatgtccacacttgaagggttagcggaacctcgcctggagccaggcgtgcccttgagtccaggcacaccaggaaaggtctttccaaaacaactgacctgggtgtgcttttatcctgcctcgtcctctcccctcagcctggctttggtccctcaccaatatctcgggtcaattttgcaggtccaagatagccactctaccagctacccatccctcctcagccacctgacctccatgtacctgaacgccccggcgctcgctctgcctgtagccaggatgcagctcccaggccctggtctgcgctcatttcatcctctggcttcctcactgccctgtgacttccacctgctcaacctacgtacgctccaggctgaggtgagtgtccctcagcgtgacatgctgagagcagagttctgatggtgtccctccctgctcagctccttccttagcctccaggatgaggtccagaccccttagcaggtattcggctccaaacctccaggaccaggttttggcctttccttacccacacgcctccctgtgccagcactgcctctgggcagaggcgctgctgcatctccgatctctgaaagccctgcgcccacttccctgggcactgtctgtcatccaggaggacaccctaccctcggcggagaccgcactcatcttacaccgcaagggttttgactgcggcctggaggccaagaacttgggcttcaactgcaccacaagccaaggcaaggtgagtagggtggggaaacagagcacctaggaatggcaggcatgagcttggtaagactgggctgagattcggtgacaggctgggagaagaaagtgtcactccagggctttctggagagaaggggggaagctgtagacatgttttcagagctccggaggcctggcagggggagttccagacaaggtagatcgcttgagaacttttgttccctgagcagggacctctatcaagcaaagtggaaaacaccagaaatagaaaaccagaacccatcctgttgttactttgtaagctcatatcagccggcactgataaatgtccccgggtgccaggtcctctgctgggctccagtgtttcagaagtgaaccaagacatggtcactgttttcacagagctcacagctcagtggaacggttcttacccagagatctgtaggcaggctttagggttgagcaaatctcagcaagcccgtgagactggatgcacactcatgtgtaagaaggcatggtgttgctgagaggggccagccggaactggagtgcagtggcgtgatcgcagctcactgcaacccccgcctcctggttcaagtgatcctcctgcctcagcctcccgagtagctgggattacaggcgcctgcccccacgcccagctaatttttatattgttagtagagacggggtttcgccatgttggccaggctggtctcgaactcctgacctcaggtgatccacccgccttggcctcccaaagtgctgggattacaggtgtgagccactgcccctggctgagattcttaaagaggtaccaaattgtagatgaacagccacattctttagtgtctcggcacctagcacaaccctgccccttctctgctctccacaggtagccctgggcagccttttccatggcctggatgtggtattccttcagccaacctccttgacgttactgtaccctctggcctccccgtccaacagcactgacgtctatttggagcccatggagattgctacctttcgcctccgcttgggttagggcttcttgtggcctgaagagaaagttcattcacagagactgcctcttaacatgaagatcattggacaagccacacgggtatcccatcccgatctgcctcccagaactgtgacacactgggctctgccctcattttctgtttattgctgctgctgtgttttcggcgcaacccacaaacccagtgatgggtaaatagggcagacgccagtgagatcagggagagaaggcccttggtcagagtgggcagtgccaggctctgctttgggttgtgagtggacacccaactgggcacaggctcaggcacccatcctttttccaaacagggatatagaagtggtggaagcagacagaagaggtaagggaggctaagtgggtaacagcccagcatcagggtcactgtggcaacagcaggctctaggggaatcctgtggttatgtagagactccatgtcctggtgtgatgagcaggatcagagtgactctgggaggacaggggtggggacccagagttagcagtggggatggagcagtagaaggaatcactgtttctcctaggagtctgaaggcctcgctgctttctgtgatggctttgcagtaagtgccgcctggcctgcatgcattggctaacaggctgcagaatggcaggaaggactcgctagagattgtcatggccagagatcataggtcacttcaggtagcaagacccctggcaaactgggcacttggcctatgtactgatttgtgggatggtggcaggggtgtggggtccttcaccctgcctgaattctctttggcttctgtgctctgtatgctgctgtccccaagggctctttcttattatggcagggagtggggattggtcctactttctttctctggaaaggaaagcctccaagactccatgtgcttgggcagcttgagaaggcgttcagcaccacgcctagcaggcagaccttgaagcctcacctttagtctatctgcagaggtattcagttcctggcacaggggactaggggcatgtagagtatatgaggaggcagtatggctgtgcaggagccttcatttcagcttcaattaatagggaagaatttatgatagctctatagatgctgaaaaggtatttcgtaagatttaaaatccatcccttattaaaactcttagtaaattaagtctggaaagaaacaccctaatctagataaaggtctgtttcagaaaccaacagtgatggcattctaaagagtcagacgccacaggcattcccattaaagtcagaaactagccaagggcaagctattattcagcagtgtcccggcactactaacccctgcaacaagccagatgaggaacataaggaagaattataattgtcattatttgtagacaataaaactgcctacctgtaaaacctaagaatcaactgaagacctgttaagagtattctgtaagtcaacccaatgatacacatcatgttcctgtccacatactggttttccccaaatcagctgataaattcagtgtaattccaatgagattgaaactttggaattgacagttctaaagtgcatttgggagagtgaatgtgtgagaacactaagaccactctgaacgatgataatgagttggggggtggactgctcgggggtgatcctgccagattcccagaggattctcacgccaccattacctcactcagtgtgacctggagggggtcagacagacgggagagtccagaaacagacccagggctacagg

SEQ ID NO: 6725 - DNA, 6000 bp, Homo sapiens
aatcaaaatcccaccagggattgtgtgcataatttgacaagttgattctaaaattcttgtggaaaagttaaggacccgaaagaaccaagacaacttggaagaagaaaaaaggtgggcaaacatgatcagatttctagacttataataaaggtaactaagacagtgtagtgttggtgtaagtataggtacacagaccagtgaaacagaatgaagagtctagaaatagatgcacatatagatggtcacttgacttataacaaagatgctattgcaagctaattcataaagaatgatcttttccacagtggttttggagcaactgctatcttgaaataaaagtaaaatttcagcctaccttatcccatgcacaaatagaaaataaactaaaatgtaaagggtaaaacaaaggcttgtagaaggaaagaaacaccagacaatagatgcccaaccctgagacaaagaaagatttgttaaacaaaacacacaaaagcatttgtcttttaatcacaaaagaaaaaattaatgttgtgtgtcattaaaattaagacaataaaaatataagccccaaacacggagaagatattaaaattactatatccaaccaaggatttatacctaaaacagagagagtgcctacagatcaataagaaaaagacagaaaacccaataaattggtcaaaagacttgaaactttacaaaagaatatccaaatggccaataagcataagaaattgctcaacattagtaataatcaagaaacacacattaaaactatatcaaagttttaacttcaatgtaatttacactacacacaagaatggctaaaattaaaagcactgataatgccaagttatggcaaagaaatagaacatctggaattctcaaatattgcagatgggactaggactgtaaattggcacaaccactttggaaaactgtttggtagtactgtatctactaaggcaaagtactgtatctatttactaaggcaaaaacaggcatttaccttgtgacccagcaactctattcctagtttcatattcaaaagaaaagagcacatatgtctatcaaatgttcataacaggctgtgtgccatggctcacacctgtaatcctagcactttggaaggctgatgtgggtggatatctgaggtcaggagtttgacaccagcctggccaacatttcaaaaccccgtctctactaaaaatacaaaaattttccggacttggtggcatgtgcctgtaatcccagctacttgggaggctgaggcaggagaattgtttgaatctgggaggtggaggttgcagtgagctgagatcatgccactgcactccagcctgggcgacagagcgagacttcttctcaaaacaaaacaaaacaaaaaaccaaaaaagaacaaaaaacaagttcatagcagctttattcatcacagctaaaatctggaagcaactcaaatgtacactcatagaagaagggataaattgtgttatattcaggcaatagaataccatacagcaataagaaaaaaatgacctactgatatatgtaatgatatggaagaatctcacagacattattttgagtaaaagaagccacacccaaaagagtacatactatatatatactgtatgactccattcatgagtagttcaagagcaggtgatactaattgctgctgaaaagggtcagagtggtggttacacctaggtggagggtgactggtattgcctgggaaagagcataaagagaccccttgatgccaggactgtttgccaccttaatctggatggtggctgtagcaatagatattaagcagatacgatattctgggtccctgtccatatgaggcagacaacagaggcgtgcgttcctacagcttacattctcttatggaagccggacaacaactttagtaaggcgttgggtgctgtagtagaggaactaatggtagctctgggcacatggagcagggagaattcaggtatttcaggaatgagggaagacttctttgaggaagagatggctcagctgagaataaggctttaggcagaggtaagaggaatgggaggaggagaacattccaagcagagggaacagtatgtgcaaagacctagaggtgaaagagtgaggcacgtccaaggaattagaagttccatatggccagagtacaggggaaaagatgagggtggaggggtgaggctgtggggggttagcaagggtttgctttccagcactaaatgtgatgtgttaggctggcgctgtagcgcgagcctgcatcccagcttgggaggctgaggcaggcggatcacttgagctcaggagttccagaccagcctggagaacagagtgagacttctactctacaaaacgtttaacaattggccaggagtggtggcgcatgcctgtagtcccagctacttgagaggctgaggcaggaggattgcttgagctgcggaggttgaggctgtgatccagccactgcaccacagcttgggcaacagagccagaccctgtctcaaaaaaaaaaaaaaaaaaatgtttcggatttttcaaggacactgggaagccatcacatggttttaggtaggaaagagtcaagatcagatttacatgttgagaaatgactccaggagcctgagaagttgaagtccttgcgggtggtccaggtgcgagtcggcggaggccccagccagggaagaggcagggagctggagcgcaggtcattgacggcagcgagagtggggagtccagctgaagacctcatgatggaggatgtgctccatggagaagagggggaaggctcttccagaactggccttcattttagccctgttaggaaaggaacgtagcttcggatcctagaggggccaggcacctgcagtgttgtgctgtttgagtccgcatccgaatttccagtgtcctttccttgctccttacttgctcctagaaggagccctatgctcctaaagagtctttcggtgctgagccttggcagtttagtttgctgaactctcgtcagtggagttagtgggtggtggtttggaaggagggagacagaggtggagggcttgtttgaatgcaccaagccttgcaggctttcctcctccccgcgctggccgggtaggttctcttcagttcctgatgaggcaaacgagaacaaagcagtcgaacagcaccatgatcgacgatactttgggggcggcgtgatcagaggattccccttcccgggaacttgcgtctagtcctctgacgcatcctagttcggagtgggtggaagggcatgtggagtccacagcgccccctcgccctaggcggggtggagacagcgagacgacgcccatgatcagctggttacaaaactcgaggaataagaagtttaatatttattggtctgcaaatccggagaccttgcggcctcactggtcctccttccctctgagctatctccacacccagccttcgatcagaaggagatttagaagcagagctgcccgcagcgaatacttttaatgcccgggccgggaagaaagcgggttaggatctgatcccgctgagtagaggacccaggagcctcccgccccgcgtgctctgtagcgcgggggcgcgctgcgcgctgcgcctgggcggctggcgggggcggcgtgggcgcggtgatgcaggtgtgacacccgccggcgcctgcctccgcccggatcgcccagctccgcgttagccggagctgcacgcggggctgccggggcggacgctgctctgcctgcatccggaggcggccgccagcggatttgccacccaggtaggggactgcgttgctcgctgcggtgcaaccgacccagccggggcgcggaccccgcgtgcgccagggctcccagactcgcctgcctgggctgaaatatacacgctcgcacagctgagtgctgttcatagtaaatggcacaaaagatcggagagtcttgaaaaaccggcgcagaaaagcaaggacttgcccgctgcctggagctgtgcgcttctttgaaagcggcctccccaagggctgttttaaaaccctgtttgaactattagcgccataagtagttttgcaacttataaatgtcaggctgctggcatttatagctccgtttccataagcttcctagccgctgcttttagtttcagttacattctagtagatagattttgttattgttgttggcttgttcttaaagaacagaattcaaacgtgcttacacctggtggctcttggggtttgtgagtgtgtatttctgtatgtgcagggcgccctccgtgggcgtgggagccgtttcttagggacacagaaggatttgtttatggacgggttttagcgcaagggaaagaaaatgacttgttttgcagggatgggctagcaaatgcgtttagccagggaggagcaaggcaccgctgtgtcttcggcagacgggtggtagaaatctctgctgtccagggttcagcagggctgatgaaatacactcctttatccggaaattacagatgcaaattactccgtttaagggtaacttaacgttggtgtcttgggctctgataagagcagccccagtggggtggggtgggacgctgggggaatgcttgctggctttctagcccttggggaggtgaatgtgggtggctttggggctcagagagtggcaggtgaggggtaaggagggtgcatgagggaggactgggcactgtagtcggctcagcggtggttctggtctatgctggtctcctctgtgtttctgcttcctgccctttccagaagaggtgacttgttctgcttgttccagttggtgcagtaggtacaggctcgttctgcatctttcttgagtcagcaaatacttactgagcacttagtatttgtcagagatgggattagtccttggggatgcagagatgatgataacaatgtcctggctccctgaggttcacacctggtagggggagaagcactcgtaatcaggaggtggataagttcatgatggtgttggaaaagagcagtgagagcagagaggaggaggaaattgatagtggcagtgattagtataaaaatgaagccctcatggattaggcatggcgtggatttcagcagggactgggtcgctctcttggttcttcggtccgggagtgacccacatgactctcccacaccattgccatcactgccactgggtgggcagagctttacaagtctcggctgggctggtatttgcagtatgtgactagaccccagtagacacaggctgacacccagagaggagcacacacaatacaagtcagactttaattttttccttttttaatgaatgcttttcctgaattccaggactatgaaggttttgaagcaacacttcacaaaggcagggactctggaaaattctgagggagtttcagagcagatgaacttctgtctgcttctccctgggtccccgacctatctgttcttgtcccagcccagttcaaaaggaaaactctcccttgattttccctaaatgggtggaataagggaaaactaaagctgttactaccagtcttttctgggagatgaaaatccaatctcaaggatgtttcttcctggaccaaagctgtgatgggtgacgaaaaatgatagaatgaaaagctcttgtgttatgtatttgccagagatgtgtgttacatgcgcctacatcatcattaaggtatttgaaaagcagcgtgcactacaagaagcatgagcgtggatgctcaaacagacctaggtgagtgtcttgggcaagttactcagcccctctttgagcattagtttcctgatctgtaaaatggagacagtaataggattcttataataattaaagaaaagatactttaaaatatttactcattgttacccgatcatcatatataacttgcctggcacaaagtaggtgctcaagaaatggcagttcattcattaagttcctactatgtgtcagccattgctctatgtgtggagaatacagacaaaaacaa

SEQ ID NO: 6726 - DNA, 6000 bp, Homo sapiens
gaagctggcaaaagatgcttcacgtgaattacttgaacaacaatttctcattgtgttgaattacactgaggctgcttgctgggaaatctttcacagtccagtaacagaggaagatattgtcgttttttcccacgaccatatagttaacccacttctctcctaccaaaatgaatagacagtcctctctaaaatgagggaggaaagctcttcaaatcctgatcactaagcatttacctatagcttatcaatatcttacgaaccaaaagccagtttatcttctcatgtcaccccactttcttttttgcttccccacatcagattttaagattacttggcttctcaatgtttagaatacctctagtagccaacaaagtaaggaatcacggaaccacagccttagctagcaatattttcatcttgaaaagtcatctagtccagaaagtagttgagaggctaaaataatcataaaggttctagagtcattcataataccaacctcttcctaaattcaccatccaccactagagggagagatgaatgaaaaaggccctagcatggaagtggaggttacagcatttctccaaggcaacatttaaggaagcccagttgaggcctttaatggggtttaagttgtcggctttcctgctcacatgagtgttaaccgtctatttcagaggcttgttggagggggcactgcagttcatggaagggttaaaccccctctacctccctttctttctcctccctgctcccgtgtcaggagttggttccttcctgtgggttcgtggtctcgctgacttcaagaatgaagctgcggacctttgcggtgagtgttacagctcttaaaggtggcacggacccaaagagtgagtagcagcaagatttattgtgaagagcaaaagaacaaagcttccacagcgtgggggggggggggggtggggcagcttttgttcccttatttgtccccactcatgtcctgctgattggtccatttttcagagtgctgattggtccattttacaaacctctagctagctacagagcaccgattggtgcgtttttacagagcactgattggtgcattttacaaacctctagctagctacagagtgctgattggtgcattttacaatgctcttgtgagacagaaaagttctccaagtccccatccgacccaggaagtccagctggcttcacctctcactcccaccaatttggggtggcaaatgtagactcaattcctgccacttgctggcggtgagctcccaaaatccacctactgttgtttcttttgagaaaaaaaaggggctaataagaccagctctccctgttgtaagcttcagctgagatacaggacatagaagtacttcataagcattaacgtgctgtacagatacaaggatgtttactatttttctgctgcttcctctatctgcatacggggctaggggaatgccaagcagaagcacttggtgctcataaacccaccttatcatccctggagccctgatctacaagtaaataaaggatgagcaaagaaggaagggagttgaacttgttaaattccttctttctgactgttgtgaggccgcagcctgatttccctgaggctgactttgatgattctttaggcttcaggcaccaggattactttcatggctgcttaccattaattataggaagaatccacaaccctaatccgaaatcctttatctgacagcaaaagtgtgtgatttctctaaagacagctaattttttaatctaaaataaatggttaagctgaaagaaggctgtgcccttctcagtctgtacatgaggcattgtggcatagaacaaaaagggctggccgggcgtggtggctcatgcctgtaatcccagcactttgggaggctgaggcaggtggatcacctgagatcagagttcgagaccagcctgaccaacattaagaaaccccgtctctattaaaaatacaaaattagccgggtgtggtggcacgtctgtaattccagctactccagaggctgaggcaggagaatcactgaaacccgggaggtggaggttgccatgggccgagatcgcaccattgcactccagcctgggcaacaagagcgaaactccatctcaaacaaacaaacaaacaaaaaagaacaaaaagggctggacatggatgcaagttttgttcctttccagctttataaaagaggaacaacataagtcccagcctccccatcagatgaaccacactgcgtgataaacgagataatatgtatgtagttataaagaacctgggctatgatggcagacaacctggttttcaaagacttgccctgccacttactagacaagtgacactggtcaggttaacctttctaggcctcagttgtctcatctgtaaaacaaggctaataatagtatctggtttagaggattgctgtgaggattacgttgtaaatgcgggtgaagcactgagaatggtgtctggccataataagcacacagtaaacattagctcttgttattacaaagaatgtaaataagagttgaagactataaagcactccgcacatttcattagcaatggggtcaccattcgtagacaagtctcagctcagctttgcagcttaccgtcacagaggcagggaacagagctagcttgtcaagggtcttctcaggaggaagtggggaggtagcccatgaagcaaagtgatggggagggaaagagggggacataaagatcctgcagagaagttggctccgagtgataggagggtgtggggaagaaagaagggggcagtaaggattctcattataggactggccgggaatggtgtgaccactgattcaggaagtggggaagacgggaagagacttcaagtgtggggggagccaattcagataggaggtggcctagacaaggtgagggcatctcaaagcgacaccaagcctgggtgagatcacgtctggagccacagaaggatgaagcagtttatatttaaatgccatggcaaaacaacatccccaccattacaccctccattctcattcaagttcttcgggagaaaggaaaaatatggtcgggttcattgctattcagttttgaagttgagcctgcatttggacacaggcgcttgggagagtgggtcattttctttgacacaattattaaggaaaccgttttaaatgattccttgagtcccccaatggcccaggtggaaggtgctgtttcctggtacctgtccagccctctgagcttttctctcagcttccaaacgctgcagttgagaactagcagatcctattggtagtgccctgtggcccacactccttggtaacggtgagagtggggagtaattaggagcggctgccatgggccaggcattcaggtcaaggccgaggatggtggccagggccacagagccaggggacgggtggggacccagcaggcctgcggctggccgcttgctgagcgctccagcagcggggccctgggcggatgaagggccggagaaggccctctgctggggccgcggcgatcttgcagcgcctggacaccgaggctggggcactaacggtccgtggggctcccgacgtattcctctaacttcccctttctgtcctttcggtctggggccttttcaacaccccctgtggccggggacagctggggcagaaaccggcaggcggcagaagcctcaagcagctctgacctctggcacctccccaagacccagagcacaacatctgtccccagaaatccccgggcggagaagagcgcgcgccaagcccttcctgggtactcagtattctcccttcctgggaacagcctgccctctgaggcctgggcacccgggttcccgagcgccgggtcccagccccgcgggggcgcctccgcaccccatctccgcgcccggcgcagagccgccagtctccgccgcggggccccgtgccccgcagcgccacctaggggccgggcgccgcctcccgccctcaggggcaccccccttactccgcaaggactccgggtctccccagttctcccggcagccggaccctcccagcctcggccgccgggccgccctccgcatcccaagcccgcctcccgtgcctccccgggggcgcaccggcagcgaggagcggctcggcgagggcgcgcagcggcggcccaggcccaggccttggggctggggctgagggggtgagagcaggcgcggccggcgggcaaggggaaccgggcgatggcagcggcgggcggccgcgggaggcgaggcagcggcggcggcgggcggcgcgacgagcccctgtgattggcacagccggagccggaggaggaggccaggggagggcggaggcgggggaggaggaggaggaaggggcgatcgcggcggcggcggcggcggcgaggagctgtgccttccacctctccagccccggcaggacgggggcggccgccgcgaacccggggcggggacagcacgcagcctcgaggcgcgcacccccgcccggcagcggccccgacacccggggcgagcgggaaagcggcagcggcggcggcggcggcggcggcgggggaaggatgcaggggaagaagccgggcggttcgtcgggcggcggccggagcggcgagctgcagggggacgaggcgcagaggaacaagaaaaagaaaaagaaggtgtcctgcttttccaacatcaagatcttcctggtgtccgagtgcgccctgatgctggcgcagggcacggtgggcgcctacctggtgagtccccgagccaactccgccgcgggccccttccccagcccggctctcgagcggccgcctggcccgacgagggggccgcccggcgctgggggcaggcgggcatgacctcggcccggcgtggaggttggcgagtggtgcagaggcggccgccgggggagctgccggccggggctgccagcgagcgggtagcgggcgggaccgttgatgccggtagcagctcgcgcgcgtccggctggggcagggggtgccgggggaggagaggcggcgggcaggtgggcgtgaaactattcctctccccccataagagcggagcgagacggtgagttcagggttctccttggagaggaacgaaaaagcgtcggggttttcaggtgacctgcacatgggaagaaaaaccagttagcatcctgcgtcctctactctccattgcatcctcctcgagaacaaatctattatgcatcattttctccgggcgctttctacatccgccaattacagggggatataacagcttagagtgaaatgcgccctagtgtggccctggcctgagccggggctgcagggggaatattgccacccggtatccctatagccctctttgagcgtctgggataaagttacggtacctagagagcagctgcgagtttgtgtagttcctgctatccactcttagtgctaaattccccatcgtggtctgtcgcctacagaaggttgcaccattttccacaatgaatatgtattttatttgcctccagaaaggggatgttaatgctcagagggcccatgggtgcgtaacatttcagaggaaacagcttgtaatgactcagcactgtcaggtacctactttgtcgctttcgcctcctctgctcaggtggtcgcaacttgagttccagagagcgtgcttccacacctaagtacagtcctgtctaaacgggaaattttttttgagagtttatagtgttaaatcattacttggctattgacccgcaactggaatcaaatgtcatagactttgagtattcctgagcaagtttgatggagatagaattggacaagattttggccattgaataaccacatccagagatagaaccacgcgtatcctgatgctatgattaatccctcattcctggccttggggtaaagttcatgagggccagacgctgggggctgtataccattcataaactatctcttaaggctcagggctcactgttaaagggaaatacaagcagtgcttggtc

SEQ ID NO: 6727 - DNA, 6000 bp, Homo sapiens
taggagaatttatgggtccagtatcctcttcagatgatagagaggagctgcagagaagaattttccctgggagcctgttccatggatgtatggatcttctcatgtcatgcaataaaagctgttgacaaggaacagtagttttacatgttgaaaaagcttgaaaggaatatttcagtgaaacattttataggctcaatgttttctctttagttttcaaagcagtggtcaacatagttggaatctgactttactactcatttttcttacgaagttgatttttttaatgcatttgtttccattgactacttactttcccataatgacttaggaaaaacaattaatgacagtcaaaatgggatttattggcaccacgagaacactgatatgtttatccttctgtctctgagactatgtatggagtaccagtacattatttggcacctggcaggtatgctctggtcagtgccttttcttacttctctctttgttggttggctgattggtattgtgttatatgcaagagagtattttggagaattatcccgtgggtattgcttggcatcgtcagttctggagtgccacctagttgaatgtaatcttgctttagatggccgtaggctgtggctccagctcctgacttcatgccctccttttaggatttctttcctcctgacctctctgccactcttcctggcctgggacagataagaggcaccacctggcctcggacagataagaggcaccaagctgacctgtccatccttcctcagtttcctctgcagccatgccaaggaaaagggatactggaattcacatcactatctccccagcttgtccccaggcccaaaacatcaaataatgtatgccaccaaactgtagtccatttcatgtattccagcaatgacagtacattccctgttttagagtctagtcctagatcagaaacttatgaggattccctacctgtttgaatctgctgggtataattttagtcccaccgcaaagtttctccccttcctgcctcgggatggtcttgaacgagaagtaaattagtgttttcaaagctcttttacagaagttaatatgtttctaactggcacagcacaccttgttttcactattaataactagccagtgtgccttaagtggaagtcaccttttctgttttagaaaaatgggtggggatttggtgaggtgggggctgagaaagacagagcagatgaatgaatcaacataggaatagcgaaaggtctgatcctttgggaggaaggagaaaaataacaaaaccctgatgtactgtattgtatccattatgtctgctgagaaattagggtcaggggcccgaaacttttcactatctcttggcgtctgtttcagttcaggtggggtggctttcccctgtgatgggtcatttccttctctcctttcacattccaggctgcattaagatgacaaatttcacgtataggttcgggcacaggcatgaaaacctaagctattcagctgagtgagtgcagatgagttgatttattgtgagggaaaaaaggggtgtttgaagagcacaaaagacttttgcgagcccagctctgcaagaaagcacacaatagatggcccaggccctaccctgaaccccagactccctggtctgaggcctcatcaaacctatcaagtatggaagagaaatgttaaagtaattaagagacgtctttaaagtacacctcctccagcatgtgtggatcacagatgaaactttatttgaaaaataaccttatagtggtttgcagaaatatttggggtataataagtagaataaaggtcttgtgttcttttctatctgtgaactctgcaataaatacttctcctgccctccctttaggaggggtagaaaaaatcctggacagcagagagcaagtccatcagatcaaacatgactgcgttaaatactaaaatgttcaaagtccgactgagatagataaaagctttgatggaaagtggatatttcccagggacattacaagcaataatccagatgttatggtgtaatgcagcgagtgtccatggatagatcaggagctccagccaagtcgcgcctgctacagtcctcagccttgccctcccatgctgttccgccatatggaaccgatctctaggcccccttaataaccagctttggattccattttcacagagctcatagagctaagtggagctgttttatggacaagttagatagaagcctttccaagataaacatccaatttgaaattaggacataccaagccgcaaaattattttagggcatatttcatggaagtgctgccatttttcttaagcaattgccagactgtaggatgccctttgatcctttgtggacattactcccttttttataaaaaggattttgaaatagatgcagtgtttagggaggaatatatctgtcggaactttgaagcatggccgtgggacaggtcatgctttagcttgttggttggcaagtcaaactttaagaagaaaaaaagcaaaaggaggaattgcagcaggatatatgaatcaaaatctcatttttgttttaaaggtagaagtttttagcccatgtacttaataagctagaaaatgtattcagtatatcgatatctatataaacatctatagatatatgtgcatatatgcagatacatctatttatatattgtgatggtgtctgtttatgaccaatacaaaaatcacttaatattaactgtttcataaacctttattgagtatatctggaatatgttatttttatatataataataacaataataataatcatatattattccggatggaacatattcaataataaaggtttatgaaatagttaaaatattcctatacatatattcccatatatatatatgaagtaagaaggaattacttatgttcaccagagaagaggatagttctttctttttaaaattctttcctcatttgccccttctgttctgtctcagcacctgcagaacctatgtgtgtgtgtgtgtctgtgtgttttaagagaaaagtcacatggatattgatatggttagactttgtgtccccacccaaatctcatcttgaattgtaatccccataatccccacttgtcaagggaaagaccaggtggaagtaactgaattatgggggtggtttcccccatgctgttctcatgatagattctcatgagttctcttgagatctgatggctttataaggggatctttccacttcactcggcacttctccttcctgccgccttgtgaagaaggtgccttgcttccccttcaccttccatggtgattaagtttcctgaggcctccccagccacgctgcactgagtcaattaaacctctttcctttgtaaattacccgccaggcagttctttatagcagtgtgataacggagtaatacagataggaagtttgggaatatgtgttttcttgaatgtattttgtttaagattgtcataaatgatcaaaatacctagtgtggcattgttgcgtcacttattaagagtggtggagtggcctgggttcgatgaggtaagctgggctataatgactatggtactgacataccatttgttgtgataaattgtgactaactgctgtccgagcaaattggtgtctaaatgatctggaagatatagcgagcgatgacaggaatgaatatatagtgttagaaattcattgctcgacgatgatgctcagcaccatttacattcttcagcccatttatttctccttcaataaagaagcctatgcttgtgttatttcacttactgaacggacaacgtaaatgaactctgctaactaaatgcagcgtgtggatcatgtggggatcccgactcagacaaactagccataaaaaggcatggttgagaccatcagggaaatgtgaatatgcactgtgtatttaatatgctagacaacttatggttaacgccattgagtgtgatcatagcaggatttttatgtaaaaacaaatgtggattttgctttaagatatttcaaccagaaaggaatgaaagcataggtaaaataagatttgccagacagtgaatctggtaattaagtacatggagatttattatactcttctctttacctttgtgtatgtttgaaaatttacatagtggaaattaaaaaatgaagtgtgactactctatttacaacttataacaggacatttgcctttttcctccaaggtatgtatgagtgtgagtaatataatttagcaaaggaaataagagttaagttattgaacccctcctgggtcccaggtgcagtgagatgtgctttatacgcccccttccctcccacccccactccaggtctgcaaagctcatttggccagctaggccactggaggctctatttggactagtgaatcttacatggtatagggcttttggtagtatcccaaggaataaagagaagtggagacagattcaaatgtgaaggataaattcaaagtcattatttctgaatgcccagagatattttgcttccttgcaaggcaatgccttgttctggtataatatctctgttgcccagaatgtctttcttcctctcacactattaaaatagctaaaggcccagttgaaggagtcccaccaaagagcgcatctgggtgggagtaccggccagtgccaagtcaaagtgttgcatatactcatccttcactatattattaccactccaaagcttgagaaggaagtcacataactgtgacagcaggtttgcaaaaccaatgaaaaaaacagttttccccaggcagggaggaattttttttataattaaatactgaaagttggaattcctatgatcatcaaagtcactctcaggaattagaagcaagtttacatgtcatctttattttttgctttagtcctctttgatacgcaacctacggctctctgagtccttgaaaaagaaccaactctggaacgggattataagtataactttgttggaagggaagaatgtctcaggaggaagcatgacagagatgtttgtccagttaaaactgggagatcagaggtataaaagtaaggtaagttccatcttttccataaggagaacagtatctttaaaataaaaaaaaattaaaaattgtttcccactttaaattttacaaaagtagaagtaatttatgttcagcccgcctaactatattaaagagcagaaaacaaaataattgtatagatgcagtcaattaatgtgggtattgttttaattgcttagtacagtttaatttagtaactcagagctagagaaaccttattaaatcatagatttgaatgtctgacttattttcaatttgaaaataagcaaactatgtttcatagaatgtgggaaaaggataagtaaaagttttcaaaatgctacaaaaatagaatagcataatacgtgatatttgggttaaaatatgtgagataattaaaaatatttgctttctcttgcttgctagtcttcacgccaaaaatagtatctagtgctgctgttttttgctgggattaaaaataataaactatccaaagtatgaaaagtgatttattttaaacaaacataatggcattttaactgtctttgaaaataattcatcttattctgctgatccaaattccgtttaatttttaatcttagtaatttggtgtggattttatttcaaaaactatagtccctaaagcgtgataattaattagttttacataactgtcagacaggaatatttcctatgttttatggattgaaggagctctggggtacttgaaacttaaatcacttgccaaaagccacacaggaaaaaaaaaatcagtggacgattttgaaaatataaccgaggatatttctagcatcaaggatgcagcagatacagacaagttggaaaatgatttagggaggcaagaggttgtgcgcactgcacaattttcagtacagaatcaaatattacatgtcatctactctagcacaaagta

SEQ ID NO: 6728 - DNA, 6000 bp, Homo sapiens; identical to SEQ ID NO: 1851

SEQ ID NO: 6729 - DNA, 6000 bp, Homo sapiens
tgaggatcatgaccatccctgtcaagcaggagaggagatgggctgatgtgtattgtgaggcccaacatggtgaaaccccatttctactaaaaatacaaaaattagccaggcatggtggtgggcacctgatatcccagctactcgggaggctgaggcaggagaattgcttgaacccaggaggtggaggttgcagtgagccaagattgcaccattgcactcctgtgtgggcaacagagtaagacttcgtctcattaaaaaaaaaaaaaaaagaatattcacttcaataaatggtgagaccagctttgcaaagatgacagtgagagaagtttagcatggctgactccatcttgcttccagtctcacgggcctgctgtctttgctcattcctgggcataggccaaatcagccatgggagaaatgtagttcatagtctaacgttgccatttccagtcctcgggggtcacctctttccactccacgcttagttatcaatttgttactctgctttaaaatgtacctttttttttttgtaatctcagctactcaggagactgaggcaggagaatcggttgaacctgggatgcggaggttgcagtgagctgagatcgcaccattgcactccagcctgggcaacagaatgaaactgtctcataaaacaaatataacatgaaatggtaacgtctttctttaaaaccaaagaaaatatgcaaggcggatgtcttcctgtcacttcgcacagtctactcccatagcgcctgagccccagaccccaaactcactgtcctgctcggggacccccagaccacagtgaacattacgggtaccccaagtactctcctatcctcacctcgctcctgcagtaaatggctaaatgaataactcagaagtgaagccaaaaagaaaaagaaaatgcacatggggaacaggagaggagagcagaggccacagtgtggaggcctgggctgatacactgcaaagagatctttggggctccgaagagatctttgaggctccaggtctcatgagtgggggccaggctccctagagaaacccttcttgtctagggctggggagcccaccagagtgacccaatcagttctcagggcctgtgatggggccacatggttttgagaagccggtgttcagctccatcctaaagagcactcatgcacgttggggaggagggccggggtgcacagctctgacctgagtcagacccacctcaggactgagcccagcagaaggaggcccagagtcactgaccataaaaggagcagatgccctcccccgtgttggttgagatgagtcttgggcattaactctaataatttctaactgcacccagaaatactgattcacacagcaactagtaaataatagccttttagagctaaaaaaaaaaaagccttgtatggtttattatgaattaacatatgcattttacacaaactagaggcaccgtggtgggccagcagcagcctgttaggggccacagcaaggagactggatttcctcaagtgcaatgggagttactggctaggctttaaggttttagccacaggaaagatgaatgtatttcagagcaacgtgggtggattcaaaatgaggtttagaactagatccattaaatttttttttttttttagacggagtctgactcttattgcccaggctggagtgcagtggtgctatctcggctcactgcaacctctgccacccaggttcaagggattctcctacctcagcctcccgagtagctgggattacaggcacctgccattgtgtctggctaatttttgtatttttagtagagacggggtttcaccatcttggccaggctggtcttcaactcctgacctcatgatccacccaccttggcctcccaaactgctgaattttttatctgaaaaatctcccaccgggcgcggtggctcacgcctgtaatcccagcactttgggaggccaaggcgggcacatcatgaggtcaggagatcgagaccatcctggcaaacgcagtgaaaccccatctctactaaaaacataaaaaattagccaggcatggtggcgggtgcttgtagtcccagctacttgggaggctgaggcaggagaatggcgtgaatccgggaggtggagcttgcagtgagccaagatcgcgccactgcactccagcctgggcaacagagcgagactccatctcaaaaaaaaaaaaaaagaaaagaaaagaaaagaaaaaaaagaaaaatctcccctctccaaaaatctcccggcatttctacagaagtctctacctaggtaaggagaagaaacaattcttggccgggtacagtggctcacgcctgtaatcccagcactttgggaggccgaagctggtggatcacgaagtcagtagttcaagaccagcctggccgagatggtgaaaccctgtctctactaaaaatacaaaaaaattcgccaggcgtggtggcaggcgtctgtaatcccagctacttgggaggctgaagcagagaattggttgaacccatgaagcgtaggttgcagtgagccaagatcacgccactgcactccagcctgggtgacagagcaagactccatctcaaaacataagacgaaaaaaaaattttttagggagctgaaaagtgaactgatttcctcatttctccttgcaaggaatcaattgatagcccaaaattgaaacccagagttaaaataaacgtaactcccaccctcttagtgtttctcacttttttttttttttttttgagacagggtctcacttctgttgcccaggctggagtgcagtggcgtgatcatggctcactgtagcctcaacttctggggtcaagtgatcctcccatagcctcctgagtagctgggactacaagcacatgtcaccatgcctggctaatttttgtatttttttgcagagatggggtttcatcatgttgcccaggctgatctcaaactcctgggctcaagtgatctgctggccttggcctcccaaagtactgggattataggcatgagccactgtacctggcctactaactttaattttaggtgtatcttttaggaagtaatatctcatggcaaaataatgtttgtcattcagtagttactgtagtttcatttcagtttttcttttgttaaattcaagcaaaatatagttttatgtttttaattaaaatcccatatgtgtttccccatcagataaaatatgcctgtcatttaacctatgtactcacatggaaaaatgtctggggtggagttcttttttttttctttttttttttgagacggagtctcactccgtcgcccaggctggagtgcagtggtgccatctcggctcactgcaagctccgcctcccgggttcacgccattctcctgcctcagcctcctgagtagctgggactacaggcgccctccaccatgcccggctaattttttgtatttttagtagagaccgggtttcatcgtgttagctaggatggtctcgatctcttgacctcctgatccatccacctgacctccggatccgtccgcctccgcctcccaaagtgctgggattacagtcatgagccacctccccggccctattttatatttcttcacaaaataataatgctgtatgcaaagctgccaaaaggtttatacttttcgtttgtttttgagacaatcttgctctgttgcccaggctggagtgcagtggtgcaataacagctcactgcaacctccacctcaagccatcctcccacctctgcctccagagtatctggggttggaggtaaaagccaccacgccccgctaattaatttttttctttttttggtagagacgggtctcgctacgttgcccaggctggtcttgaacgtctgagctcaagcgagcctcccacctcggtccccaaagtgctgggattataggtgtgagccactgtgcccagcttgtagcatcgtttatagacaacaaaacctggcagcaaccggccaggcgcggtggttcacgcctgtaatcccagcactttgggaggtagagcggacggatcacctgaggtcaggagttcaagaccagccttgccaagatggtgaaaccgcgtctctactcaaaatacaaaaattaacccgggcgtggtggcggacgcctgtaattctagatactcggaggctgaggccgagaatcgcttgaatccgggaggcggaaggttgcagtgagccgagatcgcgccattgcactccagcctgggcgacagagcgagactctgtctcaaaaaaacaaaccaacctggtagctacctaacacccaacaatggctgaatggttagacaaattattatactgtcattagaataatcatatttatgtaccgatacagaaactgatatatattaaataaaaaggaaatttcgtatattgtaattggaaacatgtaaaagtatgtatacattatgggaaaacacctaaaatactaataattaggtgagggttgtggaattgagtcactttaaaaaatatttttttccaaaaaaaataaaataactttttcctatttttcaagcttgtaattttgttgttgtttctttttttttttttttttgagacggagtctcgctctgtcgcccaggctcgagtgcagttgtgtgatctccgctcactgcaagctctgcctcccgggttcacacccttctcctggctcagcctcccgagtagctgggactacaggcctccgccacgacgcccagctaattttttgtatttttagtagagacggggtttcactgtgttagccaggatggtctcgatctcctgaccttgtgatccacccgcctcggcctcccgaagtgctgggattacaggcgtgagccaccgcgcccggcttgttgtagtttattaaaacgaggaaactagactatgggatcacaagcccagagccccatgtagctgactctagcgccaagggcggaagagaaacgcccagcgccagggctctccttcgatctctgcagcggcgcgccgggcttcgcgctccggtgagttgggccggcctccgctggaggctcttcggggaccgctgcccgccggtgcgtcctgccgcgctccgctgcccggatattgcagaggacaccactcagaaagtatgcgtgtttctccgcgctggaaacttaaccaggagtcctgcatttccatttgcgaaatccgggaacccccgccccacccagcgcctcaccggcccctcactgccgccgcgtccggcgccactgctgtccccgcagcctaaggcgccggtccctggcacccccgtcccgcccccgcccctcttcctgctcctcccccacccgtccccctcccctcccccgcccgcgcctcccggtcaccccccatcccgccccgcggggcgcggcgcgcaggcgcaggctcggagggcgggcgcgggcggaatggggactgcagctgcggcagcggcggcggcggcggcggcggcggccggggagggggcgcgtagcccgagccccgccgccgtgtcgctcggcctgggcgtggccgtcgtgtcgagcctggtgaacgggtccacgttcgtgctacagaagaagggcatcgtgcgtgccaagcggcgaggtagggcgggcggcaggcggcaggcggcgggcgggtgggggaggcgggcggcggagaaggcggtcgcaggtgggggcgcccgggtcggggcaggggacggggtcggggcccgggcccaggttgggggaaggctgcgcgggcgggtgctccccgcggcgtgcccaggctgccgccgcgtcctggcgctcgggcccgggagcggcccaggaatcacaggtgcgtcctgagcgtccggcgcttcgccgacgccacggcttttctccgttctcagcggctggagcggcttgctttggtgtgcgggcttccccggctgactttttccctcggtccaagacctgccccgcgccgcccggcagccctcgccgtggcccgcaacccgcggccgggagc

SEQ ID NO: 6730 - DNA, 6000 bp, Homo sapiens; identical to SEQ ID NO: 1833

SEQ ID NO: 6731 - DNA, 6000 bp, Homo sapiens
ttcccagttgtctgtcccttcatgctttttgcctttcttccttccacttcccctgggttgtttctgaactcagccatcacctgtggtaactacacctgagcaggcccctcctgaagtagcagtgggctccaccctgggacgacagcagctgactggtccacctaagtgagaggtgcttatggtcaaacctggaacttcaaagcagaggaaatcctgaatgtaaatctcccttcccatctcctgcttacttattgtctccctcaaaagacatctattctcacatctttacacacagaactttaaaacttcaagtagttttggtctaaacctacaagatgaagacttaaaagatcaactagaagatcacataactcctccccaccttcggtgtaactgtagaaataaaggaaaggaagtgaggcaaggtataaattatttaggtaaaaaggtttttcaaaatttaggataataaatcattcttttgcagtttaagatgaaaagacaattttgatgttacaaatgagattgaaaactctgtttcagaatccttagcctgctgaaatcagttttttcctgaatgggtttaaggattcaggactatttattatatacaaaatactggattttacaaccaacaaagttgaaaagtattatatttaatctaatatcttaaatattgttaggaaatagtcatgaattacagacctgcagatcaaggacaaatttaaatacaattccaagtgcccaatcttctcctaggttagaaaagcttatttctcccactagatacttattaataacaaagggaaaaacggtatcttgacaatggagaaatctcacagacaccaccttaaccaagaaatcaaagttaacttcaccagtgatagaacagaaacatatcatgtgctgcctaacagatgcaatgagaaagacacaggatcatttctattatattcctgcccaaaatgcaaaacctgaattgaatcatgaagaaacattagtcaaacccaaactgacgaatattccacagaataactgactcttaaaaagttatgttttcatagaagaaagcctgaagtatgattctagattaaggcctatttaggttaagtacaagtattatgtctgcgttaattttctcagcttgatcatcatactgtggttaaggtccttgtttttcagaaatatacacttacgttttcgcgggtaaaggggcatcatggatgtagtatatgctcaaatatttcattatatatatgtatatatataaggaaatacacatgaagagagaatgataaagcaaatgtggcaaatgttacatttggagaatctaggagaagggtatatggaaactctttgtactatttttgtaacttctaagtctgaaattgcctcaaaataaaaaaattcaaattaaaaaaactctttgattcttctggggccacactatttcttggctgctctgggcttcagcactagggagttactataagagtagggaacaaattcactcagtagacccagaggactcagccctttatccccaccctcaatcatatactatttatatagagttgagatgtaaaatgtataagcaacagctgtggaagctatcaaatgttctaaggaaaatgtactcaccgcttttttttaacccccaaattaatctgttacaataatagattaacatagatgttcataaattaacacttcttaccttctcactatgaaggagggcatgcatggcagcctccctacagagtgctgtcaggtcggcaccaacatagccaactgtcatttctgcaagaaggcccaaatcaacatgactggagatgggcatcttcgaggtaatcacttgcagaatttcctttctttgtttaagtgtgggagtcccaatgaccacctatatgcaaagcaaaacaaaaaaaagaagaagaagtatatagtttaaaatatattatttttaaagttgatctcatggatggaggtagacagcagaatgatagcaaccagacactgggaagggttgggggtgaggggatgaagacaggttggctcatgggtacaaacatacagttaggtagaaggaatatgtgtaatgtttgatagtgtagtagggtgactatagttaacaataatttctcgtatatttcaaaatagctactagagagaatctgaaatattcccaacactcagataagaaatgataaatgtttgaggtgatggatatcctaagcaccctgatttgataattacaaattgtatgcatgtaccaaaatatcacatgtaccccaaaacatgcacaattatgtatcaataaaaatagatcaattaaaaaagaattacttccaaaaaaattttatatatgtgtgtgtatacatatatatattttttttttcttttttttttttttttgagacacagtttcactctgctgcccagtctggagtgcagcgggcaccatctcagctcactgcaacctccacctcctggttcaagtgattctggtgcctcagcctccagagtagctagaactacaggcatgtgccaccatgcccggcttattttttgtatttttagcagagacggggtttcaccatcttggccaggctggtctcgaactcctgacctcaggtgatccacccacctcagcctcccaaagtattgagattgcaggcgtgagccaccgcgcccggccaaaataataatatgttttttatcctgacaaacatgtacgacaatttagtgaaccactttggaactagtaccgtgcactttacgtatactttagattctgaatatacgaaaatcctaatattccagaggagtaacactggctagaaagttgcacaatgaaaattctatgtcatttaacaagtttttgttatttttaagaacacacaaagttctagaagccaggtatagatagctaggtccctgcccttaaggacacaggtactagatagtgcaaggaagaaatccactcaagtcctgaactaactgagctaaaagtgtgtaattatcatttctcttttgaatcctatcacaaaatagaaatatcagtcactaaatttcaaactgttctttagaattcaagtcaatttaggaccaaagcttaaaataggacagctctgaatattcaacctccctgacaactcagggagcagttgtgggtacctcctcaattgtggaataggatgctggtgttatgacaaggaatgaataaatccagaagagttaatgcctgcttccatttagttcttccccaccttctccctttttatttcaacacacttacttcttgaggctatccttctttaaattctcattccaaaaaatgagtttaacacgcttgtaggtgaccaaaattctcttaagaattaacattactgattataggacctgcacaacaaaattaatctgtaatggacacctcgcttcccaaaacaattagactctggggaaacaggtcctgactctcagatcctgactcacaggtcctgacaatttgactctggggaaatacaggtcctgactcacagatcatatatcggcagagaacgtgttctctgcattgcaaagagccccaactccaacctcaccgatgctcaaacctaagaggcaaacgcctccggggcagccaaatggcgccagaagcggccgaggttccaccgacagtgggcaaacccgccaagcccattcacctctcggtcaaatctcccgggcctacgcagcgctgggtctagagcgtccggccggttagtggctcccacaaccacgacctcgcggtccccactggcgccgtccagcagcgtcaacacctgggccactacgcggctctcgggtgctcgactgccccgctggggacacaaggcgtccatctcgtccaggaagaggaggctgggtccgcggctggccagttcccgggcgcgctggaagacccgccgcacgttctcctcggtctccccaggccgggaaccctgcagcgccggggcgctgactgccagcagctccgcgcccgcctcgcgcgccacggcccgcaccagctgggtcttgcccactccggggggccccgccaggagcaccccgcgaggcaccgctaagcccagcgcggtcagggcgcgcgggtagcggagcgggaggcggaggagctcccgcagcgagtcggccgcctccgaaagacctcccaggggcacctcgggctgcggctgggcttccgacggaggctccccgccaaggctgacgcgggtacgaggggtgaccagcccagcgggatcgggactgggcgtcccgccgacgatgtgcaaggcagccaccaggccaggagcgcctggcggagcgaccaccacgtggcccagggagatcggtcggtttctcagcagctcctgtgccgcctccagcaccgcggctgtattccgggcaccgggcgcgcctgcccgctctcgcaacaccggccacacggcgacgcgccgcaggggcggacagggcactaggaggaggcgattcaggctgagactcctccgggatctcgacgccccgaccgccgccccggggctcgcgcacagcgggtccagctgcacaaagccgtccgctccgtcccgccgaggccaggcagtgcagaggcaggagccgccgtcgggtagcgagatcttcactgccgagcccaagcgcgcgcccagggcgtggagggcggccgggcccaggcggcagcgctgggtgccccggtctctagcgtctaagggtagcagctttaagagcggcccttcagggaagggatccgagtccggagccatcgcacacagatgaaccaggcagacgaaaccagattaggaaacccacccggcccacaaaaagcggaacaccgagctcgcaggccggaagcagattgcgcgcatgcgctagggcagactgcgttgctagcagctgagtgaaggccgaaagggccaatggaaacgttagacgacgctcgggcctctgggtagagcgttggtgtccgctttcgtgaaatcgagttgcctaacccagagctttcccgagatggtcttcgttacaggtgtctgggaggcggcttaagctcacttcactaggtcattaagcatgtactttggtggttacatatatcttggaagtcaccggctttacattctgttttcctggccttcgaactggagcatcagtactaccgccgttggaatagcaacctagagactttgctattttgtgaagaaactctaactatccgcatgggcacagaattttgggtgctctggtgcaaatgtctcaggtgacttggcgtaactgagaatacagccttgggaccttcggtaatcggggttccaatctgggaggtccaggcacaacccttcctatgggaaagtaccagcatagtgggagggaagcacacggtagcgcttaaaatcccttgtagagaggaaagaaggaaaactaggctacctgatggatttgtagcacaccaacagtacatttgttctgatttctgatattcttttgaatattctttggcaacaagttaatcactaaagttcatgcgatcaatgcttactgtctaattggggcacaacagtactaagtcctgtattagaggcgatacctatctacgttattaagacaactgcctgctattttttttttccagctgctttctgcctttccctttcgcacagggaattcctttttatcagctggaatacattttctatccctcttaattgccgttaaaaaagaactacagatactcaaagacaagaagatataccttgtttttatttgacttacatcttcctacctctattttccccactttcactgcaacccaaatttgtgagttgacaaaactgatattttagagtgcttaagttgctgggaagttttttttttctatctatgcaaataatcaattacagactgtgtagtaatatcttatcaatgggaagtactgtcagatctgggatcttaagacccatgccagttcctgatctc

SEQ ID NO: 6732 - DNA, 6000 bp, Homo sapiens
aaaactgaacttgaacctctttctgtctgaggacagaacaattaaactaggcattttcagttaaatttagttcaagtctgggatgtacaattgcctcacctgttactgttcatcagtgtctaccctgctggcatccagcacttcccacgtctgtgttcctgtctggtctctgctctcttagggttgttgttggctttccctcttggctgacttccacactctgctggggaaccatggaaagtgtggctgctcttcctcacctctctatgcccaagatgacttgtgttcttatatggccacttcagtttctaaaatccctttactctgctgattcccctaaatttatctgaggattccattagccacatggttccttcatccactaccaatccaggggcgggtcaggaccccggctttttttagccatcacttatcagtttctaaactcctcaaagtcccctttccctaggctgggatgggaaatgaaggaaagtaatttcttcctactctgctccttttgtcatcattttaatgccttgactcatttaaagtttattcttttgatacttaaagaaatcccccccttctttttccaaaagtccaattagtgaaattccagattgctgaaattcagactaatgatgctgctatgagtttcaaagccctattttggtgctcaaaaacaaaagtttcgttgtatttttctccttctatatttggctctgcagatcctcctgaagcaaagtatgtttctagttaaatggagaggatcacttgtggtcctagtagtagtgggaaaaggagcgattgagttaatatctcaagattttatccaactacatttggttggctagatgacacaactgtcattacgtggaaagaatatggagaaatgtgaactacttgtatgctgttgttgggactgtaagttgatagaaactccctagaggacaaactagcgatatgtttcaaaattacacatacgcatagtttttacccagtgattcttctagaaatttcccttaagaaaataagtgaacaaatgtatgaatttgtataaaaaggaatatttattgctctattgatttatgataatagagatgagaaatagctcaaataaccagccatgaaggattttgttaaatgctatgatatatacatgcaatggaacactcttcagtcattcaaagtgattttgtatttttcgacattggaaaatgcccatgatatttttgttaaatgataaatgagactacaaaacatcatgcgtaatgtgatctctctttttgcaaaaaagtgtgtgtgcatgtgtgtgtgtgtgtgtatatatatgtaggtacatatatgtataaaacactatacatctacccacctccttacctccttgcctatcaagatctggaggatataaacagtggttctctctgggtgatagaattatggatcatgtttacttccttctttatggctgtttgtattatctgatgttgtaatagtgtttgtgtaatgcttttacaattagaaaaaagctaaaaaaattatcttttttaatgagaagaaaaaatattcaaaagaaaaaaaataaagaatttccagctagactcaatatttcaggagccttggggccaccttgctcagctgactggaaaataatgttatttctactcagacttgtaggtaaccccattcttagagtataagacagagaggcaacatatgatagaaaattctatgtaagagaaatcattatagttatagtgtgcattttcttaatactaggactgagggtaaaatggcatccaaaaaagctattgctcaaagttgttctctatactcctaatctcagctacttatatctaagcctacagctttgggatgaaatattgaaatcataaatttgcaccatctctttttcttgtgttatgcttttgagttcagtgggagttcatttaaaaagaaagtgtaaccaaagaacaggatctgaacaatagtagctattgaaaagaaatgaccaaaatgcttatatttaaacctgtcaaatgtgcttagattatttcataaacatggatatataatttttatacatatcatacatacggcttgtttcaaatttagtgtcgtgaaaccattttagacactttgagtcctgggttaattttgctgctgtagctgccttattattaaaggcatgcctagaaagctacagttaaaccctgctatggtttctcagaaaattactacattgaatacatttcaccaattcatatgtcttctgctgaaaggaaaacagactgagaatttaattttgattgatctgagaggaaaactcattccgtatttcatttttgtagcattgatcacgtgttttgttattagaaaaactcatgttctttaactaaatcataaagtgactccactgcttctaagaagtatcccagtgatataactaggaattgatatttcttctttaatcagcaaaatatgcatcagtattttttgaacatctacttggtggaaaattatttatttgaatgtgcagggttctcaaatgcaaatggcttcaggaacaggcatatagcattaatcatgtgatctgggctatctattatacatcagggagtgatggggcctttggtgagtgggaacatcatgttggccataaagccatagagattctttaagacactgtgcaggccaaacaaaatgcattttggtcctaattcctaacccctagtcacccaggaaaaatgttttagtacattaaatttctctcatgaatcataaaattttagagcacttacttaggtaatcttgtagatcttctggcacacactggtgcagcagcccaagttttcatgatctattttgactgcttggggcactagccaaactgactggctggtcccatttcatgaactctaataatgaaactggttcagtggttgaacatcttaaaggtctctcaggtagggtagtaaggaatggaactgggaattcaaatcaaaatttcatgtactttctccctttctctactgttggcagggtagtgctgtcccttaaaactgtccctccagcactgtgtcttagtccaacctagaggcagtctgtggctgactctatgtgtaaaccagcttggtgcagtagaccaagaactgtgaatatgaagacgtaggttccagccatggatctgtcgctggctaatcaagtggctagaggtcagataactcaactgtggaaacaaacataagatgtcagaggcagtctgaacccaggtttccaggttccaagctcaaagctccagctttcatatcaaagtccagattttcttcttttaaacaggatgtcatggtttcaatccatttccaacagatcgatttttttttttttttgagacggagttttgctcttgttgcccaggctggagtgcaatggcgccatcttggctcactgcaacctccgcctcccaggttcaagtgattctcctgcctcagcctcccgagtagctaggattacaggcatgtgccaccaagcctagctaattttgtatttttggtagagatgggggtttctctatgttgttcaggctggtcttgaactcctgacctcaggtgatctgcccgcctcagcctccccaaatgctgggattacaggcatgaaccactgtgcctggccacaacagatcaatttaacctttcaatatagagtgccttaagaggactgactaaacgactcttttttccaaccatcctcttttcttctttataggttgtatgcaagccagtatgtgcctaactatgctttgctgtgcttgtagtgacatggggctgtgaatgccacagttgcctcaactgttaatgcgattctgcatgccaagaattgtaataaactgcccttcattacgcagcttggaaaaaacaggcactcttttgttttagcatttgttatttgtattatgtggttaagcattgtgtgtacgcttcaaaaatgtatagctcatagtcattgaagggagttatgtgtagctttttcccttcctaataaatcgtttttgtgagaaccagctggtgtttgaagagctaaattccaggaagaaaaagaaatgacagctacagagcgtgggcaaaggtctaaaaatatgaaagcccaatctggccaagagacgttggcctgtacagagaaagtgcagtgacaatttcagcagagccagaaaaactgtcccttttctgcctggaaaagggttcatgtgagatgttaggaagacagtttaaggagaaaaaaatcctaagtaaatagaatttcagccaatactttcatgaacttcacccttctttggaatgtttttactctctaaggggaaaacagattgagtcatttatacagcgagtgagaactttactcaaaaggagtactcaggagatgttttccctgtggtgctttctgaagtcacaatttatgagctctgcaacattgtcagagaaatgttcatttccaaggaacttgtctcccttgctttctttattatttggcactgtacattttcatgactgtgaggaggattccctgacatagttatctgatgggaaagtctgatcctctcacttacaacaatgatttttcatgtctgttctacttccctctcccctttgtaactccctaaatttcacacatagcactctgactttatacatctttttctttgattctgcaaactgattgttaaatgtgtgatatgattcttggaaccatgtgacctctgggttcctaaatgcagatgtgattttggtcttggacagcagaaggagatattgagctagaagttaatgtatctttttgtatcatttttatttttaaacttagtatgtaaacaattggtgttacattttcaaataattagacagctgagggctaaaacagttgttttggtaagtggacattctcttctttcagaggagcctcagcataaaaccattttaataaatattttctacacaggatgagtaatttcatttcgccaaaagacacaatattcactttctggtcttctctcactctccatgttctcctgagtgctcattttgtaaatgccagttatgacccatgctggatagttctctggtcgtggttgaagcttctgtaggtttgtcagcttgccttatgttacttcaaagcctgcactcaactgttcttgaagaggaatttcccttcctttaagggcatcatctttccattttggagagaacagtagaatgccacttctaagtgtgctatgtcaccatacaatcttcctcttagatggcagagatgcatgggatgtgagcaggattgctttatagctactgctaattagatctagagcatttggagggcgtttccatttggaacaaccctctatattttggtgtctagtttttttcctagaagatttattctattttttaagctgaatacaatttttgcttaaaatgttctatcctattataatggctatgccaattcagtaagtaccatcatttttcttcttgttaaattttttttaaaaaatatgtttctcagaggactattttaagctggatcgtattacattgtacctcaaattgatgaatttattttatatatagatgtcctggaattcctagaagatttcatcaattgtctttagtcttgtgctttccattatttaacagcatgcctgccagatagtggttcttaagcccttgaagctcagacagtcttaagtaccaaatctatcaagatcccctagttcaaacacagctcaagatggtgatttagcttttaggtcattttaaacattcaagatattgtattttcattatgtttactctcctacatcctggaatttggaaatttgctaagatattcccatcacaaagaattatccagcttgcttactgaaactgggtcttatgccatattctctctgaatagtggtgaaataaatttacctctaggcaagtttcttgttagaattagtaggcatgc

SEQ ID NO: 6733 - DNA, 6000 bp, Homo sapiens
tcttcttctggagttacgtctacaaagtttcccaatatttttcatctcatttcaaagactctgatgttaacagcaaacctgaataataaaagacttaaaaagagattactcctaaaagatgcttaaagaaacgtaacacaaagagagaaaggggcactttaagggttaaaccctcctgtgtaggccacctaccatcaggacccaccagccactgctcagatatgaacagggcaagagtaagatcaaagccagtttactctattttcattcattcattcattcattcattcctctattgaaaaaatatgtatgaaggcccccatggaccatcagcttgaagtgcaatgctaatgagtggctgtcactgtccttaaagagctctcagttcagtgagggaagactggtaagcaagcaaggaattgcttagctgtcatgccattggctgagtaaaataaacctggaagtagtttgaagagaaatcaaaattaagagaagggcactttgggggatttttacaactagccttttacacttaaacaggaagcaccttagatcaaataggatccaatttgaccagttttccaataatatcctgccacctgttgaaacgcaaaataaatatgaccctaggcaaatccaaatcatctttggagggaaatgtatgcaataaatatgaaaaaatcactgatttgtgatttatgaccacaagtactaaatgtttcatttgcaatctcataaatggctggctagagcatgaaaaaaagtttaatttttaatagtttgtttaaaataatatttgtccctatctccttccgttcattcattcttaaccataggatagtacatgcttatgtaaaattaggagaccacagaaaagcatacgaaaatattatgaaaacttccacccaattattaaattaaaaattgtggacaattaagctccaacataaaaagccaaaatggcatgattgtgtgtgtgccctggagttcgtgatggctgattctctgatgtgtactctgcagctctgtcaggccccggccttgttcgtatggtcacagtctgtgctgaatccctcaaaacacatctggacaggttggaggaggtgaccaatgaatcgggctatgtggacgtgttgacccttctgcgtcgtgtcatgctggacacctctaacacgctcttcttgaggatccctttggacggtactgaaattttcactctcacatcttgaccatctgtcctttactgaacaaggagctaggagggataacagaccaaaggaatcacatgccattttctacattgctcttgtttaaacatttctaagtactcctcgtttttttccctagtgtttctgctttgttcacttataaaatataaatttccataaagtaggggccagcatctactagccttttgtatctttcctcattactctaggaaatagaattctacccacagttgaaacttaacaaatgtgattagttcgtttggttattaacatatcctaccaccaatcaactttatatatttaaccatttccagttgttcttttgggcatgatatatacatacatatatacatacatacccacacatatatacacacactcctccctcaaagctactaaacatgaaaacattgtgcctatatgataaaaatgtcaatattgctggtgatactgatgctgatggaaatgacgatattagctgccattaacgtagtatctaatgtgtgccaaacaatattaaaaattgctgtatatacatgtttgccatttattatttataaccttaacaagatgtctcactcataagactactttccgcactatgatacagaaatgaatattaaaacatgtgcatgctcatgtcaaactcatagaacttgattttattttggcaggattaaaccaatttgcaacttgagtacaaatgccaatatttcagctagttcttgaaaagttgtgccattgtgcaaaagtcattgaattatttgataactttttaacctaatgaccaaacacctgacaggaatggaattcactggacttgtatctaattgttttacactgttttctatgggttacattttttattgccattgtgacctttatccacacactaacctggaaagtataggaataaaagaattggcattctttctgatacaccctttttgttttcttcttaaagtcatttatattatgtattactcttaaagaatgttttagtctccattttagtagtctgtgcataaggtagtaatacatgtacacaaagaaaaattcacaagcccattcaggtgtcttttagaacattatttaccactaaatatttatacagttgacataatgcttattatgcccttgaataatagaatttgttttgtttttacttcttatccataagcattggccttacattgcctcaagaggaacagaatttattattaaacaggattcttaaatccataactcatattgtgacttcatacattttgtaaccctagtagtgaatataccctaaaaacctataaatccccccaaatcactctactgatgaaaaaaaaaaaacatgtgcatgcaactctaccaccaccaaaaaacaaacattaatcatttgagtagtttggtggttaccagaggatgggaagggtagtggggagagaagagatgaagagaagttgattaatgggtacaaaaatacaggcagatagaagaaacaagacctagtgttcaaaaaatcagtgtagtgaagaaaataaataataatctatgtacaaccaagtagctagtagagaaaatttgaatgttctcagcataaagaaaagataaatgtttaaggtgatgaatatcctcattaccctgatttggttattacacattatacaaatttatcaaaatattacagttacccctaaatatgtatatccattatgtatcaatagaaaattaatcatttggattaattccattctactgttggcattaagtatgtacaactcaatgtgacttttcctgaattaacttacaccagtgttcattgattcatacattcattcatcaaacatttattgattgcttattttatgccaggcactgttctaggttctggggacataacagtaagcaagacagataaaattcttgccttcaaggggcttacattccagtgagtgatgtggacaggaaaagacatagatatctaataaaatattaggcaataataagtgccttgaaggcaaaatgaagcagggcaagaggacaggaagtgaaggagggcaacagtgtgtgtgggcacagatgtcatggagagggtggttagaaaaggcctctgcagagaagacatttgaccatagctcgaatttagtgaggccacaagccacaggcagatatgagggaagaacactccaggcggaggaacaatgcgtacttttaacacttgccccaaccagctgaactggaacacatgctacctggtatactacacttgggcacatagacaagctataagccctccctattgccgcatctcccctactccagctactccatacaagagctggagacacttcatctgatggccatttggatgggagcccacaatcacttgaagaagttttagtcacactttctcacctgatctcttttcaggcagggatgccactcccagggtgcctgttctacagacatcacttctaaagtgaaacaggcgtgtattttaaaagtctagatttccaggtccccctctagccttgcctcattaggaaggatcatataaaaggatttgtaaatctctccattcatttttggatgcagactatgatgctggcaaacctgtgcaacccacagagttacataatcccttttcacagggatccttgttaaactctcaatttgcctaagggacccagtgcaagaaaagagaaaaggacatggtcctgaggtcagacagaagcagctccagcctcagggcctgcctgtcagccacactggctgtatggttttgggcaagcttccgaatttctatgaattgcaatttcttccactgcaaaaggatgacaccacaacgcccatggcaagaatatgaagatgaaattaaaaatctctttcacaaagtgcctagcatggtgactggtatttagcagttggaaatatatgtctgttctctcttttgtatattatctggtataatttgaaaaaataagggtttatttcctctagtattcaatttaattaaagagcatttattaagagctgattgtatgtgaggcttaggacaaggcattaaagaacacaagatgaattctacactctggactgaatataaataactatgaaagctatgtgatgagtgttatgggggaaaaatgaataaagcaccatgagaacatgattagaagctattaagtgtataatccagataaactgtccacttcatggctctgcttacccagcaccaaatgaagttaaaatgtggttgttagccacctaacaggctctgctttttacactcccaggtaccagagtgaaggccataacagccataattactagttccatttgtacagagaaacaggagctagttgaaagctcagcccaaggagaatatgtgaaattctaggctgaaaacttgaaaacacaaacttgaaaactggcaactcactggttaagtaggccaatttggatggcaaggagaacaaatcagtgcttgatttgtctagtggtattcacgtggctaaaactcctactgaagatggaatcttgctgagcttagaacccccagactgttaggagaatctgcagggaatgttttctgctcagagcaaccttcttaggctcacattttgctcaactgctctttcttgtgtatgtgtgtttttttttcctacagaaagtgctatcgtggttaaaatccaaggttattttgatgcatggcaagctctcctcatcaaaccagacatcttctttaagatttcttggctatacaaaaagtatgagaagtctgtgtaagtaatacaactttggaagatttatgagtacaattggattggtttttttcccttgtgtctttgctgtttttcttggcctctcaggtaacttttctgctctctagagcccacaagggagctgttgattaagttgctgatgaaacactttttacagcaatttggctgcatttggccagaccagagagtaaatgaagcctttggctgggcagcttctcggcaagggggctgagtgtgtggtctgggagcttcagcttggtaactaggacactagtgtattttgagttgaagagaagggtcgactgatcctgtcattaatatctgtcaaaattatctttgcacaactaaaaaactggaactacagaatcaatttatagttgtgttgtttttgaatgaatttaacataattcaacttgtaagaactgacaatagtctcaatagaattttttcttaatgagtacaattaacttcaataaaatgtgtgtgggtttttgaaattatgtatcttgtgttttgggggtcctgaaattgtcattaaatgactttgttttggtcttagaatcatccagcagaaaactggacaaatgcccagtggcctacaggctaatcaatgggcttgtagagtacaggtagccagtcactaaacactgctacctctaaccaccagtggaaagcctgtggaatctagaaacaggaactcctgttttgtgtcctgtttctaatggccttgggaagttatttaaaataagatataacctatcttctagagtaggggcataggttaatgagatcatataagtaaggcaattagcatagagcatggcacatagagggtactaaatatgttagtttctccctttcctgtgttcatatcttcctcagatgttcctaaccatctcaagttctccatctctaaatgtccccaagcttgtctgaagacctgactttattctacctgtggattttgaaattcgataatattagtttctaga

SEQ ID NO: 6734 - DNA, 6000 bp, Homo sapiens
tttttaaaaaagaaaaatgtagataacttttatttgttaaataaaaccaatgtaattgctagtttaaatgtaagttgcttggattgcttgctctttgtatatttgaacagaagctagtgtatttaatgggaaaggccttttaaaatggcaaaaggatgattgtttactttgctgatattcagacagccctgaaatgattcattaaaaagcctacctctttatttgccatggtctttgcccttctaagcatttactctgtagctctgcatagcagtaatctgatgatcagcagggatttatttcatattttgattatttatgcaaacacattcatttagctaaaaataatgaaatatgaggaaggtctcttttcccaaatagaattctgaactgtgcattcttaatgattttatgttcagtaataaagccacatgtactagcatgcagcaaaaaagttttggaactgtatggtacttgtggtcatgaaatatgcaacatgtatatagaagactgataaaaataatcactttagctatgtccctcatctagttaagcggcttagcctgccagacatttctttattaaatatttttcaataggggctaataaatattttaactagtctcttaatttaaatatgactgccatatgtgttttatacttaagtcaccctgacttaagtaaaagctgataaagcttgattttttcacttcagcaaggctgcttaagtttagggattcagagctttcacagactcaaaacctagtggttttgaaaattttaaaaacttgggttttaaggggagaaaatttatctgaattaataattttccctaattgtttttaagagtacctgtaaacattctaagcttctggtattcaaaatctgatagattggtgccctgggtgtggaaaacctgaacaaaggcagaaataactgaaagatcagtgagcttttgtgcttatacactgatcctaatatagacatttagagctggagaggatggttggagagtctccagtcttggccctctttgtttagccacaaaattttgggtgagcaaggatagtgtggcatgaccatcacacagagtgtcaactctagagacccctgcctttgtttgtactctgcctccaattacaagtataagatttgcagaagattaaattcctaaattttgtcaggaaacctgacagttaattgacactttagctggataaaatacagaggtaagatggcagagttgagtagttacaatattgattgatttttgtcttggtttggaaagcctaaaatatttatgatatggccctttaagaaaatgtttggtgactcttgctctagtccattaaataatctagatttgggtaggaccaaagtgaccaagaaagaaaaacctgaaaaataccaattaattataataacaggacttttgaatataaaagaatgaggttttaaaaattttgatgtaccccttattaattagcaggatatttcacttctttgagagtagccactctcttaactcatgatcaattatgaattttatatttaaagaatctggtcataataattgacaaaaatctagattttgatttgtcaagctcctgagtatctgctgtgagtaaggctgtctctctacaaaggcaatacggggaaaatgttctaagtctttactttggggtctcatgaagttggcatatcctcaagatagaacgatcaagagcagatttcataaagaactgtttcccaaggccatgttgctttttttctggtctctgtgccgcatgtgaagccggtggagactgctctttcctcctcctcctcaattaccagttattcgttaaaatgagaaacttcctcctccttcccctcacaccctggccaacattgcaaaatgttatataaatgaattcatatagtttgcaaccttttgtaccttcttaaaaacaaattagtgtattttggatatagatctgcctttttaatttcatgtctgcatagtattccattttataggcatactttaatcaatattgatgggctgtttatagcaaaaatttgtaactatgaaattacagtatcagaatgtatgaatgaattttgataggtatttccaattttttctcagaaaagagtgtttctaatgtgcaaaagttcttatttttgtataagaatgcctatttccccataccaccagcaacatggtatatcatagaacattttactttgccagtcagtttttttaatcaccactagtcatttttttcaatttttgcagttgctgggtgttatatttgggctaagtgaagtttaattctcatgccttgaatattgcaagagagtatttcattgcaagaaataatgttggagataaaatatttgtgtaatgtttccaagtatgttgttggaatgtttcaaaaatcaatggaatttcagtatagcaggcctttggaaatgagcctgtaatagttaatggtgaggataagaaattattatgtagagcttaatattcttaagcagactgattcccaagcatgagtagaattttatcaagtttatttgttttaaaatcaatacaagttgatttcattgaaataaacaaattgggaaagaaatacttatttcagacctcattttgagaatgctggcttctctaatagaagttaaccaattgaaaggagtgtggggaggtgggggtgggaagagagattttttttcccttagcaaaccagtcatttctgagcttagcatttttattgctcaatttaacattgcctgagaacataattgcatttgagtttatagctgttctaacaatgttttgatgtacagagaacagaaatgtatttctctaggaattaggtacttcatcggtctagaattgacttaaattgtttagtaaactttaaataatattcacctcttaagtgtgtttaaggtgctttgcaaatggtgaaatggtgcaaatggtgcaagtggtgaaatagtgaaactgatggatttgagcaggaaatatatatcccgaatgggcagaatataggttaatgtgagggtagaaattggagtgggtgactttataccatggagaattcagattgaggacatccttatgtgtatgtgtgtcttagtagtggttaatcttccacttcaaactttgagagtctgtttatggattgggtacattttgcggaaattagattgacccccaaatgtacagaggaccctgtcttttaaaatcaaataactgaggcttttcctcatcaatgagaagttagaacagcaaattatctcacaaaaaaattatattttgggagaaggtaggtcaaaaattctagaatcattttctctttaatccagcttaatccttttgcttatccaaaataacatggcatgactttattactattccaatatgctaccacagaaggtttaggacttattgaaataaaatgatgacggaagagtgacctttcaaaagtaatatgtatgtaataccacagaaccgtggatttcaaaaatagtgaatgtgaaggaaacaaaaaaccttccaactacattttttttggcatcagaatttgttttctaccatagggctattcacatactgaatttcgttttccaaaaaccaaaagacctgaaaagaccactattaaacacacacattcttgctcattctactccccaggcctttgctgtccagaatggtagccactagccacatgtgtctacatttaaattaatttaaataaaattaaaagtgcaactcagttgcagtaactatatttcaggtgctcagtagtcacatgaggccacatgacagtgcatatgtggtatgtctccatcgctgcagaaagttctttcggacagcactcgctagactagtagtggggatgccaaataagagagacttgattccctgctggctttacgaagagttcctgggagggaagctgaagcttaggacttagttccttaaaaaataatgtactcataagaaattccttctatcactgttgttactgcctttttgatgatttgaagtcattgaactttgaaacagctcttttaccaacaaagaaatacacacctgccatgagagggttttcagccttttttccccattgttgttttctttcaacagctgctgggcatgctgtgtgcttgcatcgtgttgtgcagaaggagtagagatcctgcttacgagctcctcatcactggcggaacctatgcatagttgacaactcaagcctgagctttttggtcttgttctgatttggaaggtgaattgagcaggtctgctgctgttggcctctggagttcatttagttaaagcacatgtacactggtgttggacagagcagcttggcttttcatgtgcccacctacttacctactacctgcgactttctttttccttgttctagctgactcttcatgcccctaagattttaagtacgatggtgaacgttctaatttcagaaccaattgcgagtcatgtagtgtggtagaattaaaggaggacacgagcctgcttctgttacctccaagtggtaacaggactgatgccgaaatgtcaccaggtcctttcagtcttcacagtggagaactcttggccaaaggtttttgcggggaggaggaggaaaccagctttctggttaaggttaacaccagatggtgcccctcattggtgtccttttaaaaaatatttactgtagtccaataagatagcagctgtacaaaatgactaaaatagattgtaggatcatatggcgtatatcttggttcatcttcaaaatcagagactgagctttgaaactagtggtttttaatcaaagttggctttataggaggagtataatgtatgcactactgttttaaaagaattagtgtgagtgtgtttttgtatgaatgagcccattcatggtaagtcttaagcttgttggaaataatgtacccatgtagactagcaaaatagtatgtagatgtgatctcagttgtaaatagaaaaatctaattcaataaactctgtatcagcccccaacatattatttttcattatttgggggatatttcagttccagagcagcagtatcatgttttctttgttggtgctgtctatagttcatcatggtttacgtgtgttttcgttatagctgttgccagattctaaagggcttgatattcaaaaaaccacagatgctttcagtccagtatatcctagaaatatagagctctactttgtgcaatgcactggggatacagtggcgatactgtccttgtcttcaaggagttcggagtcctagtataggagacatacataggagaagataattttcacactgcagtggttgtagtaatagaatgggagtccaaaggggagttccggagaggtcaggggtgacttcctggaggagatgcccaagcttggaggctggataggctttgttgaaagatggtacacaagagtgtgaaacaaaattgtgtgtgcagggagcttaaaatacaaggctggggaaagaagttggagaagcaggaaagcccaggccctctagtgtcttacggaacatcctgtggaggtgagagctgacttgtaggtggaagcagctctttggaggtttgatttggaaggtgaactgagaagaaggtggtgatgcaagccggccgtgctgaagccaggatgaattggtgtgactgggcttcagttaggctggcatagcagttgagagagcttagcagtgggcagcagggcactgttgggggcggtggtgagcggtggattctggctgtttggaggcaggacagtggtggaattcgatcattgattggacgtgggacagagaagggagaagagaagactcatctaggatgagtcccaggtttctggctcagtcaactggggaaacaaagtcacagagctagggagtagttagagaacacatctgggggtgtgactcatggtcagttttgggctcgtcagttttgagatgcccaaatatc

SEQ ID NO: 6735 - DNA, 6000 bp, Homo sapiens
ctccgtcagggacatatcaaaaggcttttcaggggcaggcatggtgccccagtgccagcctggggggtgctgtaaagatgggctcccttggcgaattccatccaccctgatgggaggagcctggcagcatgtgctgggagccactgctccttctctcaccacgcccaagctggagcccttcctgacacctgatttcgcacgattgccccttggggtcatcacccaagcctaatggggtgtctgctagtcactgcagtgggaggtccatcctggtcccagaccaaggccccttggggaaatgccaaaggctcagaacaccctcagtctcaaaggtgggcacccaggactcccctaaagaccctgggctcagactcggcctccatacaccagacgagaggcggcaggtatttgtgttttgcttatgcctgattgaactaatccacgtgtcccttcagttcacacattgcatttatttaagaagccttcctgcaagctcaggggtggcaggggtggcaggggtggcagacgagtgaggccctcagggagcagagctgagggagcaggaaggcatgtggggccctgacatgctggggcctggcacgagtccggcctgcctgccatgcttggagaagggctcagaagaggcaggcacttcttctgggggcaggtgtggggtggggacaagctgggagacagaggccagaaagactttggtaaggagtttctcctggactgactcattcattcatttactcaatccttcgtgcatgtgcgcatccactcaacatctcagtaatgaggacctactgtgtgccaggcactgtgctaagtgctggtgaggccctgctgtcatggggcctgcagtccaggactcaagttatcaccacacagatcaaagggaaaaccacgctgagttctggggctttgcagaacaggtctgtggagctaatggagctcataggagcttgacttggtcagggaggtcagggcggcttcgctgcggaagacttgtaggatggaaaggaattaaccaaggcaatagggaagagaagatccaggcagagggaacaggttgtgccaaggccctggggcttgatgaaggccagagtggctggggtactgcaacaggggggaagaggccaggaaatgggcaggctgactgtacccgggcttgtgggtgcctttagaaggtctggtctggactctacaagcaaaaggaaggttttttttagcagtggcataaaatgatccaatttgtgttgagcaggttcaagcaggcccgaatggaggcagggagtccataggggcgctgctgtgtccacataaatgatgagaatggttttgaccaagtgcatcttgcgatgggggaatgtgggtgaattggatgtggagtgaggtcaggcggtgtcgaggtctgagaaactgggctggtggatggggaaagtgacaatgaacataattttcctgtaaggtgtgtattttattttgtatggtaagtaatatcttcatttctaccaaggatagaaagaggcaattgttgagctttgggtaagaaagaagggaacgatttttttcttttttcttttgagtctcactctgtcacccaggctggagtgcagtggtgcgatctcagctcactgcaatctctgcctcccggattcaagcaattctctgcctcagcctcccaagtagctgggattacagacgcccgccaccacgcccaactaattttttttgtatttttagtagagacggggtttcgccatgttggccaggctggtcttgaactcctaacctcgtgatccacccacctcggccttccaaagtgctaggattacaggcgtgagccaccacgcccagccgggaatgatttttaatcattctactatttggtgtttaatatgttttctcactaaatctgttcaacaaacctgagaggcaaatactgttatttatttatgaggagagaggttcagaagggtaaagttacctgctcaaggtcacagctggaaagaggtgaagccttcagcaaaaaaagcaaaacaactcatttcattttattccgtgagctgataatggaggaaaaagtatttggcaagaagcggcagggaggggaacctggaggaactccctgctcttgaagaatgcaagggaggctgggaccttgtcactgaggagcccctggcatccttccagagatgcaaccaaaggggtgaccccagtgtgttcttaataggagccgggaaccccttctctgtgcacctcccacctcttgcccctgggaagtccttccctgactctaacctcagttctgatgctgttcccaccctctcagctctcaagcagatcaatgcaatgccacctggccgcttgctttgcccactgggcctacagccggaagcctgcccttcagccctcgggcctgatcccaggccgcctgcagcctgtaaccagacactgtttgcttccagcaggcaccccccgagcccagctccacacaccgttcctggatctcctctccccaggcggagcgtgcccctgcccagtccagtgaccttcgcctgttggagccctggttaatttttgcccagtctgcctgttgtggggctcctcccctttggggatataagcccggcctggggctgctccgttctctgcctggcctgaggctccctgagccgcctccccaccatcaccatggccaagggcttctatatttccaagtccctgggcatcctggggatcctcctgggcgtggcagccgtgtgcacaatcatcgcactgtcagtggtgtactcccaggagaagaacaagaacgccaacagctcccccgtggcctccaccaccccgtccgcctcagccaccaccaaccccgcctcggccaccaccttggaccaaagtaaagcgtggaatcgttaccgcctccccaacacgctgaaacccgattcctaccgggtgacgctgagaccgtacctcacccccaatgacaggggcctgtacgtttttaagggctccagcaccgtccgtttcacctgcaaggaggccactgacgtcatcatcatccacagcaagaagctcaactacaccctcagccaggggcacagggtggtcctgcgtggtgtgggaggctcccagccccccgacattgacaagactgagctggtggagcccaccgagtacctggtggtgcacctcaagggctccctggtgaaggacagccagtatgagatggacagcgagttcgagggggagttggcagatgacctggcgggcttctaccgcagcgagtacatggagggcaatgtcagaaagtgagttccggctgggctgcccggtggggtggatccgaggtgctgaggcaaggctggattctgagggccaaggaaggacttagcttgcaggcctttgaaccctgtggagcccgagactggcccattgcttcacctccagctgctggcaaagcagctgcaaatgcaccgaactgggagggcttccccacccctcaccagggagctggggatgagggacagagcgtcccttggacagacaggaaaaccgaggctcagaggagagaaactcacccgaggtccctgagagcctgctggcaccccgaatccagaaggagccccaacccccacgagtcagctggcctggcagggctccggaggctcccggcgaggcgggggtgggagcaggagcaggggttaggctggggcagccttccatgtacccctttccctgcatgcctggtagcatcctcagagcccctcccacacccccagctctggcacaccctctaaccttcctgttggggcagggtggtggccactacacagatgcaggctgcagatgcccggaagtccttcccatgcttcgatgagccggccatgaaggccgagttcaacatcacgcttatccaccccaaggacctgacagccctgtccaacatgcttcccaaaggtgagtgggccctgcctgcggccacagggccagggggcaggcaccctgggctggggtgtggggcaggagggtacgtcctcacacacacatgctccctgcccaggtcccagcaccccacttccagaagaccccaactggaatgtcactgagttccacaccacgcccaagatgtccacgtacttgctggccttcattgtcagtgagttcgactacgtggagaagcaggcatccaatggtgtcttggtatgaggctgggcccatctctccttcacgtgggctggccccggcttgaggggtcttcccgttctcttcatccctgtgccagtttctgaattgttaggccagggttggaatcccacctctgagtgatttcaggcaagtgtcttgttctctggttctccatttctgcacctgaaaaatgaaaacaatggtttctcttcatgaagggagttcctgacccaccggttaccagacagacggtggctatgatgattgttattctccaaaggcccttctctaggacccacagcctccagaccccagtagcgttcccctctgctgaccaggcctctaggtttagcttgattggcctccagccctggcccatcagggatccccccagcccactgggccctgggacccagcccacctgccccaggatcaaacaggagcccctggtctgcttcttcctcacaccttgcagatccggatctgggcccggcccagtgccattgcggcgggccacggcgattatgccctgaacgtgacgggccccatccttaacttctttgctggtcattatgacacaccctacccactcccaaaatcaggtgagtgggggtccttgaggagggaggcagtggatggagctccactcccggagttcatcctgccaatggcatcgcctccccagaccagattggcctgccagacttcaacgccggcgccatggagaactggggactggtgacctaccgggagaactccctgctgttcgaccccctgtcctcctccagcagcaacaaggagcgggtggtcactgtgattgctcatgagctggcccaccaggtagacccccatctcggggagtgcggagaaggaaacaggggctccgagaggagacggcgcaagtccaggctctgccccgggctgctgagaagggaggagggtgccgcctggcagggcagcaggaaggggtcacgatggtgttgaaatccccactgtgcctggcagatggccagccctggggagggtagttctggggattctcagtgcccagcctgggcgtggcttgcccagctgacccctccccccacagtggttcgggaacctggtgaccatagagtggtggaatgacctgtggctgaacgagggcttcgcctcctacgtggagtacctgggtgctgactatgcggagcccacctggaacttggtaagccagctgcccaggggtctggtgcggggggcatggagggagacctgggccaccgctaccaggccagtctcctgatggccctggggaatttgcagaaagacctcatggtgctgaatgatgtgtaccgcgtgatggcagtggatgcactggcctcctcccacccgctgtccacacccgcctcggagatcaacacgccggcccagatcagtgagctgtttgacgccatctcctacagcaaggtgcagcccgctcctcgtggggcacggggaaggaggtggggacttggcctggaggggcctcactgaaggcagggtctgggggcacagggtcctggtggctctgcacagccttctgagcgccccctcacccccaccccagggcgcctcagtcctcaggatgctctccagcttcctgtccgaggacgtattcaagcagggcctggcggtgagtactgcaccctgggccagccatgagggtgggtctccttctgcccctcgcccttgacccgggcctctgcccaccacagagggggagcctggggggctccagctgtgctctcactgtgccccgtctttccacagtcctacctccacacctttgcctac

SEQ ID NO: 6736 - DNA, 6000 bp, Homo sapiens
acatctggccccagctgcactgagccctcaggtggccatgctgctgcccagctgtccagtgcctgggttcctacagggagttccctcctgtggataggagctttgtctttgtgcaaacttcccagctgtggaaactctggcaccgctttaaagatcaatgcatttcttggcaagggatgggaaaggcaaactcctctccacaaggattaagtcttaacaccagaagccaactgtcctcagcctctgcagtgaggttgtctcctaaagaacattcaggctggttcccagtagtgcctgtgctggcggcacccagcgttttctagttaggaagatcacatcccatctggctggtccacatggttatactgaacttaaatctcttttgtgtctctatcgtacacatgaaagctcacacacacacacacacacacacacacacacacagtgtgagaagcactcacactgactcagcgtctgatggaaacggtgtacacagctgataagcactgaaggactttgcagaacacccagggctggaataggccagtgtgtgaaaccagaacgtgagccctgctcacttgccctttcctgcatctgactggaaatgctacaaacagaaggaaatagtgagcgaaattaacaacctcatgaggatcttgcttgtaagtttaatagcagcattcataatgaagcagtgttttattgggttaacagaggttaagtggcaatattagtaaagtggtcattatagattttcttctttgcaggcagtgaacagaaccttctgaaaggatggatgattataactcctcagcattcactgtttcttaaaacaggcctttctgaaagttttttttctttaataaaaattaccactttttccaaggacccctgtttgaggcgtgagtggagaggcttcatctttaaagaagctctaacagggaactctgtcggtcgtttgaggcttgctgccaacaaacaattgaggtatttaccaagggtttccaagaaattgctgcaaattatatgaaatgttatactggtaacagacgttcaatgtattagcaacagaaaagaaatgtgaagtgtgtgggaacaaagttgccatctgtgagaaaatgctcagtaaggtaggtggcgatgaactttaataatgtgtcataaagagtcacactcatgaacacagaagggaagttaagtgatctgggatttttgaacacatttctgaatactggtctggaatcactatggaggaccgtttaacgtgatccagcagaaagactcatttggagacagagccggactcccggagcccctccaggtggaactcactccacgcagagctcagactcggtcccacactcctgatccctgatccatcacagcccacctcttgggccactcctgtgccattgggactttcatggaataactacagttaagggcttccttacaagtgttcctggtaacagttaatacctccccttcttttatgatgagaaaaatggtcaatgattccctcaacagagaaggccagtagcacagtgaaatcaagaagcccggaacatgaaaagtctttcctcagctccctgcagtgaaatccctataaatgcgaatcaccctgcctactccttacctttaaaaattacttagggtgagggggctttaggatgaggacagccttggcctccagggggctgtggggaaggacgcatgtgtgtgcattgggggcagatgttccagaccctcgttgtcctccctggctccttgctggtattgactagtggggctgggcatgggacaggccttcatactgggggtaccagtcctgtccagctgtttgggtctctggctgtcactgaagttcttgattccaggtatttgctactggctgtgaaatccccacttaggatagccttgtctcctgagccaggccccttactgggacacttttggattcttccccaggagaactgcctcagctcaacaatccagctgctccttccagatgtgctagagcttgccctcctgctcctaggctgcatgccggaattggtccctgcccctggcagacttctacaggacctcagtttctctcttctccttccaaccctctcttggcctggcatatccctcttctcccagagggagttcccgtatgtcttactctccttctccagggaattgtaagccctcaggctcagcctttacaaagaaaagggtatcctttctacattacgaaagacccccattaagcctgcaggtgagacaggtgagactgttaacctaggaactgagggacaactaggaaccaggatattgaggaggacaaaatatttggcatcctcagaatattattcccatcagatatttatatactttttttttttttttccttgagacggagtttcgctgttgtcgcccaggctgcagtgcaatgcaatggcacgatctcggctcacagcaacctccacctcccgggttcaagcgattctcctgcctcagcctcccgagtagctgggattacaggcatgcaccaccacccccggctaattttgtatttttagtagagtcggggtttctccatgttggtcaggttggtctcgaactcctgacctcaggcgatccgcccgcctcagcctcccagagtgctgggtttacaggcgtgagccaccgcgcccggccagcttttcactggacactagtttcgaagaaaactaggtaagtctaaagcaggttagaaaatactgaaatcgttgaatatgctacaaaattgaacatctgaatctggccagattcgtacttcatgtaaatcactgtgaatgatggggctgctgaatttgggggatctggtgactcctcggcatttgtggtttatggtcttagtggaaacctttttcgatggttttcgagcctgtaattcatggttgtatgttctgtatttttcccaagaccactgctggaatcctgtattcactgcataatgagtattttatttttagatgtggatcaccccttagggaggggctctgtgggaaggtaggtaatgaactatttttaatataaatcacaagtgtcaaagaaagtggtaatatccaaagaataaacaagagtgaccaccattcaggtgccgagaaggtatctgaagctcccacaggcattttaaactgtgtgatagtatttcaaccatttggtcaacaatgaagaaagatccaaggattgccccaggcatgtgtttatttgattcaatgcaggtaacttctcaggcccagggaaacactttgcccttcaaaagtttcattagaaaaccccaatatactggtgactaagtaacaagactgaaactctacacaaactttcgttgtatggagacctccgcttttgctgccttagctgaagtattgcagaggaaatgtataaaacttaaaatccagagtagaggatctgggacccaaaatccgtctttagaaatccacggcacttttacagacggactatattaaagtagggacaaagtcccaggctgggggtactagccggctatctgcccacacagtatgtaaatgaaagtagggtttaccatccagggcattaacttcattttccttgtcttcgagatccattaaatgctagtactgtatgagaagcgtggaccttaagtattaaagatggctttttcttcttcttcttcttatttagcgtagaaactagcaacagggaacaaggtaactgaattcacggtccactcgcaggcgcgcacgtccccagggctccgggacggctgttccctgcgtgcggccgcgggactgcggacaaagctgcagtgtggtcgggagcgcggggccgggagcgcggggccggcccggcggcaggaagggcgtggccgtggggtgcagcgaggacggcccgtgcgggaggaacgtgcgcagcgtggagtctgggggccgagaagcccccactgcaaggctggctcccgagattcgcgcccgggcgccgcggtgcgggaagcggccgtcctcgcggggacgcccttgcgccgggtgctaggtgcggatcacgggcagctccggccccgcgggcgccgggcgggggcccacgccccctccgcccgccagctccagtcgcagaccgcgcgggcggggcgcccgagagggctttttttttttttggtcaaacttcggccacgtgaaccgcccctcattcacttttgcgccaatcgcgcggcgcggacggatcccgagaggggccacggctcgccgccggcggggccacttcataacgcgccgtgcgtgacgtgaggggctcctgttgcaatggcgagctaagccggaggatgtgcagctgcggcggcggcgccggctacgaagaggacggggacaggcgccgtgcgaaccgagcccagccagccggaggacgcgggcagggcgggacgggagcccggactcgtctgccgccgccgtcgtcgccgtcgtgccggccccgcgtccccgcgcgcgagcgggaggagccgccgccacctcgcgcccgagccgccgctagcgcgcgccgggcatggtcccctcttaaaggcgcaggccgcggcggcgggggcgggcgtgcggaacaaagcgccggcgcggggcctgcgggcggctcgggggccgcgatgggcgcggcgggcccgcggcggcggcggcgctgcccgggccgggcctcgcggcgctagggcgggctggcctccgcgggcgggggcagcgggctgagggcgcgcggagcctgcggcggcggcccggcgggcggagcggcgcgggcatggccgcgcgcggccggcgcgcctggctcagcgtgctgctcgggctcgtcctgggcttcgtgctggcctcgcggctcgtcctgccccgggcttccgagctgaagcgagcgggcccacggcgccgcgccagccccgagggctgccggtccgggcaggcggcggcttcccaggccggcggggcgcgcggcgatgcgcgcggggcgcagctctggccgcccggctcggacccagatggcggcccgcgcgacaggaactttctcttcgtgggagtcatgaccgcccagaaatacctgcagactcgggccgtggccgcctacaggtgagcccctgctccccgggcaccgcctcctgcgtccggcatcccggcggccggcatcccgggtgctctcctggctctcgcctccgcccgcttcctaggcccttcttgggcttccggcgggatcgggttgcctctcgggagacgccgggccgagggagaaaagatcagaggcgggatggtgagcgcggcgctcaggaacatggcctttggggtcagatggactagtgtggcctcgctgggtgtacctctcaccctgatgaaggcactttagcctttgcaaatcgaagcttctcgttagaagggcccgacagatcgggtctccctcataatgttggaaaactcatagcacagtacctgatagtggaggcagttggggctgatactggattccctaaaatgtgcacctttgtccttgcaaagctggagcccgtgtacgttaatctagttctagaacctttccacatcatactctcacatttcgcagttggaggcactcctataaatgaaagagaatgcccgcagcatattggaccacaccagtctgttgagtacagagagagagaaccttggggaaaagcagttcttggcccttggtagattcagtggaaaactgcattctggtgttaattagttcagcttggtggtgtatgcatgttatccagtaactgggctctagttggccaaatgagtcataaaagcagctggaattgtgttcaggtttaacaaagggattagccaatgtagtctctagaagggagatgattttggaatggctggcatggttagaatcagatttgtattggagtgaatttgaagttggagagggttgtagactcgataaagggatttgatggaaaccctatatgtgtgaagtatagagacacttact

SEQ ID NO: 6737 - DNA, 6000 bp, Homo sapiens
ctgtggccagctgaactctgcactgctgatacaggagacaaagaagagccacttgtgctgagaagagtgggggtctctattaaatgtggccaagactaatttaattgacataggtatcatgaaagcgatatagtaaaaagtatttgaaggatgaatgggaatttttactgagcaaaactggatgaatgaaacattttccactgatcaatagatgttgttgttctgtagacagtgtctctctcaattgaatttttggataaaaaagacaaagactcaaacatttcttgcagagcagctctccaaagctgagccagaatcaaagactcagtggtgtcgcccattattacttattaattattactattagtactaacctcttaaaattctactatactttgtcaattttacagcactttcttataaattacctcatatccattcattcattcattcatttaactaagatgttttgagcacttatgtgtaaatcctcatagtaggcatgcctgggggacaaagcactgcatggaatcatagcaggtaaggcccccaaaattgttgccatatagtgattgagtaccctatgctgaacattttacaaggtttatggtctatttctacagaggaggaaactaagtctcaaataacttcgtgatttccttgactttgtccctctcgtatttccaatacagaccacataaattattatcatctctgcctttgcccttttgtacacttactatatatcttgctgccagcagttatgggggaaagggtacaaaggggcagaactatttacttaatgctggccagaactattgtactaaatccaaaaaactgtgaatagggttaaagtagttcaaaaggaaaaatacgtttccatcctaatctgatctactgtttgtatgttaaatagtggcatgctgaacatttggtataacctaatgggaaatccctcacgggcagaatagacttagactctgtgaatacatcttagagaagtcacatcataccctcttttctgctatgtaagcaaggcaccaccagccctaggccagtagtgaggggttaaatctcgtttcagccctgctttaagtgaacatacattagtcccactgaaggcttggggagaagggataaaatgggaaatgcatgagcatttgaaaaatcaaaaatagggttgtcagtatatcaaataaaaatacaaagtacctacttaaacttgaatttcagataaataatgaataactccttagtatagctatgttccgaaatcccatcgattgcatggctaacaacaggttgcaaaatagaggcaatttattgtctgaatattgcatggcacatggactcattctgaaactgtttatctgtaatttgtatttaactggatgtaatttgtattaactggatattttatctggtggtcccagttaaaaagaaatataataccttcatcaaggttcttaatttaacgtactagagcatctcagaggtcaagagagcctgaattacattctagaagaatttatgtattttttcattttacaaattaacacttttaactataatgaataatgaatatgttcactagataattatagcatacatatttaaaattaaaccagatattgattttttatattttattttattgtggtaagaacacttaaaggagatcttaccctcttaaatttttaagtgtataatacattattgttgcctataggtacaatgctgtacagcagatctcttgtgcttgcccatctcacttgactgaaactttatgtctgttgattagtaatgcctccttcttacttactagcagtagggtagttctggcactattatacaaggatgctaaaatcctaaataaaatattagtaaattaaaaaaattgtaaactatcatgtactttaggcaatatggttgggtagtgagcaacaaatttaaattttcaagtctactttaaatcatataagtatatcccagttattgtatgtatttattatttggagataatggcaaagtctagatcggaaggcttttatataatatgctgagagctaaatgttcctctctcctcctccttcactccccacaaatgattggcttcattggccacagaagagaaaattgatcaattgcttgaaatatctttttgtttcatccccaggtattgaaagtcatcttgcagatttgggaactgtattttcatttcctttggctgttgtaacaaattaccacaaacttggtgatttaaaacaatatacacttatttctgtacagttctggaggccagaagtccaaaatcactttcactggacagaaatcaatatgaaagcaggattgtgcttccttgagaagctcttggagagaattccttccttgcctcttccagcttctggtggctgctgccattcattggcttgtgactgcatcattccaatctttgtctctgtggtcacattcccttttcctcttctgtgtctcaaatttccttctgtctcctacttaaaaggacctatgattgcacttaaggcccacgctgataatccaggataatctccccttctcaggattcttaatttcatcacatctgcaaaatccattttcttccatataaagtaacagagtttctaggggattagaacatgggtatctgtgggggccattatttaacctgccacaggaactgacattgctcactgctgggtccctgaagaacacaaattggcttgttggtgggcttggccaggaatcggtttagctggagatgcctttcactgattgtgaaggaggtcctagaacccaaacgtgaaggctcagcgatctgtcacgcacacctgatgtcatgagcatggaccatgtccctctcatgtttcaaatacaggccacaggtagggtccatagtcccaccacagaaagcagttcttgtggtattgaggtcaattatatgtcctcaaaaacctgaagttctacccatttcattaccgtctcttcttcctgctatgatgctaagtgtggatgggtaaacattcattatttttaaaatgctcattaacatgtattaggtgccagggattatggcaggccatttaaagcatggtggtcgagaaagcagcctctgaagcagattgccagggatctaatttctgctccactaattactggctatgtgatatacctctatgcctatgttccccgactataaaataggctctatctcacaaggttgttgaggattaaatgagctattatgtgttaatgcttggaccaatggctggctgctacctgatctttggtctctctagacttaacaaatgttaattactatttatttgaatggagaaaccaaagagatatggagccctgtgtgagacacagggatagctaaggcaagatatgttcatgaaagtaattttaagtttaggagttaagacaataagtttaacaagaggtctgagcattgagaggtgtttgtttattgttttttagaactctgacttaagtgagtcaagcaagagaagagaaagagggagggaaaaataaatgctatttttggaggaaagatggttgggtaagctctctgtggtactggtaggcaggttttgcatgtggctgggtagctgggcagtcaagtattgcattaacgccagcctgatgcagcttgggctggtgtgaagaaccatgggatctctaaggcttaggggtcttcacatttagtgaccaccaagttaccaacctgagtatcatcttagaaaaagtgggtaatacttacaaggaagacttgtttcaagaattaaaggaacgtatgagcaatcatccagctaactccaaaatgctttgttttccacaggactaattatatgggatacaagccaagcatacaaattgaagtcttccttcctttaaataccacataaaaccaccaaagcttgcctcatatttaagggacattcactccttgaacattgtttgaatacgtactgtatgccgaggaccacactaggagctgttgacaaagttatgaatatgagtatgaattatttctgcctgaacaaacttacagaccaatagttctgcctagagaaacttaaagaccagtagtagaggaagtaatccaaacaggaaaatgtcacatgagtgataggtattatcatgaaactaagaacagaatgctgagggaagcccttagaaaggaacttctcattgtctgcagaaacagggaaaagtaaatataaaaatatttccacaacaataacagcgaggaagcgggctcattagaaaagggcacgtgtggcttggattggggtaaagagggtgttctggaactttgtgggcctttttgcatatggagaaaagctgggctgacagtctaactccaaaggccaatgaacagcggttagatgattaacacctgggaatacatttctacagtattaaaagtgatatgtagctcatttaaagaaatacatcttaatatgtagtacacaatatatctaaaccatcgcaacgacaaaatcaaagcaaggtcctttgcaccgaagggcctggggagatgtgggcgaagaccccaggacctttcccctgctcagagaccaaagggttttcagagcggaggtgggggctcccggcaggggaagttagagccgagggagcggcaggagcacgtgggctgagtgggggtgggaggacgcagacggcggagtaaccggtggaagtgtcaaagaggaaggagtggagggctgctgaggtgacagggtgtggtctgtgagggagcggacgaacccggagaagagagcagagagacccaccaggactaggaggcagcggggagcgtgcctgcgtcgctcggagcggtgacagcaaggagcgcagcgcggaggccgggcggcaaggggagtttccagtcctcgataagtggagtccctgctctgcgctgcgccagcgccttccgcctgggcccgcggtgctagacacctgccgagtccgaagcgggagtcaggctgagccttcggcccccaagtaagtcttcccttttctctccatttctcctccgtcgcctttacttctttatctgcgaagcgaggagctgctgacggaggttctgcgcgaaaagcgcaccggggagctctggcggcgtccaggatgctccagcctcccggcgcgccgcggccggcgcagagacccgaccgcgaggcccgccgcccggttcccgtgcgcagcatggcccgaggcggcggcagagttgttggcactgataagacccgtcttttgtgtcttgcccgatcccggagctgtgccaggccggggggagggagcggaagccactttatggctcgtggccccacctcttgcccccaccccaaatcctccgggatttcaaaatgccgcggactcgggcgcaagtgagcgccaaacccgcaagctgggcgagttggatccgggtcggcagccggctgaaccgccacgctgccccgctttttttattttctttttagatacggcatctaattggtgggtgctgggaggcagggctggttgggtgagcacgagtacctgggtgtagggaacgacctaccttcttgctttccttggggtttagaggggaaggggtgggggcacccagagccccgaagcccggagcgtcccgcgctagcgggcttgcgcgcggccggcgagcaggcgttctctgggtgggtcccttgtctggctcattgttcgcggtgactgttcttggggccaggctgagcgacacagacaccgctcaccgggctgtaaataaaagtgacgacttggaggagtgggggtcaaggctgccgggagggaaaaggcttgcccattttagaaaccgacttggagctcggaagagcaaacgtagtcgacagagaaaaccgctcctgagtgcgaaacttagatctgactctaattcacagagacagcctagtaaattaaaccctcaggaacagggcacggtatttcccccattgaaattgt

SEQ ID NO: 6738 - DNA, 6000 bp, Homo sapiens
atccgttggtgcatgaaagtcttctaaccattccaaaatctctttcaggtaagtgtttcttcctgctgccctctcaacagctcagcaagttgccacagtaaattctgtcaccttcaccatgctgtcatctcctggagaccaccctctttagggaaagacatctcatagcagtcagtgttcttattctgtgtagcctgatagtcctcgggctgtgatggggcttgggcatcaggcctccctcgtgttcctcccagggcatgagacaggaccaccatgtatatccatagccagtagggctttggggagtcacttgaggttctatgagattatctcagggttagggttcccctaagtttgaaagtttgacataaagagatatttagatttaaaattcgagactaggtgtgttggctcacacctgtaatcctagcactttgtgaggctgcaatgggaggatcgcttgaggccaggagttcaacaggagcctgggcaatatagtaagaccctatctctacaaaaaacttaaaaattagctgggcatggggaggctgaggcaggagaatggcgtgaacccgggaggcggagcttgcagtgagccgagatcacgccactgcactccagcctgggtgacagagtgagactccgtctcaaaaaaaaaaaaaaaaaagaattagctgggcatggtggcacatacctgtagtcctagctactcaggaggctgaggcaggaagatcacttgagtccagaagttcgaggctgcagcaagctatgattgtgccactgcactccagcctgggcaacagagcaagattctgtctctaaaaataaataaatagtaaaaaataaaataaaatttgacttgaaaagcaaaacaaaaaatccggttctgctatctcttgtgacagcctctccatctgcttgaaacatacaaatagaagcaactgggccaagtgtggtggctcatgcctataaatcccagcactttgggaggccgaggtaggcagatcacttgaggtcaggagtttgagatcagcctggccaacatggtgaaaccccatctctactaaaaatacaaaaattagccaggcgtggtggtacatgctactggagaggctgaggcatgagaatcgcttgaacccgagagtggaggttgcagtgagctgagactctgtcccaaaaaaataaaaaataaagtcaagctctaggttattatttctcaggatggccacttagcatgtggcgttgagagcttgggcatcttttaacacaacgtgcagctttaaggatcttgaagataaatgtctgtagtgaaaactcattgactccattgaattctcctcgttctctagtaaaaatactgtaaatgccatgaatcgctactcagagcctggcccccaccactaccatgggcatcacctgggaactttttaaaaatgcagaatctcagctcccacttcaggcttattaaatcaaaatccgcattttaataagatatcctaagtgattttgatgcacaaagttaggaaacacattgaatcacctggggagcttgagcaataccaacacttgggaattcccttccctcactcctctcccacctcccacccccagagattctgatttaattcatctgggccagcctggggttaaggagctttaagaactccacaactgattctaatatgcagccgagtttgagaaccctttagagttctaaggctttcttcagctggtgcccattcagctccaaagccaagctgtactctaaaacctgctagatgccactgtcttgcctgccccctctttggtgaacaaggcagagtgagtagaggttggatgcccacttaggtgaccctgcggggacagccaggctaccctagccagctcacctctgcacctcctgtcctggagcaaactagagaacagtaactcactcagctgcgtttcccctgcagagaaacgagagaacgtcatgtttgtgctgcctctgcatgggggccacttgggcttctttgagggctctgtgctgttccccgagcccctgacatggatggataagctggtggtggagtacgccaacgccatttgccaatgggagcgtaacaagttgcagtgctctgacacggagcaggtggaggccgacctggagtgaggcctccggactctggcacgctccagcagccctcctctggaagctgcgtcccctcaccccctgtttcaggtctcccatctccctcagtgacctggatctgacctcacaccatcagcagggggcacccaccatgcacacctgtctcggagtaggcagctcttcctgggagctccaggctatttttgtgcttagttactggttttctccattgcattgttaggcatggtgacaagtgacagagttcttgccctctgtccagtttcagcatctggttgcttttaagccaagtacatctagtttccctattaaaaatgtgtctgaatagcgattttgctttgccaccaaaaggcttttccctgagaacagtgaaggatgtatgtcattttgtggtggttgtatgtgtccttacatagaccttaaaaagagctcacccttccaggccaatgctgaagacacagctccgcttgggagcctgagaacccaggcttcccaggccagagtgtggcttcttaaacggcaaaggaaattcctttgagtcacaagccaagttttcgccctgtctcctgagaccatttccctacgctttgctgctgctgagagttacgtgaggcacttgttaaaaattcagcctcccaggtccctcccctcggagaggctgattcactgggtctgggaaggagcctggggattttaatttttcacaagtgccccagatgattctcatcaccaagcaaattttggaaatgctgttcaacagcgcccttaaattggaaacatctttgcagctcgttttattgaaattcataatcaggggtgtcctctagctcccacggtctccagagcagcaaggccggctatggagctgccgtcgtgtgaccacagtgtgatgtctcagaagggctctgggtgggctgagcatctgggctgtgccctggctctgcttttcaccctggacaaagtcgctgtggacttcaatttcttcacctctaaaatgggggacttggaccaggtagattgctgagctcactaccaggttcaaagttcaatgacaaactcagtttactgaggtttgagagaacatccctccaggggagcctgggagctgctctcccagtctaagcatgtagatatcatcgtttgccttttgtgtgtgtgtgtcccttatttgataaaaagatgttttgagttgttttttttttaagcactcacttgtaattttagtttttaaacccaagtccctctaactttgcctttgataccaaacaattcaaaagttggatctgagtttggagaaagatatttccaacctaagtgggtattattttgaaaccagatttttaatttaatagcctatatttgtagtctgttggataggtgtttccaaagtgtgtcttctcaagtgaaaacgcaactctaggtttcaagtactccttttctccgatcctgtggtacttgaatatccaaaaaccctgcactttgaacaatcagctgttgctatctggaactaaacagaactatgagtaaaattgcctggatactttaaaaagatatttttcctccttcatctcctttgactccaggacagactggaatataagtagtgggtctgcatggatgtttcagggatcaaaggagccacctgggcgcctgagtgccaaccctcagggccacaggtgggtgtggtttgggcacgggtccaagtgactgtgacgggacccgtgggcatgggtccaggtctgtaacctgaagaagttgttttctgacaatcaccaaatcatccgaatgacatcaaaagcagcccttatctcagagactgagatttctgtggtctcaacttcgctttggtataatttctggcactcaccagcctctatcattatgactttccccccagtgtattatttctctaataggtttccttttcacgttcttttagcacagactggcactttaccctctcagtttggaagttagcccctctcctctgttacttttcccttcacccaactacagctgtgatctagaacattcatagtcatatttctgctactactaccttcatttatcaagactttttatgagaataggtaaaccaagcaataacttcctaggactgaatcaccaccccagaagagcgagaggctcctttcatatgcctgaggccacaccccttaacctgttctgacaaaatagtggctggcccatgtaccagctccattcagaaattcaggaagagaaaagacagccctgttgtcacacaaaccggtgtgggggagggtggagcctggtctgcacggcagtcctggtggcccctgtggaggacaggcagggctggcagcatagcctttgttgccacacaaccggaatttgctcccccaggactgtgggagccagtgtcccagctgaaatctttttagtgtgtggctctgaatggcactcacattccattttggctcacatgaaactaactgaagccctttgttcaagcttcaggctcttaggcatggaaatgagaatgtgactgtggctgtcttacaggaaaattcttgtttgtccctgaatgagagcacagaggcattgaattcacagagctgcaaacttgcctgataaatgagggagtggcagtttatagataggtcatcttttttccttcctccaggtgtccttgcctttcttcccaaagtcattcatttctgatgagtatatgaatccccctcttgctagtaaggttctatttgggctaaaacaaggctgaatttttaaagagtatttgaatatattttagaatcaaattgaggctataaattgcatcaatctggacaattccattgcaggaataatatgttaaaaaccaatggggagaagcacccacatctctcctgtagcactccgtgtctcataagcaatttgaagacacttacaagtaactgattccagtcaaattaggattaactgactcaaaaaatggtgtcaagtttctttaatgtttttatgttagaagtgagtttaacagacttgaagaaaactgttatcttttcctgctgtgagtttacacaaatgattccagagcagaatgaaagcagaaagctgttggttacaatattcttttaacctctctgcagcattttacacttactgggaaccttatgattcaccgtaagagtggaaatatacctgagttcgtgtcctaatggtctctaattcacattggatcgtgggcaaatcacctcacctctctgagcctgttccctcctcttagaccatctctaagaccacttcatctatttacacatcatttgcttgaacattgctgaacatctgcgtgaacttggcctctccagcccttgcaggtggaaacagctgtgtcaaggctcaaggctcacgctgaggggacttggagggagggggcttctgcattaagctttcctggtgaagacccttgatcttgtccaaagccctgtgtctttgactggcttctcttcagagtccccgttgtcatcgtaagacccttgctgtttggagggtggtcttgtgactgtggcagctgctggccgctggaatgaggagcctatctccatcctccagtgtgactcaggcagagcattgagaattcccagggcagaaatccttcctgctcaggctttcattctaaaactacagtcttcattaaagctgaactttctgggtagctgagcttatatgcccggcatctgaatgagagctctctttgtaactgtgtgacttgagatctagtttgccagctcctgggaaacaatacatgtgttcttgtttgtgtttgctcagcaagcagatgtctgagatgtaagaagcttttcttttcctgtggc

SEQ ID NO: 6739 - DNA, 6000 bp, Homo sapiens
gagctgacagtggcatatctggaggaggggcaggacttttgatttcactctgagggaggtatttgggaggccaggggaaggctgagcagagatgtgacatggtctcacctgtgtactaagagggtcactctggctactgtggtagagaagcctccatggggaaggacaggaggagggagagcagtgaggggcgagtgatgatggtggctcggaccagtgagaaatgctcagattccggatgcattttgaagatggagccaccaggatttctgggtgggaaattatggggtatgaccgacaagaagagtcaaggctgactgggtttggggcctcagcgactgaaaagacagaattaatgaaagtggcaagatctcggggggaagcatgtgttttagggaggaccagaaagaagcttggttgcaggtgccagttagataccccatttgaaggtgatgcatgaatctggggttcagggttcagggctgagcagtcctcctgctctgggctgtggcttcatcagctcccagcttggttgggaggggcctgtggcttctgaagaggatgctgctggggaatagtacaactcaaaggggtaggattctgtgccctcacccctaggccgaaggaaagtttgccagtcacaaaactagctgagcccctgggctccctgcagcacacacactctgtgcacgctccactgtgccccagaaaacccgtgggttctttgttcctagacttgagtgccccatccccagtcctgggagcagaggccgggcctgggtgtggaagggggggctcggcggtgccccctggtggcatgcttgggcgtgggactgatatcccctcgctccttccccccagcgcgactgtcaaaactacatcaagatcctcctgccgctcagcggcagtcacctgttcacctgtggcacagcagccttcagccccatgtgtacctacatcgtgagtgacctgtcctcagccctgaggctgacctgggaactgcccctctttctgccccagggatcctgttctgtagcatagacccctgaggaaaggcagggcccagagggaggtttctaggtaccactggcctccaagagccctgaggtcccacaccctggcacaaagcgcagccctgacagccatgtctccctgtgcggggaggcgggggcacatgcggtcacttacccatgaagatcctgtgccacccaggccttgctgccctcttctgcttcttccagcatctctccctctcctttgcttgattctcttgtcttatcttgtacaccccctcctcagcacacacccctagcagagggtggcatttgatgctgtgggttggagcccagctttggggtcagacacacctgggtttgaatcacattgctgccccttccaggctcacatcattttatttcttttttctttttcttttcttttttttttttttttttgagatggagtctcgctctgtcgcccaggctggagtgcagtggcacgatctcggctcactgcaagctctgcctcctgggttcacgccattctcctgcctcagcctcccgagtagctgggactacaggtgcccgccaccacgcctggctaattttttctatttttcggtagagaggggggtttcaccgtgttagccaggatggtcttgatctcctgacctcgtgatccacccgcctcggcctcccagagtgctgggattacaggtgtgagccaccgcgcccggccaggctcacatcattttctaagcctcacctcctccgccaggtgggtctgataatgtgtcccgcgtcgggtcactgtgaggcagtgtggcactgtgtctgggtgaggcctctcctgaggccgactgtccaggttcaaacccttcggcaccgtgtcctggctgaggaggacggcgtccctgacacctgaccccttctgtcccacacacctcacctgcctgcagagttgccttctcctgcacgcctctctctttctcaccaagcctgctcctcattccctggagtgcccctgagcccatgtgtccaccctcctgcagaacatggagaacttcaccctggcaagggacgagaaggggaatgtcctcctggaagatggcaagggccgttgtcccttcgacccgaatttcaagtccactgccctggtggttggtgagtgttgagggcaggatggcttcattgaggttccatgtaggggcacacagggctagagggctagctttggacaggctgagtccatgccatgcttatttccaaggggacagaatggccaggggcttgccttgggtttggtttttccaagttccagcttccttctctgcccaccacaggcaaaacgggcagtgctggggtcactctgggccctgagcagggagaaggggccgtgctgaggagcccattcccatgggaatgttttcttggcagatggcgagctctacactggaacagtcagcagcttccaagggaatgacccggccatctcgcggagccaaagccttcgccccaccaagaccgagagctccctcaactggctgcaaggtgaagtcctcttgccaccacccagagggcagggatcctgttcacccagccctagaagggggcactttcccccagcttggcctgtctccagggttcctgggctgactctgagctcctgacctggtccctacagacccagcttttgtggcctcagcctacattcctgagagcctgggcagcttgcaaggcgatgatgacaagatctactttttcttcagcgagactggccaggaatttgagttctttgagaacaccattgtgtcccgcattgcccgcatctgcaaggtgaggggaacgggctgacagggtggccaccccagggacctcaaagcctccacagctgcaagatcacccacatccatgcatggcctttcccatcccgccaaggagtacagcttggctaacagcttttctctctcaccttttaaattaaaatatcttactacttttttcttttttttttttctttttatttttagacaggatctttgctctgtcacccaggctggagtgcagtggcacgatcacggttcactgcagcctcgacctcctgggctcaagcagttctcctacctcagcctcccgagtagctgagactacaggtgtgcgcccccatgcccagctaatttttgtattttttgtagagatggggttttaccacgttgcctgggctggtctcaaactcctgggctcaaacaatccacccacctcggcttcccaaagtgctgggattacaggcatgagccactgcacccagccattttttttcttttcttttttttttttttacttaaaaaatgtgaaaatagccgggcatggtggctcacgcctgtaatcccagcactttgggaggccaaggtgggtggatcacctgaggtcaggagtttgagaccaacctggccaacatggtaaaaccccatctctactaataatacaaaagttagctgggcgtggtggtgcacgcctgtaatcctagctactcaggaggctgtggcaagagaatcgcttgaacctgggaggtggaggttgcagtgagccgagatggtgccactgcactccagcctgggtgacagagcaagactgtctcaaaaaaaaaaatgtgaaaatagaaaactgtacacacaaaaatcacttacaagttaaagaggcactgtagcatcagctggagagcacagaccctggaggccaactgcccaagttcaaaccctgctggcctaggatcttgggcaagtccctcaccccctcggttaacagtttcctcttctgttaaataggaagaataacactgacctcagagttgttatgtgaattattaatccacgcaaagctcttagaaatgtggtgggcagtgactaaatgtgaactatgaatgttattaccccaccaccccagcacaagaaggagtcactggtatcattttagaatgccccctccaaatctttttttttttttttggcatatgtgtaactctgtgtatatatatatatacatttttttttttcctttttgagacagggtctcactttgtcatccaggctggtgtgcagcggtgagatttcactgcaacctccgctgcccaatctcaagcaatcctctcacctcagcccctcatgtagctgggactaccagcatgcaccaccatgcccagctaatttttttgtatttttagcagagacagggtctcaaactcctgagctcaagtgatccacccgccttggcctcccaaagtgctggaattataggcattaataatataagtaccatcccgaccttgtacttatattattaactcactcaggaacatggcattaggctatattggggtcctttggcttccttgtttgctcagcagtgaatcgcgtccatatttaggaaggctctgcttagttacagtaaggaccatcctcctgatggatgcgtacactgctcttcctgactttagatggaacttggtcctggccttctcctgcccttcagtcctggtgtctggggtgggtccattgaggcagtcctgtgccgtgcatccccgtcatggctcagcatgtgcctaagcccagcccatccgactctccctccagggcgatgagggtggagagcgggtgctacagcagcgctggacctccttcctcaaggcccagctgctgtgctcacggcccgacgatggcttccccttcaacgtgctgcaggatgtcttcacgctgagccccagcccccaggactggcgtgacacccttttctatggggtcttcacttcccagtggtagggcctccagacctcgctggagatggaagggtgaagggtggctgggactggggcccccagggctcctgggttaatctggttatttcctctgcaggcacaggggaactacagaaggctctgccgtctgtgtcttcacaatgaaggatgtgcagagagtcttcagcggcctctacaaggaggtgaaccgtgagacacagcagtggtacaccgtgacccacccggtgcccacaccccggcctggagcggtgggtactggctccctgcacccagaaggggtgccgggaagatgtgggtccccacaccatgctgggagcaaggctgcctagcctcgggcagatcacttggcttctctgaatctcttttctcatctttaatatggggatataggcccaggcctgcttgtgtactgggttagatataagtatgaatgtcagaatatcttcagttctgtttcaggatacaagtgtgtccccatcagggcacttgctgcaggctgttacaatcatctcttcatttggtcctctcccctactcagctgcaagctccttatttaattatcaagtgactgaatgggcaagctgtggggaaataatcctttcttcctcccttctagcctaacgggctaccctgatagcagaccttgagacaaggatatacgtgccaaatagtttattagggaggtgatgccaggaagcagcatgaaggaataggaaggttgagaggaggagggagggaaaccaaaagagggtgtgtcagcacgctgttgttgctgtgggcagctggagctgggtcctgctggagcccctgacagatggtgtggagcacctctcagaatttcaggaagcctcaggcggggcaggaaagaactgccgactgcactgggacgctctgcccggccagggcttcctgagagcactggtgaagggtgcagaggagcagggagtgtggtcctggttcttgaggcccctgggcatatgaggctggggtggtgggcagggaggaggcacagcaaggaagccctccaagcactcggtttccccgcaccctgggctttgtccttgctccctcagatgtgcacactggctctgtagagcactgccagggatgtgccctggctccgggcggggggacagacaccgctactgtccactggggaagcagggcccgcatcctgcctgccaccccgag

SEQ ID NO: 6740 - DNA, 6000 bp, Homo sapiens
ctgtgtgtgattgctttctggttttttggcagagccaaatttctgtgctgcagaaccgcattgagcagctggagcagcttttggaggagaaccatgagattatcagccatatcaaggactccgtgctggagctgacagccaacgcagagggcccgcccgccatgctgccctactacacggtcaatggctcctgggtggtgccaccggagccccggcccagcttcttctccatctccccgcaggactgccagtttgctttggggggccggggtcagaagccagagctgcaggtaagagtcagagctggcagggacgtacagtggccacgactggggtactgagctgcagttcacctggcagatgctcactgtgtcggaggagctgccgtttgacaacgtggatggtggtgtgtggaggcaaggcttcgacatctcctacgacccgcacgactgggatgctgaagacctgcaggtgtttgtggtgccccactctcacaatgacccaggtgagggccctgcagactcctgggagctggagtgtggagtgggatttctgatggccaatacaagggagggacgtcgaagaagatggtggcatcctcaggggaccctacattggctccctaggctggatcaagacctttgacaagtactacacagagcagacccaacacatcctcaatagcatggtgtctaagctgcaggaggacccccggcggcgcttcctctgggcagaggtctccttcttcgccaagtggtgggacaacatcaatgtccaaaagagagcggcagtccgaaggccagtaccaggcggggaggcatgggagggcattgtctgagccccaggctgggtggacgggtcttaccttaagctatgggtgccaaggtggcagggagaggcccagagagctgtggaagagatgagtgatggtggagggagggaaggcaaaaacagataggttccgagataagcggggccaggatagcctggaggttggctgtaaggaaaggagggcaagtgtgtgttctcttggtcctgggattgggagaactggtccagtgaggccagtgcacacaggccctgacatttgctggttggcaggactgggcagagtgtcctgctccgtcctgagtgtgagtccttaactataggctggtgggaaacgggcagctggagattgcgacaggaggctgggtgatgccagatgaggccaattcccactactttgcattgattgaccagctcatcgaaggacaccagtggctggagagaaatcttggtaagtccaggcccaggcatgggggtctgccccctgggctgtaaggcacaggcaggggctgtaaggcacagggatcggcagggggtggttcctttctaggcagatcccaccatgtgggcctggtgtgatatcatctctccactcactaccaggacaagagctggggtcccagcacctggaaggccggggggccagcccctgaggtgtgttcagggcctctctggcttccatgccctgcccaggtgcaaccccccgctctggctgggcagtggacccctttggatacagctccaccatgccttacctgctgcgccgtgccaacctcaccagcatgctgattcagagagtgcactatgccatcaagaagcactttgctgccacccacagcctagagttcatgtggaggcagacatggggtaaggccgggtagggtagagggggttactgcagcatagtcttcactggggaacagcagggatatcagaactaagacccccactgttcttcagagcagacctgcaggcactggtgtggactgccagaaatggtcgcaccctctggttaggggagggccatattgacctctggcctctacagggcctgctgtcccaagggcttcagcgtgccctgtgtgcccgtcccctgagggagcccctcatgtctttctccctggcctacacactctctccagccctaggtccagttacagcctcgcggtctatcagggctgcctttagcctgaacagatccttgcccccctggcgtccagaggctgcctgctggtggtgaccacgtggtgtgtctcctgcagactcggactccagcacagacatcttctgtcacatgatgcccttctacagctatgacgtcccccatacctgtggcccagatcccaagatctgctgccaatttgatttcaaacgcctgcctggtgggcgcatcaactgcccttggaaggtgccaccccgggccatcacagaggccaacgtggcagagaggtatctgcttccagccctttcacttcacagaggaatcgggaggcctggctctggtctgggccgtgccacgtggagggtgggctcaggtggtgagttgaggctcctagcctctgcagcagcagctccttactaagtctcctgaaaaactggaatggctcttgcaaccacctttcacagaatgcttttaggttctcacatgagtacttcttgatgccctaacaaactgccagggccagctgacaacttagaggtgaaggattcccaggttagatgtatgttacaaacttcaggctcatgtgccttcacttagtgccagtgttctgacttggctttaagtcaaccacgagaatcctgttcagatccacattcagtcccacgagatagcctccagcctctgagaaaacagacctgtcccttttgagagaatttagggacccctaaagatagcactcttgctgaaatcaggccccgggggaaagtgttaggtaagagttgatccaaacagcaatttagtcagaaccttaagaatacgacaagttggattggtttttatgttgcaatgctctgatttctccctgatgtccaagagttgaaacgtgaccaaaagggaaataaagtggtcttttgtttccagaagtctaaatggcgattccaggcaagaatctagggctatgagggcgtgacttttcttaaagcagcagttgtgatcagtgaggctggcctaggtttacaagaacaggccctgaaaggtaaccattttctcctttgaaaggcttactagactgataagttaggggaaagtggtatttgaggaatcctctcatgagaacagagtagaaaagtacaagctgggccagcgccgctaagtagattagttgactctttggactgtgatatttataacatgccaattaaagtaggaaagggcttctgctgatgtgccacagggctgtttttctactgattttgccaataatttggatgaaaagaaaagaaatgtttatatatagttcccattatgtaccaggcactattctaagtgtttaacaaatattcattcattgattttattttatttatttaatttaatttttttttttttttgagatggagtctgtcacccaggctggagtgcggtggtgcaatttcggctcaccgcaacctccgcctcctgggttcaagtgattatcctgcctcagcctcctgagtagctgggattacagatgtgcaccaccacacccggctaatttttgtatttttagtagagacagggtttcaccatattggccaggctggtcttgaattcctgacctcaggtgatctgcctgccccggtctcccaaagtgctgggattacaggtgtgagccactgcgctcggcccattcaatccattttaattctcataacattatatgggtacctacggatgttatccttattttgctagaaatggaggctcagagaggttacttgcccacagtcactgagctagtacttgtggagctggtgtgatatggctccggggtccagacccttcactttggtgctgcatcgctaactggtgggcaaaatgaggcgggagtgtcagaaccaggatcccaaaagatctcaacagcctagcataaaaaataacatgtcagctgtcagaactgcccagagagcaccggactcccctggggctgggattcatgtgcaggaggtgtctgtttgcgctgaaccactccttggtggatgggatgtcttctaggggcttgctggcgggatggctgtgcgtggtgctcttttactgatgagacttcgtggtgggcccatgttttttttcctgccccagggcagccctgcttctggaccaataccggaagaagtcccagctgttccgaagcaacgtcctcctggtgcctcttggagatgacttccgatatgacaagccccaggagtgggatgcccagttcttcaactaccaacggctctttgacttcttcaacagcaggcctaacctccatgtgcaggtgtgaggggcacttgactggggaggggcctcacagtgctgcagcccatcccttcccgtgagaccgtgccctgggttcccaactcgggcagggtgccccccttttttttttttttttgagatggagtctcactctgttgcccaggctggagttcagtggcgcgatcttggctcactgccagctccgcctcccgggttcacgccagtctcctgcctcagctgcccaagtagctgggactacaggtgcctgccatcacacccagctaattttttgtagttttagtagagatggggtttcactgtgttagccagggtggtctcgatctcctgacttcgtgatccactcgcctcggcctcccaaagtgctgggattacaggcgtgagccaccgcgcccagccgaaggtgccccttttatgtcagaattaattcccaggctcccctacttctgttaagtctagaatggcaggatgtacagttcctgcttctgaggccagagcccctgcctcacccccaactgcagcactgtggccacaatttgcaggaggctctagaactgatgggagtgggtttttggggttcccacaggcccagtttggcactctttctgactattttgatgccctgtacaagaggacaggggtggagccaggggcccggcctccagggtttcctgtgctgagcggggatttcttctcctatgcggaccgggaggatcattactggacaggctattacacttcccggcccttctacaagagcttagaccgagtcctggaagcccacctgcggtgagaccctgtccccgcttccaggctggagggggagagtcagcctttggggtttaaggaggggctggattggctcagaagggaatagataggcccagaggccagggcaggtagaggaggggtgggaaggaaggaggctgcactggcagagtgtgggtgggccctggctagtggtgcaggctggcagctaacttctctctctgggcaggggggcagaggttctgtacagcctggctgcagctcacgctcgccgctctggtctggctggccggtacccactgtctgatttcaccctcctgacggaagctcggcgcacattggggctcttccagcatcacgatgccatcactggcacggccaaggaggctgtggtggtggactatggggtcaggtgggagccttctcttttcccttgtaagctcccctgctcactgtcccaaagaaaggacattgggtggtcagggggtaggccggcctagggcttgtcctgctgacaaggcagacagcttccctatggtcatcttctctccttccctctcctgcgccacccacaggcttctgcgctcccttgtcaacctgaagcaggtcatcattcatgcagcccactatctggtgctgggggacaaggagacctaccactttgaccctgaggcgcccttcctccaagtggtgagcccctcctgggtctgcatggggaccctctggtgtgtgcaggtcccatcccaagagctgctggatgggggtgccgcttctctttttccttccccatccggatgagttctgtgcccagtgcagccgctggtccacacctgggacaggtggggtgggaggaggctgagcccatgatggttcttcccttccggctcactgaattccaggatgacactcgcttaagtcacgacgccctcccagagcgcacggtgatc

SEQ ID NO: 6741 - DNA, 6000 bp, Homo sapiens
catggagtgactatttggaaacagtggaacttccagatttcttcgcatccaagtaggattttgctgagggtggactcagccctgtttctgtgatataaaacattttcttcattctttccttcatcagacatctcctataagccccgttcaaatgactgcttcagggttctgggttcccgtgtgtaaatgtgtgttagttcattcttgccttgctataaagaaatacctgaggctgggtaatttacaaagaaaggagattcgagtggctcggggttttgcagacagtaccggaagcatggtgttggcatctgctcctggtgaaggtctccagaagcttccaatcatggcaggaggcaaagggggagcaggcacattacgtggcgagagccagagcaagagggagaaggggaggtcccagattcctttaaacaatcagatcttgtgtgaactgagtgagagcacacccatcaccaagggggcggtgctgagccattcataaggggtctgcccccatgatctaatacctcccactaggccccacctccaatattatggattacacttcaacatgagatttggaggggacaaacatgcaaactatattacgcggcttcctttgcccggtatttaaaaaccatttgccttcctctgtgtagtttaagttgtttttccccacctcaagtcaatgaatgagttcggaggagggaaagcttcaagtcagcgaggctaggatttttactggttggttcaatgctgaatccccaaccctgagaatagtacttggcacatagaaggagctcagtaaaacttgactgaatggatgaatatgtgattggttccacaatgacatcaccgagagaatttagggtgagttggtctacgcctatgaacagactaggctggagagctaccctccactgggcttaggttcccagcaagtgacattcatctctcaccctgctctccaggtgcccgtgtggcctgttagcacccaaccttggagctgcctggcctggaattacccatgcactgactgtcctcatcagatggccagcttctaaagggaagggccactttctggactcttatttttgcctccagggcctggagaactgtcagtgctcaagaaatgtctaccaaattgaaatttaaatagatacagcctgtgggtttgaatttgggatcagtacttttcccagaatgtcctaaaatttctgtgtaaaataccaggtattgtatcgatcagatacttaagcactgcccagagcctgccattttctcaagtgctacagaatcacttaattcctgaacagctgttacaagcagccacaacaacagtggaaacagataatgacttcaaaacgtggacagaaattgaagaattgaaattaataaatgtgtaattaaatgttagatatttaccatcgtgtgaactttgttatttgctgaatttcggagtcttgaacgttttattatatttgaaaataatttgtggcatagattatcctcacttcacaaaaaattcttgagtttgcacagtgggtgtcaagggatcttagccaaccataaattaaataagttacataaaagtaagtaaatgtaaaagcaaaattataaaagccttttcaaaagtgtggatggcagaaaaaatatttaatgatagatgcggatgtattttaatatgtttgatgtggggtgaagtcctctaaaagtaagggacacaaatttcaaagcaacctacctgaaatactatagaattgtagcataatatacagtgctttcatagagtttccaaaaattagaaattcagcctttcccctctaggatttttagatgaattcctaatgtcatctcatctcatcaatgtaaaataatctccttgacctttggtgattttgctcatcgaatagcttctgttttgtaatctatttttttcttcatcttccttcaggaatcctgttcacgatgctggtatttggaccagcctgcgggtttatcctgggctctttctgtaccaaaatctacgtggatgcggtcttcattgacacaagtaaggaatatatctccatgtctaccttccatccgcaagcgtttcctccctcataaatgcggcttcagcctgtgggttctaaaaccttcttgctaagagacagtcttgatgcccctgcctctgtagctggggctcacccgagattagatgaaagaacgtgagtgttggttcagagggcctgactcaagtctgggttctgccaacatctacctagaggctgaataacccccaatagctgattttactcctcaaatctgtattttccttatctgtaaataaagggtaacaataattacatcggcctggcagataagaatttaatgagagtgtctgtgtagaaatgcttggcatatcctcattgagtgggggcccattaacctatatgaggatcctactttccaaactaaaagttggagcatgtgttctggaggtgcaagtgtacaaacggggtcaatgagacagaatattggaacatccttttagaagacactgttgtggtggcctttgtgaggaaatatccacattcaaaaccattttaagcagaacctgtgttcttagcaggaagtgcaagtgcatttctcagaataccctgagttccccaatccatgattgtgggattgaatgggatgctagatcgatgggctagactattctgtggtgacagacagtcccaaaacctcagtgattttatacaactaaggtttatttcttggtcacactacatatgcagtgtaggtcagcagtgtcagggtcagggagacttggctcatcgtggtgacctgtagatctactctcaggatcgataagcattctcagccccccaggcccaggcccacagaagttccatcctgaccccagcttgcacagttaccaagacaggaaaccagttttactctggcccttgaaacctctactcagaaatgacatacagtgtttcccctcatatttcattaaccaaagcaagtcacgtggtgtattggtttcctgttgctgcataagaaataaccccaaacctaatgacctaaaacagcagacatttcttatcatactgtttttcgtatttttttctgtgggtctggaatacaggagcagcttcactgggcagttctagctcagggtctcttatgaggctgcagtcaaggtgttgcaaggtggcaacctggtcttggatcatcccaaggctcagcttggggaggatccacttccaagctcactgccatgggcccacaggaggggactacctcaccgtgacacccctgaagcaaacaacccaagagaaggtgagagagagcacctgaggcaggagtcacagtctttttataacctaatctcagaagtgacatctcattacttctgctgtatttcgtttgttagaagctagtcacttgttcaggtttactatggaaagagaagggattattacacaaggaccagaataccaggcagcagggactttaggggaccgtctgggtcattgcctaccatgtgctgtcacatctctaccttgtgtctgaaaaggaacactatatttccatgtagtttagcatgcagcaaagccatatttcctttctctctgaaaacagagggtgagaagccattccagcctctgcttctcatgccgatctatcctcaggatcagtaagaattctcagtccccaggttctcaatccatcatctcttgacaatgctaaatttactaattcaccccaaagaaataatgtggttttaaatccaagtcgctttgtgattcactccattaatcctactgatatatttacttgtagctaatgatgttacaaatttccaagtggaaaaaaaaaatcagaggcagccctatttatttatacttttaaagtgctgagtctgttccgaaggtgattgagtgctggtgttttgcagccgtcggctggccctttgaacccgtttcctagggagtgtggtaacaggtaggctgggaagacacaggacacatgaagtgagtcagtttccatcttgctcgtatagacaggccagcttccaccactgcacccaaggcagcacaagacagggccagcagaggggatagagaggaggcatactcctgatgcaatggggaagccaccttgaagggtagcaaagtggccagatagcatattttgccctcagtgctatcagtggtggccttgaaccaaaagcctgcgaatgaccagaatatctgagctggaaagagcctcagacatcattcctttccaactctttcattttacaaatgaggaaaccaagtcacagagaggggaagggatgtccccaatccaaggaatgtatctctataaaaccccgatctcctgagcctgcctgtggagatttcactcaccaaactctcttaggagaatgaaacagcaccttttctcagtgcctgaaatgaccagcgggtagacagatggctggagggggcttagcccatccactcccagttccctccatttgctgagactgttccttcagcctggaatgctgttcccatcttactgtgttcggcatctctgtttgcccgttaaggcccagggtggagcggtgtgatccatggttccaggctcattggctacttggtgcctgcatggatgtaaggcaggtgggctcctttcagtcccgtgtgggcatctcgctgatgacaggcttccccaccaagttgatagcggacttccctttctgtttccaaagaatgcaaggtgcattgtcagtcacggtctttgtttgcgtccttcccggaggcaccgtgaggcaccgtgtggcacagctctttaccggtagagggcagaagaatatcatttatcctatttagggagtcagccatagaattctatagttgccagcagtttttattgtttctagtcttgtgaaacttgccgcctgcaggtggatttgggctgtatttgaggaggggattcttaattgctttagggcctcccctatcttttccttgctttcctaaaacagtgctcttctgtagggctgtccaatgtatgggaacattactgtaggcattaataggcaagggccacacacgtggacacatgtttctgaagtccccactgagattggggtccaggaaaagcagcagcctaaaatttgtggggaaggagcaaggcaggtccacagagggccctcgttatggggtagatggaggagagaaggcggcgtccaccacatagcctggtgccagcattgagaggagaatccagtgaggaagcctggttgaaacttgtgagtagatgcagctggggtgccaaggagggctggttgtagacatgggccagttctggggtgacagcccccacggggcaccttgcctggaggtcccagctggctccacttggacatgggctgctcccgctgctgcctttcatccatgtttgatcgctacgtggttccctttgctcctcagctcagggagaataaatccctcccctgagagctgggggaggaaatgatggtgcctccagaatttcttttttaggttctttgttaactgaaacccaggtgagaacaggaccttgaaaaaacggacttagtagcagagtacatatctaatcactgccttggccaaccttaactatgtgggtttattacaaaaagattagtagtaacagcagccatgaattggtcacttcttaaagctatacatagattgcctcattggagcctcagcacattctcatgggagtgtagatcctactgttaggtgaggcattatcatgcagtggttaagaattcaagcactggaatcagactccatttgaatcctgactacacccccttatgagttctgtgatcctggggacatcgcacacacatcctgagtctgtgtgtggatggcatgagttactcatgcaaagcatttagcacagtgcctggcatatagtaagcacacaataaatacttataataagaaatccgagagaggttaacag

SEQ ID NO: 6742 - DNA, 6000 bp, Homo sapiens
tcacagagtatctgtattcttaagttctaggaacaccttcctctgtacttgtttatgccctatgtacagattctgaagtcaaccatgatatagaaataataaattcttacaacgggctcttttgttgtttattttgttaatccaatgactttacttgcttttttaatttcaagacacatttcaaaaactctgtgctttgttggttggaactagggagagttgggcatatctcgaaagcaacagtgatgaggaagaattgaaaagctgaatttttgccatgcttctggtatgttttctattccctgtccttttagacccctttatacacacactatcctaaattatgcctttaagttaagctacaaagatgaactactattagacttgaatatgcataacgactaggtatgagaccaccaagatcctaaaattattggttcaatcaaagtatttaatggtatctactgccaataggggaaggcaagacaagacttcacagtctattccatttcttctgaataaggcagcaactaaagaccacggagttgccaactatcactatatagatactttgcagagttggcccagtattagacaaacaatctaatatggaaagcttgtactttaaattgatgaggtcactctagaaattgttaccaaattttttcaaaaacagaacatagaagagaatgaaaaaatataattgtagtgaatgaataaaagtgtggtataaaaggggaaaaaggacaaagaatgaaagtaaatcagaggcatagcaaaaaggaggagtgagtgctttgatttgcttttataacagtaggactggtttgggtggcgctatccacacactttctgctggatcccaggagataagggtatgctctttggctatgagtttttcattatgtaaaacttaacaacatcgtaaacttcattattaccagacactcccaattcttacatctgcaaaattaaaatagtgcttttaatgggtggcaagaggatgtcctccaatctcaagcagaaatggtatagtaatctcaagggcttgttatgtgtacttactgtactcttcagttcttttcaggagaagcacatctctggctgccctcagtacactaagagaatcagacctcagaggtggctgcattttattgttgggagtaagtactttttaaattttgagaaatgttagagatttcccaaaacctcactagaagtatgaagccttgattagaaagataaagggatttggttccaggtcacacagcaaattaagtggcagaattaagttatgaacctagacttactcctttcaccatattatggcatttgggggcctccttattgctagagtagtaacacattacctcatatagctttttttttttttttttccccagatggagtcttgctctgtcgcccaggctggagtgtagtggctcgatctcagctcagtagctgggattacaggcacccaccaccatgcccggctttttttttttttttttttttttttttttgagacggagtctagctctgtcgcccaggctggagtgcagtggcgccatctcgcctcactacaagctccacctcccgggttcacgccattctcctgcctcagcctcccgagtagctgggactacaggcgcccgccaccacgcccggctaatttttttttgtatttttagtagagacggggtttcaccatgttagccaggatggtcttgatctcctgacctcgtgatccgcccgcctcggcctcccaaagtgctgggattacaagcatgagccaccgcgcccgacctagtttttgtatttttagtagacagggtttcatcatgttgaccaggatagtctcaaactcctgacctcaggcaatccgcctgcctcggccttcccaattgctgggattacaggcgtgagccactgcacccggcctcatacagctctaatgccacgcatcaagttctgcatgtacaatctctcattttggcctctcagcaaccccccatgtgctagggacagtaaattctattgttctcactttgcagataagaagactgcaattcaggaagacatatagtagtctataagtgattcaggactggaactcagttatcctaattccctctcggaggctctttccaccatgccatctgctcgtctggtgctttccatccatgaactctggaaaacaagcttgagataccaaaattgaaaagacagctcatcaaaaatgaatagttataattctataagtacaaaaatgaaatactcaaatctcttgccccccctcctgctaggagcataaatgttaacctgagttctctagctctgtacaaatccacagcaattaagactgcactgtgagggaaaatacttttctaaaaaagaatcctgatcaagttgaaacaaaaattttaaaacatgaaatggaaggaacgaaactgtcgtcctcccttatttctgacccacacttgtcgattttcatgacggagtttctcaagccaggggcatatggccaaagaccatgtgaaatgccaggtgttccaaataacaaccgacggggtactggaaggaaagcactgcctccccggggaacaaatggcccaatttccagacttagttttctgcagtctcaaacccgatgttgcaccaagaaaccacctaatctttaggtggtttcgtttaccgaaaaatgaggtgactggttcagtgcgcatatgtgaatttaagggtaacactgtactcacgctttgcatatttaaattctcaaatattcacttaatatatgcatagaccattgtcacttcgtcagaagtcgcgtcctgcccagttgcgcgagactccaacgggccttcttgcgacgctcgggtctgggtccgggtccggacgtgcaacagaagccgtcagtggccccgctggctaaaaaagggcaagcatcggaggctcgagccagcggccgcggcgcttcccgacagttcctaattcggggcgctacgccggccccaccacctgttcccggcagccaatggggccgcggggggcggccggggcggagcgcggctacaaaaggcctcgggccccgcgcgcccgcccaccccgctccgggcgcgctctcgggaaggcttggaccgacgcggcccagaggccaggaacattccgcgcgtggaccagccgggccagggcgatgctgcgggtgcggtgtctgcgcggcgggagccgcggcgccgaggcggtgcactacatcggatctcgggtgcgtgcgccaccggcctcgtctggcggccgcgtgactcactcgatcctgcgggcggcgtggagcactcgctcgctccctgcccggagccgccaccttccctcgctttccctagccggaattgcacgagagtgtcccttctggtatccctgggaagctcagcttcaagagccttcgcaggctccaggagctgggcggcgtcccccagtcagggggaacttgcgttgcggctccagcccttggggtccacttgctgtctgcgcgtccgcggcctgctggcccacggcgcagggggcgccgcccccctctaccggaccttggtgcgctgcaccaagcttcccgctcggagcaaggggttgggacgacggaggctcctcttagtaaaagggtggcgttattggggttcagtagcctgagtgggcgtcgagttggggagatttctggaaaatgcgtgtggggtagatggatggggagaagaggcaagcaaagtgggaatcggggacggggagcgagcgaccagattcactccaagtataacatgggatcccacgtctggagaggagtcggggcgagtgcagcctgtaagcagagtttctgcgctccccgccctcggctgccctggcagcagaccctcccatgcttctagtactggaatcgctccgacattctggcttcctcccagcaactggttcctgaacagctgtcattctccgtctttcttctgcctccacccgagttctcctcctgcccacttcctaaggcttttaacagagcaggatagagatttggggggttgaggtttgctcaggggttgagggaccctccctgctctagattttataggccatgcatttttaaaaggcttttgaagtttttagatctccttcttatttgtttgaatttacgcctgagctaatcctgaccttggctagggtactgtggaccatctgtaaaatggagcagatggcagttgctcactctcagaattgaagtgccaaagaatgcgaagtgtatgtcaaagatgaaaaaaatttgatttgaagctggttattctgaaagataaggtcctttacaaatgttcccaacttttcatttgtaaaaaaaaataaataaaaagcctaatattggtaacctttgatacttaagggaaaaggaggttccgtccccagctgagactggcgggaagttttagagcagctgtctatggttttctgagaggaggactgacccatctgcaaaacagttgcttaaagcttgagtgcaggaattgcattctgagataaagatgggggtgtatggtagctggggacacggtcttctgaggagttttaaagagttacagcaattaatagataagaagacaatttgtagataaacaagagggttaaaaaaattatctgtaatcccactacccacctacacactgttaacgtcttggtttatgctgttctaaaggggtttaagtggcaatgttatgctggatttttactccatctccacttcctcctctctgtaagtactgatagagcaatgcaatacaataatcttttctttgttcttggaagcttggacgaaccttgacaggatgggtgcagcgaactttccagagcacccaggcagctacggcttcctcccggaactcctgtgcagctgacgacaaagccactgagcctctgcccaaggactgccctgtctcttcttacaacgaatgggaccccttagaggaagtgatagtgggcagagcagaaaacgcctgtgttccaccgttcaccatcgaggtgaaggtaaaggaaggctattcacatgtctgaaagtgcgctccctcctcacctgctgctgctaccctctgactgctttcccttcagcttactcccagacctctcaatccagtgattaagttatcttacttgacacctctgtggtatttgacactatttacaccaatgataattgcttccttcctgaagagcttcctgaagctcttcccttggattctgagagagcttttctgggaataatagttctttcactgtcctcagatcttcttccgtcacagcctgtaatggcaaggttgaacagaatattactttcagcccccttctcttagccattctcacagctaccgctcccacctcctctctggtccggatctctgtattgaactccttccagatcaacgagttaaactccttacgggatattgccacaggacttcaaacttggcacatctggagttcagttgccagccacctgctcaagtggatccctcctcattcctgccttttaattattggcattcctatttaatcaagctaaaacacaaaagaatcatctttgatttctccttatgtcacgtgatgtaacaaggcttttgtcaaaaatgaatcttgcctcattcctctgctttgcctctccctaaaggttgggagctcatctgctgcctggactattgcagttaactcctaactggtcactcctactcactcttctcaccaaatcacctggcagctgcaatccaagtgattttttaaaactcagatgtgatcatgttactcatcctgcttcttttcctcctgtactttgctaggcgacccccactaccccaccaccccccgcattgtttaggataaagtcttcatggtattcaagatccttcacaatctgactcttgtctgcatttccaggattccccattccagttattgactcatctgttagtacagcagattagcaggtgt

SEQ ID NO: 6743 - DNA, 6000 bp, Homo sapiens
tttatggggtacatgtgatattttggtatatgcatacgatgtgtaattagcatatatatcacctcaaacatttaccatttctttgtgttgggaacattccaaatctgctagctattttgagatacaataaattatcattatctatatcgtttattttatcgtttatatctatatcgtttattataaataaaaaataaattatcattatctattgtcatactaccgtgttatcaaatactagaacctgttccttctatctgactgtatgtttgtacccattaaccagcctaccttcacccccttcttcctcttccccttcctaacctctggtaaccaccattctccctctctaccttcatgagatcaacttttttagctcccacatatgacagaggatatgtgatatttgtctttctgtgcctggcttattttgcttaacataatatcctccagttccatccatgttgctgcaaatgatagagttttattctttttcatggctgaataatattccattgtatataaataccacatttaaaaattttattcctcaagaagaaatattattgcttccatatcttggctattgtgaatagtgctgcaataaacaggggagtacagatatctcttcaaggtacttatttcctttcttttggatgtattcccagaagtgggattgctggatcatatggtggatctgttttcactttttttgagaaaccacagagtgatttattttaacctatattgtgcctttatattgtctcatcatgcagaaatatttaaaaatgagggaacaaatgattttttttgtgcccctggaggatttttttgtgggtgggagaattttatttttttcatatgtggcatattgaatattttcatttagtaggaaaagagttaactaaccatctaaaagtaaattggaaattgtagctgtcattgaaattaaacttaatgtatgtttggccagatgcagtggctcatgcctgtaatcccagcactttgggaggctgaggcaagtggattacttgaggtcaggagttcgagactaccctggccaacatgatgaaacgccctctctactaaaaatacaaaaatttaccaggcatggtggtgggctcctgtaatctcaactactcaggaggctgaggcaggagaatcgcctgaaccgtgtggtggaggttgcagtgagccgagatcaggccactacactccagcctgggtgacagagcgagactctgtctccacaaaaaaataaataaataaaaaataaaaaacaaaacttaatgtgtgtaatctaaattcttgtatagcatgagtaagaattagaaacaagtatttatttttagaatctctcatgaaaagatattaaaaaatagtaacctcctagcaacattatatatttcaaatattaataaattctaattaaatattaaatattattgatcattatgtttttggaaacatgttccttccttactttaaagctaccttgcttttctctctccttttatttactcaactggagtttgagtacctacccagtgccgggcactgtactagatgcctaggggaaaaggtcacagagggagggccacagcatttcatttcaatggatccttcactgacctttcttttgaagttgagcgccctctagagctctgtccttgttcctcgtcctctgtcctttcctcacctctctttgttcttgtcctttctgggtgaggtcattcattcccccttgacttcactccttccttatatgttgatgattccaagtctacaaatctgtctttttgtctttagtgctgtgaggatgttttcaatgatcaagaggcattttaagcccacatgttcaaactaaatacattattttttcatcccaattccttcttctgcccctccaccttctcctccttttcccttcactgctgtatttatcatcatagtggcacctctattccctcagtgtcccaaggcaaaaacctggaagtcaccccagattcctccttgttctgcatccaaacacacagaccatttattttattttattttacttgaacagacagggtctcactatgttgcccaggctggtctctaactcctgggctcaagcaatccatctgcctcggccttccaaagtgctggaattacgggcatgagccaccatgtctggcccatacagatcatttatagactgcatatttaactatggaaacatttctagaattcagccccatttgccagttgtcattgctcctccatctcctcttgtgccagcccaaactgtgagattaaccttcctaaaatccctgacagcctggactggcacagagagacaaaagggaacaaggataatggaaaagagggctgaattctaattgtgccattctacttagatacctcttctgtctccccgcaacctgcaggagcaaccacaggatcttgaccatggcaatgctctctgtcaccttatctataaaatggggataacggtaattcctgctcgtagagttttggtgaggactgaataagacaacacgtgtcaagttcttagcacaaggccaagtccccagtgaatggcagtgacaatgaggacaatgatgaagatgatcctgtctttcagaatccagctcttacctgccttgccagccccatatcactgcacattcttcctatgcctgtatgatctgcttgccatgactatcactgctccgcaaaccttccttccctttcacaacacttggcctttcctcacgctgttcctttgacttgtccttaccttgttttatttagcaagctcttcttttccttttaaaaggactcaactcagaattgccatctgtgaggtcttcgctgactctgcaaagcaggcttggtgactgcctttcctctgcctccatagttctccatccctccttctaccatagccctgcactcatcatccttttttaaaatttttatttatttatttattttgagacagggtcttctgtgtcacccaggctggagtgaagtggcacaatcacagctcactgcagccttgagcttctgggctcaagtggtcctcccactttagcctcccaagcagtgggactggaggcatgagccaccatgcctggctaattttttgtaaagacagggtttcgccatgtttcccagactggtctcaaactcctggactcaagtgaggagatagagggcatctgcccaccttggcctcccaaagtgttgggattacaggtgtgagctactgtgtctggcctacactcacgattcgaatggtcttttatgtttctgtctgctctcatcttccccagactgtgggcttttgaaagactggaaatgaatttttgcctccctcatgcccagcccatgttagctatagagtaggcacctgataagtctttgataattgaatgtcagtagagggaggacatggttctcaaatttggtaggaggttttttccatgtggagagttaaaaaaatacattttaagaaaaataaaaataatcatcgctttcccttattgagtactaactttgtggcagcaggcattgagctaatttctttatggagatggcttggtttagttttcctagtgatcctatgagttactctgattgtccacagaggagaaaactggagcttagaagggaggggaacttgcttgagattctagggttaacaggagcaaacttgggcggcctaacgccagcactggtggagcaatagggaagtgagaagaggaaggaagatggccaaagcagggttgagagaagagggacaggatgaggacaaggaggggaaaatgagaaagagaccagcaagagcagactaggaaaggaagagaagggaaggagaaaaggaaactagaatgcatttctgtaagtacttccaatgttgcctgaagttttgattgaagtaactcaggaatggaaaaccaaacatcgtatgttctcacttataagtgggagctaagctatgaggatgcaaaggcataagaatggcacagtggactttatggactcagggggaaagggtaggaagggagtgaggaataaaggactacaaattgggtgcagtgtatactactcatgtgatgggtgcaccaaaatctcacagatcaccactaaagaacttactcatgtaaccaaactgtttcccaatagtctatgaaaattaaaaaaaaaaaaaaaaaaaaaaaaagaaactaggagaccaagaaggaaaatgaacaggggatatgtgagaggacgaagagaagctttgaaatgttgtggctgggtaatggctgcatgactagaatataaagagactcctgtatggacatgacaactcacaacaattaacctgctgtatgttatacagtaaatataacaataatttattgttgaggcacggtaattgcatatacctgtagttgcaagccatttataaatttggctttttttttttttttttttttttttttgagatggagtttcgtgttgttgcccgggctggagtgcaatggcatgatctcagctcaccgcaacctctgcctcccgggctcaagtgattctcctgcctcagcctcctgagtagctgggattacaggcatgtgccaccacgcccagctaatttttgtatttttagtaaagacggagtttttccatgttggtcaggctggtctcgaactcctgacctcaggtgatccacccacctcggcctcccaaagtgctgggattacaggtgtgagccaccgctcctggccttataaatttggcttttacacacacccatacgtacacacatacacacatacacagattggcttaattttttttttacttctacttttgtacagttcctacaatctacaagcactgtggctattggcagctgtcactgataccaaatagaattatctttagctcccaccctcaccctcacactcaaaactgcacacatgcaggacagaagcctgggcttgttcctttttctctcgctgtctcagctcccaaggctgagattactctgcttcatctggatcgcccatctctggggtctcatggctgagtttcagttccccaatcctacctgctcctcagggggccagcactggggctgcaggtaatattttgggttggcaggcagggatgcctgtgggacagcaaggtcacccctacatgggtcccagggtgggaggactctctgaggctttgctcttcaggctctgggaacctagggccagagggaggaagggggaagggctgggcagctggaggagagaagggcttgttccttcctcctgtcatccttgcttgacatcctaagacccagctcctgctcaagaccacactggtgcagccctcacagggagcctcttcctctccacgcttggttgggttagtcctcagagagatggtgggttgggatgggaagcaggggccttgttgagaattgtgaaaaaatgttagggaaacggaaaggaaactgggagagaaggagatggagtaagaggagaaaaagtagactggggaggtggaaatgagatggagggaacacacttttatggagtgaactgttcttacctgtgtacttaacctcacacagcttggaggaaggcattcccatctccactttacagatgtggagattgagtctcaggcagggtacatgacttgctcaaagtaatgctagatagaaagccactgaactgggacttgaaccttgctattctaaaagtctctcctgtgtaacactctgcctccaaagaggagaggaggcaagccgaacggaacagagaaaggagcatagaaggagatctggggttgggcacgttagatattgagtctgggcttgggcatgttccatattgggtcccttcctccttggcctgctttttcctgagtcttcagagaactggagagcacccacacccaaaggaagtagaagatccccaccctggtggggacacttcagttactccctaggctctcagataggagaca

SEQ ID NO: 6744 - DNA, 6000 bp, Homo sapiens
gtccggcctgcctgccatgcttggagaagggctcagaagaggcaggcacttcttctgggggcaggtgtggggtggggacaagctgggagacagaggccagaaagactttggtaaggagtttctcctggactgactcattcattcatttactcaatccttcgtgcatgtgcgcatccactcaacatctcagtaatgaggacctactgtgtgccaggcactgtgctaagtgctggtgaggccctgctgtcatggggcctgcagtccaggactcaagttatcaccacacagatcaaagggaaaaccacgctgagttctggggctttgcagaacaggtctgtggagctaatggagctcataggagcttgacttggtcagggaggtcagggcggcttcgctgcggaagacttgtaggatggaaaggaattaaccaaggcaatagggaagagaagatccaggcagagggaacaggttgtgccaaggccctggggcttgatgaaggccagagtggctggggtactgcaacaggggggaagaggccaggaaatgggcaggctgactgtacccgggcttgtgggtgcctttagaaggtctggtctggactctacaagcaaaaggaaggttttttttagcagtggcataaaatgatccaatttgtgttgagcaggttcaagcaggcccgaatggaggcagggagtccataggggcgctgctgtgtccacataaatgatgagaatggttttgaccaagtgcatcttgcgatgggggaatgtgggtgaattggatgtggagtgaggtcaggcggtgtcgaggtctgagaaactgggctggtggatggggaaagtgacaatgaacataattttcctgtaaggtgtgtattttattttgtatggtaagtaatatcttcatttctaccaaggatagaaagaggcaattgttgagctttgggtaagaaagaagggaacgatttttttcttttttcttttgagtctcactctgtcacccaggctggagtgcagtggtgcgatctcagctcactgcaatctctgcctcccggattcaagcaattctctgcctcagcctcccaagtagctgggattacagacgcccgccaccacgcccaactaattttttttgtatttttagtagagacggggtttcgccatgttggccaggctggtcttgaactcctaacctcgtgatccacccacctcggccttccaaagtgctaggattacaggcgtgagccaccacgcccagccgggaatgatttttaatcattctactatttggtgtttaatatgttttctcactaaatctgttcaacaaacctgagaggcaaatactgttatttatttatgaggagagaggttcagaagggtaaagttacctgctcaaggtcacagctggaaagaggtgaagccttcagcaaaaaaagcaaaacaactcatttcattttattccgtgagctgataatggaggaaaaagtatttggcaagaagcggcagggaggggaacctggaggaactccctgctcttgaagaatgcaagggaggctgggaccttgtcactgaggagcccctggcatccttccagagatgcaaccaaaggggtgaccccagtgtgttcttaataggagccgggaaccccttctctgtgcacctcccacctcttgcccctgggaagtccttccctgactctaacctcagttctgatgctgttcccaccctctcagctctcaagcagatcaatgcaatgccacctggccgcttgctttgcccactgggcctacagccggaagcctgcccttcagccctcgggcctgatcccaggccgcctgcagcctgtaaccagacactgtttgcttccagcaggcaccccccgagcccagctccacacaccgttcctggatctcctctccccaggcggagcgtgcccctgcccagtccagtgaccttcgcctgttggagccctggttaatttttgcccagtctgcctgttgtggggctcctcccctttggggatataagcccggcctggggctgctccgttctctgcctggcctgaggctccctgagccgcctccccaccatcaccatggccaagggcttctatatttccaagtccctgggcatcctggggatcctcctgggcgtggcagccgtgtgcacaatcatcgcactgtcagtggtgtactcccaggagaagaacaagaacgccaacagctcccccgtggcctccaccaccccgtccgcctcagccaccaccaaccccgcctcggccaccaccttggaccaaagtaaagcgtggaatcgttaccgcctccccaacacgctgaaacccgattcctaccgggtgacgctgagaccgtacctcacccccaatgacaggggcctgtacgtttttaagggctccagcaccgtccgtttcacctgcaaggaggccactgacgtcatcatcatccacagcaagaagctcaactacaccctcagccaggggcacagggtggtcctgcgtggtgtgggaggctcccagccccccgacattgacaagactgagctggtggagcccaccgagtacctggtggtgcacctcaagggctccctggtgaaggacagccagtatgagatggacagcgagttcgagggggagttggcagatgacctggcgggcttctaccgcagcgagtacatggagggcaatgtcagaaagtgagttccggctgggctgcccggtggggtggatccgaggtgctgaggcaaggctggattctgagggccaaggaaggacttagcttgcaggcctttgaaccctgtggagcccgagactggcccattgcttcacctccagctgctggcaaagcagctgcaaatgcaccgaactgggagggcttccccacccctcaccagggagctggggatgagggacagagcgtcccttggacagacaggaaaaccgaggctcagaggagagaaactcacccgaggtccctgagagcctgctggcaccccgaatccagaaggagccccaacccccacgagtcagctggcctggcagggctccggaggctcccggcgaggcgggggtgggagcaggagcaggggttaggctggggcagccttccatgtacccctttccctgcatgcctggtagcatcctcagagcccctcccacacccccagctctggcacaccctctaaccttcctgttggggcagggtggtggccactacacagatgcaggctgcagatgcccggaagtccttcccatgcttcgatgagccggccatgaaggccgagttcaacatcacgcttatccaccccaaggacctgacagccctgtccaacatgcttcccaaaggtgagtgggccctgcctgcggccacagggccagggggcaggcaccctgggctggggtgtggggcaggagggtacgtcctcacacacacatgctccctgcccaggtcccagcaccccacttccagaagaccccaactggaatgtcactgagttccacaccacgcccaagatgtccacgtacttgctggccttcattgtcagtgagttcgactacgtggagaagcaggcatccaatggtgtcttggtatgaggctgggcccatctctccttcacgtgggctggccccggcttgaggggtcttcccgttctcttcatccctgtgccagtttctgaattgttaggccagggttggaatcccacctctgagtgatttcaggcaagtgtcttgttctctggttctccatttctgcacctgaaaaatgaaaacaatggtttctcttcatgaagggagttcctgacccaccggttaccagacagacggtggctatgatgattgttattctccaaaggcccttctctaggacccacagcctccagaccccagtagcgttcccctctgctgaccaggcctctaggtttagcttgattggcctccagccctggcccatcagggatccccccagcccactgggccctgggacccagcccacctgccccaggatcaaacaggagcccctggtctgcttcttcctcacaccttgcagatccggatctgggcccggcccagtgccattgcggcgggccacggcgattatgccctgaacgtgacgggccccatccttaacttctttgctggtcattatgacacaccctacccactcccaaaatcaggtgagtgggggtccttgaggagggaggcagtggatggagctccactcccggagttcatcctgccaatggcatcgcctccccagaccagattggcctgccagacttcaacgccggcgccatggagaactggggactggtgacctaccgggagaactccctgctgttcgaccccctgtcctcctccagcagcaacaaggagcgggtggtcactgtgattgctcatgagctggcccaccaggtagacccccatctcggggagtgcggagaaggaaacaggggctccgagaggagacggcgcaagtccaggctctgccccgggctgctgagaagggaggagggtgccgcctggcagggcagcaggaaggggtcacgatggtgttgaaatccccactgtgcctggcagatggccagccctggggagggtagttctggggattctcagtgcccagcctgggcgtggcttgcccagctgacccctccccccacagtggttcgggaacctggtgaccatagagtggtggaatgacctgtggctgaacgagggcttcgcctcctacgtggagtacctgggtgctgactatgcggagcccacctggaacttggtaagccagctgcccaggggtctggtgcggggggcatggagggagacctgggccaccgctaccaggccagtctcctgatggccctggggaatttgcagaaagacctcatggtgctgaatgatgtgtaccgcgtgatggcagtggatgcactggcctcctcccacccgctgtccacacccgcctcggagatcaacacgccggcccagatcagtgagctgtttgacgccatctcctacagcaaggtgcagcccgctcctcgtggggcacggggaaggaggtggggacttggcctggaggggcctcactgaaggcagggtctgggggcacagggtcctggtggctctgcacagccttctgagcgccccctcacccccaccccagggcgcctcagtcctcaggatgctctccagcttcctgtccgaggacgtattcaagcagggcctggcggtgagtactgcaccctgggccagccatgagggtgggtctccttctgcccctcgcccttgacccgggcctctgcccaccacagagggggagcctggggggctccagctgtgctctcactgtgccccgtctttccacagtcctacctccacacctttgcctaccagaacaccatctacctgaacctgtgggaccacctgcaggaggtcagtagcagccagcccctccacagccatcctgttggggtcttgagatgctgaaggtacctgggggcagcacatgcgtaagagaatgggtccagctccgcggctgaccagccctgcagggtggatggagcctctgttgctcctccctatagtggaagccgggatggctccttgcaagaggtgtctgagtgaggctgtggttgaggtcctggccagcagctgacctcaggctacagcgggcttcttgatgggagctgtagagccccttcctggtggtgaggaaactgccctcatggttcccgcctctgcctggaactctggagcctgacattcaaccttctccccactcctggctgccctgtgccccccgctggcgccacgggcatgtctctgcacacagctccaccaccctcagcaggaactctgccctctgcccctgccccggctcgagttcctctccatcagaccccgcacagcccctgtttgtagggcagatccccagactgccacaccctcctgccttcccccagaggccgccgctcctctccctcccccagggtt

SEQ ID NO: 6745 - DNA, 6000 bp, Homo sapiens
ctcccacctcccacccccagagattctgatttaattcatctgggccagcctggggttaaggagctttaagaactccacaactgattctaatatgcagccgagtttgagaaccctttagagttctaaggctttcttcagctggtgcccattcagctccaaagccaagctgtactctaaaacctgctagatgccactgtcttgcctgccccctctttggtgaacaaggcagagtgagtagaggttggatgcccacttaggtgaccctgcggggacagccaggctaccctagccagctcacctctgcacctcctgtcctggagcaaactagagaacagtaactcactcagctgcgtttcccctgcagagaaacgagagaacgtcatgtttgtgctgcctctgcatgggggccacttgggcttctttgagggctctgtgctgttccccgagcccctgacatggatggataagctggtggtggagtacgccaacgccatttgccaatgggagcgtaacaagttgcagtgctctgacacggagcaggtggaggccgacctggagtgaggcctccggactctggcacgctccagcagccctcctctggaagctgcgtcccctcaccccctgtttcaggtctcccatctccctcagtgacctggatctgacctcacaccatcagcagggggcacccaccatgcacacctgtctcggagtaggcagctcttcctgggagctccaggctatttttgtgcttagttactggttttctccattgcattgttaggcatggtgacaagtgacagagttcttgccctctgtccagtttcagcatctggttgcttttaagccaagtacatctagtttccctattaaaaatgtgtctgaatagcgattttgctttgccaccaaaaggcttttccctgagaacagtgaaggatgtatgtcattttgtggtggttgtatgtgtccttacatagaccttaaaaagagctcacccttccaggccaatgctgaagacacagctccgcttgggagcctgagaacccaggcttcccaggccagagtgtggcttcttaaacggcaaaggaaattcctttgagtcacaagccaagttttcgccctgtctcctgagaccatttccctacgctttgctgctgctgagagttacgtgaggcacttgttaaaaattcagcctcccaggtccctcccctcggagaggctgattcactgggtctgggaaggagcctggggattttaatttttcacaagtgccccagatgattctcatcaccaagcaaattttggaaatgctgttcaacagcgcccttaaattggaaacatctttgcagctcgttttattgaaattcataatcaggggtgtcctctagctcccacggtctccagagcagcaaggccggctatggagctgccgtcgtgtgaccacagtgtgatgtctcagaagggctctgggtgggctgagcatctgggctgtgccctggctctgcttttcaccctggacaaagtcgctgtggacttcaatttcttcacctctaaaatgggggacttggaccaggtagattgctgagctcactaccaggttcaaagttcaatgacaaactcagtttactgaggtttgagagaacatccctccaggggagcctgggagctgctctcccagtctaagcatgtagatatcatcgtttgccttttgtgtgtgtgtgtcccttatttgataaaaagatgttttgagttgttttttttttaagcactcacttgtaattttagtttttaaacccaagtccctctaactttgcctttgataccaaacaattcaaaagttggatctgagtttggagaaagatatttccaacctaagtgggtattattttgaaaccagatttttaatttaatagcctatatttgtagtctgttggataggtgtttccaaagtgtgtcttctcaagtgaaaacgcaactctaggtttcaagtactccttttctccgatcctgtggtacttgaatatccaaaaaccctgcactttgaacaatcagctgttgctatctggaactaaacagaactatgagtaaaattgcctggatactttaaaaagatatttttcctccttcatctcctttgactccaggacagactggaatataagtagtgggtctgcatggatgtttcagggatcaaaggagccacctgggcgcctgagtgccaaccctcagggccacaggtgggtgtggtttgggcacgggtccaagtgactgtgacgggacccgtgggcatgggtccaggtctgtaacctgaagaagttgttttctgacaatcaccaaatcatccgaatgacatcaaaagcagcccttatctcagagactgagatttctgtggtctcaacttcgctttggtataatttctggcactcaccagcctctatcattatgactttccccccagtgtattatttctctaataggtttccttttcacgttcttttagcacagactggcactttaccctctcagtttggaagttagcccctctcctctgttacttttcccttcacccaactacagctgtgatctagaacattcatagtcatatttctgctactactaccttcatttatcaagactttttatgagaataggtaaaccaagcaataacttcctaggactgaatcaccaccccagaagagcgagaggctcctttcatatgcctgaggccacaccccttaacctgttctgacaaaatagtggctggcccatgtaccagctccattcagaaattcaggaagagaaaagacagccctgttgtcacacaaaccggtgtgggggagggtggagcctggtctgcacggcagtcctggtggcccctgtggaggacaggcagggctggcagcatagcctttgttgccacacaaccggaatttgctcccccaggactgtgggagccagtgtcccagctgaaatctttttagtgtgtggctctgaatggcactcacattccattttggctcacatgaaactaactgaagccctttgttcaagcttcaggctcttaggcatggaaatgagaatgtgactgtggctgtcttacaggaaaattcttgtttgtccctgaatgagagcacagaggcattgaattcacagagctgcaaacttgcctgataaatgagggagtggcagtttatagataggtcatcttttttccttcctccaggtgtccttgcctttcttcccaaagtcattcatttctgatgagtatatgaatccccctcttgctagtaaggttctatttgggctaaaacaaggctgaatttttaaagagtatttgaatatattttagaatcaaattgaggctataaattgcatcaatctggacaattccattgcaggaataatatgttaaaaaccaatggggagaagcacccacatctctcctgtagcactccgtgtctcataagcaatttgaagacacttacaagtaactgattccagtcaaattaggattaactgactcaaaaaatggtgtcaagtttctttaatgtttttatgttagaagtgagtttaacagacttgaagaaaactgttatcttttcctgctgtgagtttacacaaatgattccagagcagaatgaaagcagaaagctgttggttacaatattcttttaacctctctgcagcattttacacttactgggaaccttatgattcaccgtaagagtggaaatatacctgagttcgtgtcctaatggtctctaattcacattggatcgtgggcaaatcacctcacctctctgagcctgttccctcctcttagaccatctctaagaccacttcatctatttacacatcatttgcttgaacattgctgaacatctgcgtgaacttggcctctccagcccttgcaggtggaaacagctgtgtcaaggctcaaggctcacgctgaggggacttggagggagggggcttctgcattaagctttcctggtgaagacccttgatcttgtccaaagccctgtgtctttgactggcttctcttcagagtccccgttgtcatcgtaagacccttgctgtttggagggtggtcttgtgactgtggcagctgctggccgctggaatgaggagcctatctccatcctccagtgtgactcaggcagagcattgagaattcccagggcagaaatccttcctgctcaggctttcattctaaaactacagtcttcattaaagctgaactttctgggtagctgagcttatatgcccggcatctgaatgagagctctctttgtaactgtgtgacttgagatctagtttgccagctcctgggaaacaatacatgtgttcttgtttgtgtttgctcagcaagcagatgtctgagatgtaagaagcttttcttttcctgtggcattgattctgacttagagctgaagtaaaagatcactgaaacatcacgtcaagttgaagtcactcataggtctttgtcctttaggcaggacaggagagtcattaagaagcatttcactgtagcattctatcacaatatcatctggaattgttttctttgcccagaaagccttaacttgcctctagagaatccctggtattacaacgatattgcggcattagaattccaactcttctgctgtggaagtttgaagcgaagctgcagcaaaaccagagaatttcctcaagtggcctgtaggctccttgttatcttatgcccccacccctccctcaacaatatgagtgatccagaactggcccaaacacctcagctctggtccctttttgcccttcttggccttactctgttgttcaaagccactttggattgcttggatgcttcgaacagccatgaaaagtagcctgcctgtggcatttagaggccaagcaattgacagaaagggtttcttctacctctgttatctaagcagagggaagtaaacctctcaccgccccccacccctcactgcccccgattaccctagaattgctttcgccaaattgtagttgaagctaaggaaggggaatctggcccctgctgggagagggaactggaatgccacacaaggcaaggcctgcttccttccttcccctctgctgctgctgcctcggaacgctgcagcccaggcttcctcccacagtggcccttggaagcaggccgcagagtagacagctgctccttttggaagagtcagtcccctgtgttttctgaactgtttttcctagcatgtatgtgggtagagctttcatgcatctctagtaataataagctgaaattagttttttttttaattctccaatttaaaacttttaattaaaaagtaaattttaatgtcgaaaatgcaaacttggggagggcagaaagatcacacacaaggctgtcacttcatacttgcaggattgcacagcagccgggcagaggcgctcctcacttcccagatggggcggcgggcagcagagacgcacctcacttcctagacagtgcggcagccaggcacaggcacacctcacttcccagacagttgggcggccaggcaagcgctcctcacttcccagatggggcggctcccgggaagcggggctcctcacttcccagacagggtggccaggcagaggtgctcctcacttcccagaacaattctttatgaatttgataaaggactgaagtgcaactgaaagctgctagtgatgatctggtaatatacaatttgtccagtagccagtttgtttttattgtgttttctaaccataagagatcattaaaggcaaagcctgtatgacgctgtacacacacaaaaaaatggtcaccgcaggccatactaccaatgaaatggtaggtaaacaaatcttctggtcaagagaaaaaaaaaagaaatagcactctgcatgctttgctctacaagacgaatttccctagaaagaatccaatgaaggccgggcatagtggctcactcctgtaatcccagcactttggaggccgaggcgggtagatca

SEQ ID NO: 6746 - DNA, 6000 bp, Homo sapiens
ttattaactcactcaggaacatggcattaggctatattggggtcctttggcttccttgtttgctcagcagtgaatcgcgtccatatttaggaaggctctgcttagttacagtaaggaccatcctcctgatggatgcgtacactgctcttcctgactttagatggaacttggtcctggccttctcctgcccttcagtcctggtgtctggggtgggtccattgaggcagtcctgtgccgtgcatccccgtcatggctcagcatgtgcctaagcccagcccatccgactctccctccagggcgatgagggtggagagcgggtgctacagcagcgctggacctccttcctcaaggcccagctgctgtgctcacggcccgacgatggcttccccttcaacgtgctgcaggatgtcttcacgctgagccccagcccccaggactggcgtgacacccttttctatggggtcttcacttcccagtggtagggcctccagacctcgctggagatggaagggtgaagggtggctgggactggggcccccagggctcctgggttaatctggttatttcctctgcaggcacaggggaactacagaaggctctgccgtctgtgtcttcacaatgaaggatgtgcagagagtcttcagcggcctctacaaggaggtgaaccgtgagacacagcagtggtacaccgtgacccacccggtgcccacaccccggcctggagcggtgggtactggctccctgcacccagaaggggtgccgggaagatgtgggtccccacaccatgctgggagcaaggctgcctagcctcgggcagatcacttggcttctctgaatctcttttctcatctttaatatggggatataggcccaggcctgcttgtgtactgggttagatataagtatgaatgtcagaatatcttcagttctgtttcaggatacaagtgtgtccccatcagggcacttgctgcaggctgttacaatcatctcttcatttggtcctctcccctactcagctgcaagctccttatttaattatcaagtgactgaatgggcaagctgtggggaaataatcctttcttcctcccttctagcctaacgggctaccctgatagcagaccttgagacaaggatatacgtgccaaatagtttattagggaggtgatgccaggaagcagcatgaaggaataggaaggttgagaggaggagggagggaaaccaaaagagggtgtgtcagcacgctgttgttgctgtgggcagctggagctgggtcctgctggagcccctgacagatggtgtggagcacctctcagaatttcaggaagcctcaggcggggcaggaaagaactgccgactgcactgggacgctctgcccggccagggcttcctgagagcactggtgaagggtgcagaggagcagggagtgtggtcctggttcttgaggcccctgggcatatgaggctggggtggtgggcagggaggaggcacagcaaggaagccctccaagcactcggtttccccgcaccctgggctttgtccttgctccctcagatgtgcacactggctctgtagagcactgccagggatgtgccctggctccgggcggggggacagacaccgctactgtccactggggaagcagggcccgcatcctgcctgccaccccgaggtgtggctggcctcacactgctgctttctcctccagtgcatcaccaacagtgcccgggaaaggaagatcaactcatccctgcagctcccagaccgcgtgctgaacttcctcaaggaccacttcctgatggacgggcaggtccgaagccgcatgctgctgctgcagccccaggctcgctaccagcgcgtggctgtacaccgcgtccctggcctgcaccacacctacgatgtcctcttcctgggcactggtaagtgtctgcagcccagcaggctcaggggaaggggtgcacgtggctggtgggtcatgggcagtgggctccacccagggcctgagtcctgtccacaccccaggtgacggccggctccacaaggcagtgagcgtgggcccccgggtgcacatcattgaggagctgcagatcttctcatcgggacagcccgtgcagaatctgctcctggacacccacagggtgagcaggccaacgaggaatcctggcagggtacttggggggtgccctccattagcaccaagcagtccccacccagcttctcctcccttgcctcaggaggatggaaagataaaggatccagtcatgaactattagaaagtggggtcgcctgttacgtaacaggcctcttgggggtggctctgggaggcatacaagccgggtggccatgggtgatggccctggctgcccatgcccgcttctcatccccgtgtctggctgtgcaggggctgctgtatgcggcctcacactcgggcgtagtccaggtgcccatggccaactgcagcctgtacaggagctgtggggactgcctcctcgcccgggacccctactgtgcttggagcggctccagctgcaagcacgtcagcctctaccagcctcagctggccaccaggtgagcactcccaaaggccccttcccatctgtccagccctgcacaggtgacctcggagcaccatcctgggccctccttgggaccgccacacagcctcgtttatgtccactgtctcagcataattattaattagctctcctgcttcctctcaagtgcaattcagacaggaaattgtgtgtttatcttggctacctgtaaaacgaggacatgatttggtaaagtatgaaatagcacagctttgaaaagccttgcaggaaaatgtggattagcgtgtgaacgtgctttagtaatagtagggctaggaaacagtccattaacaaacccagtaaaaattggtttcagaataacctatttggattataaaatgttcatttagaaaatagggatgaacacaaagcaaaactacccctcatcccaccacctagagagaatcgcagtgagattttgatatattatcctctcaggttttactacatatgtgtatagataacaaaaatccttttattttatttcatttcatttcatttatcttgtttggagactcgctctgtcgcccaggctggagtgcagtggcacaatctcggttcactgcaacctccacgtcctgggttcaagcgattctcctgcctcagcctcccaagtagcagggattacaggtgcccgccaccatgcccagctaatttttgtatttatagtggaggcagggtttcaccatgttggccaggctggtctcgaacttctgacctcagatgatccacccaccttgggctcccagagtgccgggattacagccatgagccaccgcgtctggccaaacattcatatattttatataacattggcaactgtcctgtttgtagtgttcttgcttcacatatggatacacctggtgtcagtttttacaaaaaccaagtgagttttggtgcgtatgccaggagggacaccccagaatgttaactgtcatgatcactggctggtagatgctgtgatttttgtagtgttttcatccttcgtgcctggttgacttatctgtctcctgagtgtatccagaattactgtcctttattttttattacacagatgtatgcatgtgcactgtttaaaaaaaaagatgagaacacatcaaaaaaaattttaattaaaaaaaagaaaaagagagatctatacatacagatcccagctgtccttctaatctttttctgagggtacatactattttttattattattttttgagacagggtctctctgtgttgctcaggctggagtgtagtggtgtgattacagctcactgcagccttggcctcctgggctcaagcaatcgatcctccaacctcagcctcctgagcaggtggaaccacaggcgtgcgccaccatgcctggctaatttttctattttttgtagagatggggtctcgctatgttgcccaggttgtcttgaattcctgggctcaagcgatctaccggccttggcctcccaaagtgctgggattacaggcgtgggccaccatgcctggccactgagggtacatactgtttatgtaattaagggaagtgttatcttagctttgacttgaaataatgtgtagacagaggagatgctgactcctgtgggtggggaatcagctcaggaaaggcccttgcccaggcccaagtctgcagtgaggggtgagggaatgtgagctcaggggacttcctggccaatcccagaattctctctggccctcaggccgtggatccaggacatcgagggagccagcgccaaggacctttgcagcgcgtcttcggttgtgtccccgtcttttgtaccaacaggtgaggtgccccctcaaaaggtggaggagagaggtggggacaagtgtgcttggaaggctcccccaggcacagatgttgtaaatgcctttcctcacttccttgccccctacccctgtaagcaggtccccaggaagactcagtcccaggggtccccggagttgcccatcgtggcaccaggggcatagcccagagggaggcaggggagcttggagctactgtggacgctggcacccccctaccccatgccttttctgcctacaggggagaagccatgtgagcaagtccagttccagcccaacacagtgaacactttggcctgcccgctcctctccaacctggcgacccgactctggctacgcaacggggcccccgtcaatgcctcggcctcctgccacgtgctacccactggggacctgctgctggtgggcacccaacagctgggggagttccagtgctggtcactagaggagggcttccagcagctggtagccagctactgcccagaggtggtggaggacggggtggcagaccaaacagatgagggtggcagtgtacccgtcattatcagcacatcgcgtgtgagtgcaccagctggtggcaaggccagctggggtgcagacaggtcctactggaaggagttcctggtgatgtgcacgctctttgtgctggccgtgctgctcccagttttattcttgctctaccggcaccggaacagcatgaaagtcttcctgaagcagggggaatgtgccagcgtgcaccccaagacctgccctgtggtgctgccccctgagacccgcccactcaacggcctagggccccctagcaccccgctcgatcaccgagggtaccagtccctgtcagacagccccccggggtcccgagtcttcactgagtcagagaagaggccactcagcatccaagacagcttcgtggaggtatccccagtgtgcccccggccccgggtccgccttggctcggagatccgtgactctgtggtgtgagagctgacttccagaggacgctgccctggcttcaggggctgtgaatgctcggagagggtcaactggacctcccctccgctctgctcttcgtggaacacgaccgtggtgcccggcccttgggagccttggggccagctggcctgctgctctccagtcaagtagcgaagctcctaccacccagacacccaaacagccgtggccccagaggtcctggccaaatatgggggcctgcctaggttggtggaacagtgctccttatgtaaactgagccctttgtttaaaaaacaattccaaatgtgaaactagaatgagagggaagagatagcatggcatgcagcacacacggctgctccagttcatggcctcccaggggtgctggggatgcatccaaagtggttgtctgagacagagttggaaaccctcaccaactggcctcttcaccttccacattatcccgctgccaccggctgccctgtctcactgcagattcaggaccagcttgggctgcgtgcgttctgccttgccagtcagccgaggatgtagttgttgctgccgtcgtcccaccacctcagggaccagagggctaggttggcactgcggccctcaccaggtcctgggc

SEQ ID NO: 6747 - DNA, 6000 bp, Homo sapiens
tcccttccggctcactgaattccaggatgacactcgcttaagtcacgacgccctcccagagcgcacggtgatccagctggattcctcgcccaggtaacctggactacgccatgtgcagagaggcagagccattccctggctctcaggcccctctgccccagcatgtgctgaaccagtgcagggcgcttgccctggtcggaagcagcagcctcctgggtcagcccaccttctacgcacaggtttgtggtcctattcaacccactggaacaggagcgattcagcatggtgtccctgctggtcaactctccccgcgtgcgtgtcctttcggaggagggtcagcccctggccgtgcagatcagcgcacactggagctctgccaccgaggcggtccctgacgtctaccaggtgaggtgtgggcttgtcaggtgggcctggccctctgcccgtcgtgggcccctccccgcccggcgacgccagcctcccaccctcctgcttgtggccctgctactctccaggctgaggacaagtgtcctggggagggggttgtccagaagacaggcactcttgggatttgagcgtgtccttgaaaagaaggggaaggttggtatggtaatagtaatggtaaaaatagcagttataatgccccatcattcagtcattcaatgtttatcgaaagcttaatgtgttgttaccgcttcatactttttcaaatatcacttgagaatcataaagtctgatgaggaagaaagggcaaatcagatcacctccactttggaggaggggcagaggcccagcgggtgcaggggcttgctcaagccctctgttagtaagcggatgcctcagcacccctgtggcgaaagccgtgcccccacttcctcacccctcctgtgcccacaggtgtctgtgcctgtccgcctgccagccctgggcctgggcgtgctgcagctacagctgggcctggatgggcaccgcacgctgccctcctctgtgcgcatctacctgcacggccggcagctgtccgtcagcaggcacgaagcgtttcctctccgtgtcattgactctggcaccagcgacttcgccctcagcaaccgctacatgcaggtctggttctcaggccttactgggctcctcaaggtaaaaggccagggtggtggggaagggccaggggccagagtagggcgtgtgtggtggtggcactgtgcagagcggcctcccggccctgtgagcattctgccacctgacccacagtggaccggggcctgggccatctcagctccagcctgacagcatggggaagcagggcacggctccttggggaagctattccgtgtcctcccaggaggcaggcctgacatgctggtgtggggccaggggtcagggctgtgttttttggcagagcatccgaagggtggatgaggagcacgagcagcaggtggacatgcaggtccttgtctatggcacccgtacgtccaaagacaagagtggagcctacctcttcctgcccgatggcgaggccaaggtatcctaaagatgccttgaacaacctggcagggagggcaggagggggcacaggccttcccacaggtttattgctgcctgccaggggccttgtctttcctgttcagcccaggggtgtctgggaataggtgctctcttgcccagccctgggctggcaccttcctgctttgccctctgtgctgtagtttcaacagcaatctgctctttctctagccctacgtccccaaggagccccccgtgctgcgtgtcactgaaggccctttcttctcagaggtggttgcgtactatgagcacattcaccaggcggtccggctttacaatctgccaggtgagccctgcatatgaggaagggtctggaaggaggtgtgggctccacaactgtggcgtattcttccttctgctgcttctctgttcatacctctgttccgtatcatttgagacagggatgctccattctcttggagaaaaagtcatccagaaatgccctggggatttcttgggaggttggacagagcctctccccagctcggctctgatcccccagcccagcctcttagctgtgcttcagcctcacacctgtccatgcccccactttgttcctgtacccaggggtggaggggctgtctctggacatatcatccctggtggacatccgggactacgtcaacaaggagctggccctgcacatccatacagacatcgacagccagggtatcttcttcacagacctcaatggctttcaggtgactcctgggcctgggtctcggagaccccacagagtagaacttggactctgcttttgcccctgtcacaggccctgggggatgatctgccctgatggagaaagatgaatgagaggcgaagagttatcggggactccttcagtctggggaccgcttgggcccacatggtgcccgggtgcccttgatctgctggccttgcccccacaggtgcagccccgacggtatctgaagaagctccccctccaggccaacttctaccccatgccagtcatggcctatatccaggacgcacagaagcgcctcacgctgcacactgcccaggccctgggtgtctctagcctcaaagatggtgagtagggcccaggagttctgcagagggtatcagacaaaaagaagcccgtccccaccctcaagggctccccgctctgttggcctcccttgcctctttctggactgcatcacctccatgcttggagagggggcaagccattcagagctcttggcacaggaggcaggcatctgctgtccccatcccctggtggaggcagcagtgtaggcaactgggtggagtgtcctactggatgccctgaagaaccgtcagggttacaactcttggggccaaagaaaggaaaaaaaatgtcaaaaagcaaagctaggcacagtggttcactcctgtaatcccagcactgttgggaggccaaggcagaaggccaggagtttgagaccagcctgggcaacaaagcgagacccaggctctacaaaaagatttaaaaattagctggatttggtggcacgtgcctatagtcccagctactcaggagactgagatgggaggattgcttgagcccaggagctggaggctgcagtaagccaagactgtgccactgcactacagcctggtgacagagcaagacccagtctgaaaaaaaaggcaagaagcatcagggtattgaacagtggttctcagctgaggtgtgcaaccctcttctgggcggggctgagagtagggacagcttgtaaagtgcactcagtgttatgaaatattaaggaaatgagaaaattacatactgttttccttccagtgatcattaaaagacagactgacgttctttttttttgtttttttgttttgagacggagtttcactctttcgcccaggctggagtgcagtggtgcaatctccgctcactgcaacctccgccttccgatttgaagcgattctcttgcttcagcctcctgagtagctgggattacaggcgcccgccaccatgcgcagctagtttttctatttttagtagagatggggtttcaccatgttggccaggctggtctggaactcctgaccttgtgatctgcctgcctcggtctcccaaagtgctgggattataggtgtgagccaacacgcccggccaagactgacgttcttaagaatcaagacgggcatggggagcactggcctggagtcagacccgggtagctggtcacgctggcagctctgtgtggcccccatatcctcagggcaaaacgaacagtttgcacttggtggcatctgaggcccttgagatctgtctctgggaagagcccttgtgaagggctgagccgagagcacccagtcaaggctaggcgtggcccaatggctggcaagttcgggggcctgactccctgctgggaggagtgtgcctttctctgccaggagcagcccctggtccatctgtgtcatgactcctaactgcagcccaatatccctcactggatcttctcctctccccctctgggatatggtatttgaaaaaatgactgtcttctatacaagggatccgttttagggttttcagacatctttctgtggttgttctgggttaaaagactgagcaactacacaagtcagtaaggactggagaggtgaaagggagaataaggccatctgtcccggtggaatgtaggggcagctggtgtggtttccctcgagatcttgtacaagaacagctgcacccacctccaacacctgcacacactggggcctctgtccccaacacatcagccatgcaccgagcccctgctccaagcatactctagaaaacagagcaaaggtggtcacttgccatatcttttttccagggcaacccagatgacacttaatatgagcctctgcctgacttgccatctggctgtcctttccagagccctacttttaacacacagacagtcagagcttgagtctgacctgctggggctgtctggctgtccagtgtagaacaagggcaggagagcctgtgttttagtcacaacctgcccaacctgagcaaacctgccccagattacggaggtgtgcagcaacactaccgatggctgttgatctaagtttttcatttctggtttattttgttgtatgtaacccgtcctgattcggtttcctgcctgggcccctaggcccgttccctactcctgagtcccagagcgtggggggtaaactgccagggccagccttcccctttctggacctcatgcttcctcatctgcaaaataacggcccaggacgagcccctcatcaggttccctcccagccgtgggaacccgtgacctctcctgagtgactcagcttctgtctctcgagctgcgcttttccgtcagggcctgtggcttgggattctcctttgaaaggtcagtgcctgcttgggggtgggggcgggccagcactcactgtttgcttccccaggccagctggaggtgatcttggaccggcggctgatgcaggatgacaaccggggcctaggccaagggctcaaggacaacaagagaacctgcaaccgtttccgcctcctgctagagcggcgaaccgtgggcagtgaggtaacatctggggctgacgcccagggagccaggtctggctagtccctgggggtggccggggggtccagcctagggctcgaggagcgtagttggaggtgggcaagagagagagagtagggctgaattcctggggtggggggaggcagtctggcgttttgtgtcccatctcacgcagcctggcaccttcctctcccagcagcgctctgtcacctgtgcccctcatgttcgtctcccactttcctctgtgctgccctcctctgccctgtcccagcattctctaagcctgtgctccaaccccgctcatctcatggctttctttgccccaccagcctgactttttctccaaactggcagccatgtttaggggcttgatctttcacagcagcaggagcggtaaccgagaggtaagggtcggctctgggagcggggaactagtacgagcaaggtgtagctgcgccagagcccaggtgacagagcccgccactcagtcactcgtgcatcagatagatattgagcacctgctttactgtgaggacccagagggacataagtgcagacagtgctgactctcccaggagtttactcgtgagtaggggtggcagagaagccatgtgtgtaaaaatgcaaggtagaaagggctttgtctcactgatcctgaggagcaaggtaataatgtgggctaaggagatcgaggtcaaggaggtgtcacccaggtgtggctttgatgaatggggtgtgatttgaagatatgaaccagggcacaggataggaggcaggaaagacaacaggctggggaatagcagtgagttccttagttatgctggagctatgctatccagtacggtggccagtagccctatatggctatttaaattacaactaaatcaag

SEQ ID NO: 6748 - DNA, 6000 bp, Homo sapiens; identical to SEQ ID NO: 2820

SEQ ID NO: 6749 - DNA, 6000 bp, Homo sapiens
agattgcttgaagccagcagttcaagaccagccttggcaacatggcaagaccccccccatctctataaaaataggccaggcacagtggctcacagttgtaatgccagcagtttgggaggccaaggtgggtggatcacttgagtccaggagtctgagaccagcctgggcaacacagtgagaccctgtctctataaaaataggccaggcatgggccaggtgcagtggctagtgcctgtaatcccagcactttgggaggccgaggtgggcggatcacgaggtcaggagatcgagaccatcctggctaacatggtgaaaccccgtctctattaaaaaatataaaaaattagccaggcacggtggcgggcacctgtagtcccagctactggggaggctgaggcaggagaatggcatgaacccaggaggccgagcttgcagtgagccgagatagcgccactgcagtctggcctgggcaaaagagtgagactccatctctaaaaaaaaaaaaaaaaaaaaagattgcaatatatgataatcatttttaaagtatttgattaaacctgataggttttccggaaatggaaaaaaaaatccattttaaaaccaagctgatttttagaaaatttcaaaatgtaaatcagccctatccagaatataatttatttaaaactttatcttaaggagtcattttataatagtataactattaaaaaagtaactgttattttaatgttttgaaataaaacattttaaaatatgaatactgtagcttaaaagaaagaaactggagaaggaaaagtagagaaagaaatgccaattccagtccaaagttttatttgtcaagttttcttagaataacttttacctatttacgaattcttgtaaatagaatttataatggaaatactgaaagacttttgcctaaagtgtcattatcgaatactgctgtgatgttactgtaatgtaataagttattgttgcaaagtgctgtttttgacttaaaattttattttgtgtgtcttgaaaaccatagtattaaaggtatcgagattgtgcaagtgctgggcacacttggcatgggataatgtttttatttttacaaaattgtaatataactatgcaagtgtttattaaaagaacacaaactgaaaaggttatgggattaaaaaaagtaatgggattaaaaaagttatgagatgttctgcacggtggcccacgcctgtaatcccaacactttgggaggccgaggcgggcagatcaccaggtcaggagatcaacaccatcctggctaacacagtgaaacccgtctctgctaaaaatataaaaaattagccaggcatggtggcacacccctgtagtcccagctacttgggaggttcaggcaggagaactgctggaacccagaaggtggaggttgcagtgacccgatatcgcaccactgcactccagcctcggcaacagagtcagactccgtctcaaaaaaaaaaaaaaaaaaaaaaaaagttatgagattaaaaagttatgggatttttaaaaagttacattatgggataaaaaatgttatgaaaaaagactgaggaaaaaaattgtgggaaaaaagttgtggaaaaagttatgaaaaaaaattattccaaaaaaagttttatgaaaagctatgggattaaaaaaaaagtcatgtgataaaaattaaataaaagcaggccactgtcagcaaaacctggggaagtgtccaatgggggaaacaggtgcagatgagatgaagattactgtcatccaaaagcagggaactaggcccggcgtggtggctcgctcctgtaagcccagaattttgggaggccgaggtgagcggatcacctgaggtcaggagttcgaaaccagcctggccaacatggcaaaaccctgtctctactaaaaatacaaaaaattagctgggcatggtggtgcgtgcctgtagtcccagctactcaggaggctgaggcagcagaattgcttgaacccgggaggtggaggttgtagtgagcccagatgcaccattgcactccagcctgggtgacagagcaagactccatctcaaaaaaaaaaaaaaagttatggaaaaaacttaggaagaaaaagttatgggataaaaaaagtcatgggataaaaataaaaataaggctgggcgcggtggctcacgcctgtaagcccagcactttgggaggctgaggcaggtggatcacctgaggtcaggattcgagaccagcctggccaacatggagaaacctcatctctaccaaaactacaaaaattagctgggagtgctggcgcatgcctgtaactccagctgctccagagtctgaggcaggagaatcgcatgagcctgggaggcggaggttgcagttagccaagacagcaccactgcccttcagcctgggcaacagagtgagattccgggggggaaaagaaggagtgtaatgtaatgcctcactcatcttctttaagcagcagtgggagtaaatcccaccactttagggcaacctccatctcccactgcagccaagattcaatctaagggcgttagtgggaagaaaggctcagcataaaataccatatgagctctcaaagtccagtgtgagcatagcgtgttttttgttttttgcttaaccttgtattatacagcttttcaaacatagaaacgtagggagaagttcagcaaagtggcatgtgcctgtattccagctatctggggggctgaggtgggaggatcacttgagcccaggagctcaaagctgctgtgagctatgactatacctctgcactccaacctgggcaacagagcaacactccatctctaaataaagacgtagaatactaaaatgcaataaacccccatgtacccatcagctttaacaattaacaaatggccaatcattttttaatttttttatagacatgggggtcttactgtgttgcctaggctggtcttgaactcctgggctcaagcaatccacctgcctcggtctgggttcacaggcgtgagccaccgtgcctggcccaatctttttcctgaatgttcctacatctccccctgggttattttaaagcaaatcccaaacatattttagtttttttttttattttttaagagacagatcgggccaggcatggcggctcatgcctacaatcccagcattttgggagactgaggcgggaagatcacctgaggtcaggagttcaagaccagcctgaccaacatggagaaactctgtctctactaaaaatacaaaattagctgggtgcgtggcacatgcctgtaatcccagctactcaggaggctgcagcaggagaaacgcttgaacctgggaggtggaggttgcagtgagctgagatcgtgccattgcactccagcctgagcaacaagagcgaaactccatctcaaaaaaaaaagagacagaacatatcactgcactccagcctgggtgatagataaagccagaccttgtctcaaaaaaaaaaaaagaaaagaaaaaacaaacggtgtctcactctgttgcccaggctggggtgctgtagcatgatcgtagcgcactgcagcctcaaactcctgggctcaagtgatcctcctgcctcagcctcccaagtatcgagattaaaggtgcccaccaccatgcctggctattttttatgtgttgtagttgaccaatcttatctcaaactcctggcctcaagcaaccccccgaccccgacctggacctcccaaagtggtgggaattagagacatgaaccattactcctggccaaattatttcacctgtaaaaacttcagtatgtatctcaaagagataaggacttgtttttaacagaaatacaagcctgtatgacatagaaatacaaaaaataataataacatagaaatacaatacctggcccaacgttgtggctcacgcctgtaatcccagcactttgggaggccaaggcaggcggatcacttgaggtcaggagttcgagatcagcctggccaacataatgaaaccccgtctctaccaaaaatacaaaaattagccgggcatggtggcactcgcctgtaatcccagtctactcgggagactgaggcaggagaatctcttgaacctggggcggcaggggggttgtggcgcggagcttgcagtgagccgagctcctccactaggcaaaagggcgagactctgtcaggaaaaaaaagagaagaaaagaaatacaatacccgaaaagttttagtaattccttaaatcagttatctttgaattattatccaaaaaagatccacacattgaaacattttgttgatacatctcttaaatctcttttattctgaagtgttttcccctcccacatttcccactttgccatttttttgaagacgacagatcatttgtcccatataatttcctacattttggatatggttgatttcatacctttggtgtcttaacatattcctgctaatctctatatagcctataaactggtagttagatcttgaggcttgattaggttcaatttttggcaataggtgatgctctgtatttcctatgcatctcaccaggaaatgatatgatggtatgattgatcagagttgaggtattgttagctagcctgatgcattcattatgtctttttttttttttttttttttttttttgaggcaaggtctagctttgttgcccaggctggggtgcagtagcgcgatcgcagttcactgcaacctccgcctccctgactcgagcgattctcccacctcagcctctggagtgctgcgaccccaggcgccgccacctaattaatagacgcgttgcctccgtttttcaaatgtccctttcaggacgccgtccccttcctggtacgcgaagcgctgggagcgaaagggacttccgggagatctaggaagtcgcttctttttctggtagaaggcggggttctcctcgtacgctgcggagtctctgcggggtgtagaccggaatcctgctgacgggcagagtggatcagggagggagggtcgagacacggtggctgcaggtctgagacaaggctgctccgaggtagtagctctcttgcctggaggtggccattcattcctggagtgctgctgaggagcgagggcccatctggggtctctggaagtcggtgcccaggcctgaaggatagccccccttgcgcttccctgggctgcggccggccttctcagaacgaagggcgtccttccaccccgcggcgcaggtgaccgctgccatggcttttccccatcggccggacgcccctgagctgcctgacttctccatgctgaagaggctggctcgagaccagctcatctatctgctggagcaggtcagtgcttgcctgacgcctttatcgcatctacagtttagcactcattggatgcacatttcttccttgccgtgcccctttgatcttgttcttggcccctggtattgtccttggcgcttccccagcaggtccagaatgaatccagggagtagtaagagctgtttggaacctggccagagagttaatggaaatcaccccccaaccccgcatacaggcaagggagacaccattagtgccaggcatccctagggacggaaagatggttaagacatctttgccattagggatcttaccactccagtaggagctgtatgaagcacaaattatcacacacaggtggtaaatgagtgatagagctagtgtacccgaagagttcacagtaagtgatcatttctagttggggtgatgatctaggagcttcaaggaagtgagtgtgagtaataagcatattttctttggagactaagcatgctccaggcagatagattggtaggagcaaagttggcaaaccagggaaagacaaggcatgtaagggaagacacccatcagcagttacacagtagccactgaaaaaaattttttttccatttgtggcatgagacaatacttgatgattctaatagtgatgtgtgtggtggcgtaaatgggcaacaagaaggc

SEQ ID NO: 6750 - DNA, 6000 bp, Homo sapiens
actccccaaaaagctcacctgataaaatacaacttaagtaaaaacaagatgtcagctgggcacagcggctcatacctataatcccggcactttgtgcggcagagacaggcagatcacttgagcccaggagtttgagaccagcctggctaacatggtgaaaccctgtctctactgaaagtacaaaaattagccgggtgtggtggcgtgtgcctgtaatcccagcagctcaggaggctgagacacaagaattgcttgaacccaggaggcggaggttgcagtgagccgaggtcgcaccattgcgctccagcctcctgggcgacagggcagctgtcacacacacacactatgtcacgtcctcaaatgctgcctcaactactaacactcataaacactcaccctcgcacaagattgctgccctaaaccgatcctatgttggagtcggaccagaactgaagcttctgtagcaacaatctcaagaaagattctgattggtccagcttgagtcacttgcaatcaccattttattgaaagtaattgttaggttatctgtcttggcttgactttaatcccaaggggcagaaactgacagacctgggtcttctgtgcacctgccagcagcaaggagggcatgggcccgagattgatagaacttacaaacccagctattcccctagacatgaatcgcctaagggagctccttaaaaatgctgatgcccaggctctaccccacagagattcagatatagctgctttggagaagggcctgggcaactctaatctttttacatctcccacagtggtctcccaaaagaataaatccctccccttcttgaggctttgggttgggctcccaggtgcttcacaggctcccccaagctctttgctctgtttctccagcttcacctcttccttctacagccgcacttcagcctttgcagatcctcaggtaaagcacactttgttcctggcgtgctgggtgttccttctgcctggagttttctccctgccatcccctcccttgcccgtcaacttcccctggcatactcctacactgggaaagcttctttcccctccctgcaccccaagctgggctggagccccctggcgcctgtgttctgtgtctcccctgtcagagtctgtgttatgctttattgaaagtgattgttaagtaatctgtctcgccttgactttaagcccggtgcggacttgctcaccaccattggaatgaatggcacacacagtacgccaagcatggggttcggccagcttggcttggcattttttagccatttattgggtgcgtacttaagcgttcccagcctcagtttcttcatctgcaaaatgaggatggtaatagaatcttcattagctgaaagtttctagaaatgtaaagtactcagctggcatctgacacaatgtaaaaatacgtcaaaatattagccattattttgaaagacaccaccttttttggtaaaggtcattcactcctcacctctcctttagcactcatttttctctattatctgtttctaccagcaattcagaaatagggactgtcttatttctttatcccccaaggtctagcctgcagcaggtcctgaatatatatttgttgactgatgactcaggccctagatttgagaacactctgttcatacctagaagcaggcaaagttggaacccctgactatcactgcccctgagaagacttcagccgtatgcagaacccttcctttcagaagccccttgacccctttccccccatcaaatagctacccccagagtggaaagggagagaaggtggagggggatgctcaggattgaggcctccacagccagtgctgaagaaaaggggcaagagtcatgcatgagagtgtctctatccccaggtctaagctgtagcctaggggacaccacatacttggttagactctatggggctgtttgtttgaagtcaactacacttttgagttaaatgagtttctatggcgaacggagtgctgagttctcaaatctaacgttttaggaattttttattcctgcagagagttggggagctgtttaaaagttggttggtttagccagtatagctagattcctcaaggtcaacacaacgccatactgctctagctggggctagatttctcatgatagtctaaactgtgtgatggccaagtccccactttgaagatgtccaaattcagcctcagacatttctcctcaagaaagggggggaaaaaaagccttttgtgcccctttcccaaattatttgctcatgtcgcaagactggggtctcctcctaaaaaggcagccagtacccgtctcccggcagggacactggaactcccatggcctggggcctcttccgagttctattcagttgtagtcttggagtgacaatattatcagcccgatccttacagatgaagaaactgaaatgtagaggttaaaagtcctgctgcgagaagaaccaactgaaaaaaaaaaaattctcaggctttacagcaagcaaacttcactatgatttttcacaattctgattctgtattctctgggggttatctcagttgcttctttaggatggggttcattatgttgtacatatatcccaatgtgtctgtatgaatctttgtcttttttggggcagtgtggacgacgggttctttttagatactgttcctaaaaaggaatcagtgcatacacctgtttgtcaaagcacctttgctttttgtgcaactgctttatattaacaatacttaaaatagctttggaaaaaaaaactactgtatgtaatggaattgcagaatatgctgcacatgtattttatttagttatcctttctttaagaatattggatgacatttcctgacgtgggagggagaaactccttttttttttcctgcttttaaattgtaacatagttgaagatttcttttttctgttctcattgaaaaaaaaaaaaaaagtcctgctgtgaaaagtccattcttgggcaagggcagccccagaagggcgtgatttctgggcttctgcgggctgcatggcctcctctggatcctgagccctggtctccaacctggacatgctgcagcagtgacggtggttaattactgtccaggtgacttggaatgccagtgatcccttctcattggcgagagactctagaactagctcgtgaaaggcagactctagcaaatggtgttaattagtggaaaggccacttggtcacctctgtgcagcctggcacagtgcctgcttagcgtgccccggtggccgctggaatgggctgccgttcggtgatgctgcagaataaattgttgggtcgggccccaggactggccaagcttgaaaggaagagcattttcgatggtgggctttcactgggaaaaccgtagcattttgcagacccgtcctgaaatgaaccctggtttgggggaaaaatatttagagcttgtcgatctgagacctcaatatttcagggaaacacagtgacaccccctcgtaaagaagagttgtgtctggcatttccacctaagggaagagcagcttcgtgttgccctgttgcacagctggctgaggtatggtccccttgtgtacctgttttgtggaagccagattcataagtcttgctgctggggttgtgtcttcacagccatagggccttctcccctcccttcaaacttgctcctctccacactcccgacctggcagccggaaccccaaatgcagctgcagccctgcagccttgcacaagcctgtgtggcctttgcagcaggtaaggactgtgatagtgcttaagagaaacctccaaattggataaaaacccagaggtgtttttccccaaagaaccagatgggcaggcttgggagtgaggtgaggagggtggcgggaggagttggtttgactaagaacacttgctcaggactatttgtgtttcatccaaaagatgtctctcaggggaagttaccagtcccttaaatatcacaacggcagcagaactgcagggcccagggaaccttgggaaggagatgtttctttcccagaaaaataagcgacagagttaggaaaggtcaccatactgaagccctcccaagtgcagccttgcgggcctcgcagagagcgccaaaccatccggccctgcgcgccacgcggaccggcatagccatctctctggagtggcagctgtgccaaggtggcaaggttaggcccgcaggccctcagcacgggggcgcagccggggcaagtcttcaggaagcagcgaggtgcttgaagggggtgctggaggcaggccaaacccagtcaggatgggtggcctggggccacgacgggcgggaacctcgaggtgcgttagtagctgagatgcagagagccatcctgcccagacctagacaactcggaagtgggtttttcagcctcctgcaccggtgtcgcgtctgagtgcgactgatgagccagggggcgtcggtggaagcttggggtcggcagtctggttggaaagtagggctgggatttgcctccaaggacagtttttctacttggattggatattcgtggaggggattaagggggcgtcctgccccgcctcatgccctgcggcctcccaagggtgctgggcctggtttgcaaggacagccgcgggctggagatggcgcgagggtcggggagcgtggcgcgccctctgatctagggccgtggttttccgaggtcctcacggcgagcgctgcggccgggcagcctgggtccccgcccggccgcctccggctacctcgccggcctcgctgaaacccgagcgcgagggggcggtgcgcaggcggctggggcgcggggccgcgtcgacattggcggagaaccgagtgatggatggcgagggaggggcgcgcggggggcggcgcgggaaggggagcgcgccgggcgcccgcggccgaggtggacggagcctcccggctcgctgctcccgccggcggagcgaggctgccctttcttcgcagcgtgatttattttcttctttttttctgaactcttcttccagggagaggctagtggtaacaggccgagctggatggatgggtatggggagaggggcaggacgttcagccctgggattctggccgaccctcgccttccttctctgcagcttccccgcaggtaaggcactgccggccgggcgcgcggggccgggtccctgggccgcccctcaatgctgggccagatgtgcgcgagtgagtccgggctcaagttctccggacctcctccggaccccgcctcctatttccacgggtcttttgtttctcccgcaccccgtcgtgggtgcgatgcctgcccttggggacccggagaggggcaccctgcccgagttgccgtgagatggagccgtgtggggagggcgcaggggccggggtgcctcactcccttccctttttccgagaaagggggtggctgggaacgtgcctcctaggggctcgggaagagggggagaaggggaggcacgccctcggtgctggggacactttcttcagctcctcgcccagcagtttgcaaacctgccgggtgcccaggggtggagccagggtcgcccctgaggtcccagccgagttcccgacagccccctccccggagacctcgtctcgtttccacccatttggccacgcggggacacccacggactcggctcaaatgagctggtgttcctgtttgataactttctgcgtcgccccctgtttgtttttattgtgtcagaaaaggagagaatttcagaattaaagctgaaaaagcccatctgtttccaatgaatcccccatagtttttcacaatgtttttggcagatcgctgctttcaaattcctccgagcccggacctcttgtttttgttgggggaagggagaccaactccacagagaagcatttgttccttcccaaacgctccagtttctttactttttttcctttcggggggaggggggaggcatgcaacttaaatccccggcctgttttctttatgatg

SEQ ID NO: 6751 - DNA, 6000 bp, Homo sapiens
aatgttaagggtaattttagaaatggaaatatgcacttgtattttatgtacttttagaacctcatatgttggcatggctgtctcctcttttggcttctcaagaatacaaatatctgatgagagcttctggtgcaaggcacagtgtatgtgaaatgctaaactgcaatagtattaagtcccaatagtaagccagaggggattcctgatttcaactccagtgccagtcagtatagcttcatttttatatatagtcaaggctctggtatagtattttacctaaaaagcctctattacttacgaccactgctaaaaaggatgccaaaaaatataaagggcagcccctaccttcaagtcactaaaatttaattgggaaaacaaatataaactcataaaaaatgaatcagcaaaaataataattatcaacacaagtataaacagcaaaggcaaaaataaaagaatctgagaagaccaattctgaactcataagaaagatgattactatgggctgagcaatgtgaaaaaaagaaaagaaactttgaataggaaaatagcatgccatctgccagtgtctcagtgaggacagcctactttttgctgtccttgtgaataaaccctggcctgatacctacatggaactcagaatccacttgtaccttcttaacttggatcatatcctatactggcaattacttggcaattgttctcttgttcctccctctttggcccatggatcctattgataattaattacctcgaacaggtcattaaatggttgtggctaattcctaaagctgaggacaataatacagatagtcacttgtgataaccagctattgtgactagcttccttcccacagggctacctagaaaacacaactgagcaaatataagtatctcctttcttgctgagcccgaatgtggccatagaattcttcttgattagtaccaactgaatggagttggagcttaagacaaaactgtgatctgtatttagcttctcacatctggctggatcccctttcctaactgaactatccctctggccttgaccagtgtctatctaagcttatgatataccactggccacccttttttgtgtttagctggaacacagctttcaatcacggatgtgctgggagacaggatgacaaaaatggttttaaggaaagggggagtagatgatgaaggactaaaaagggccaagcacctggcatacttacaaaagcatggccccatcatagacctagtgatcacaatttctgagctggggtctaggaatctgcattttaagtacttgcagtgtattttaaaaaaattattatagaacattttaaattataaaatagtaaagagaatgtattcatcattaatctataaccaatcttgtttcatctatatccttacccattcttcctactcctcaccccagtggattattctgaagcataacgtttcatctgtaaatattttagtacatatctctgaaaggtaaggacttgaagaaaatgttgccataaaccaatacttaaaaaaaattccttgttttcatcaaatctccagttaatgttcaaatctctccagttgtcccaaatttaaaaatatttaagtcacgatccaaataagatctcacacattgtctttggttggtacgtctctttactcttaaggtccagacacccggatagataagtcgaggcctcctgagtatagagcagccagtgattgacagtcagactagaagatcccttggctctgagcagtagcaccatttctgactgcttcagagtagaagactctgagctctgctaaaccaaagcaaatttttaaaaagttggtgagatctttaacaactgggtgagagaactacaaatgcgttgttgaaaaaagggcacaaaagtgttctagaaatggcataggaccaccaaaggctgtggatggtttgctgactatgtcttggtcgtggagttgagagcaatctttaaagcattaatttgggctattgatcacatcttgctccctttatgtaagcagtgtgtggtgtatgtggaatgtggaaatagccagcacagtgcctggctcatgacaaccaagattcttccaaagactatactgacaatttccttgatacactagaacctcaaacagatgcaaatcttcaaaagataaaggcctttgcaaatgaccgactttccttctatttacttaatcataataactgtgatagtttcatttattaatggcttactaaggaccaggccatgtgtctagcaactgatagttatttgttgaatgcatgaacaagaatattgaatgctttacatttaatcctcagagcatctgccactattttgccatgaagtttattactatctctgacaaaacagtagtaagaactaggacttattcttactgtgaattcttaatctgttctaagtaactctgtatattattatctcgttcatcagcacaacagctgtgtaagttaagtactattatccccattttatgcaggcccagagtttcagtaacttggataagaacacagattataactgatggtacttgactgaaacttgagcagcctaactggttaacagtagtcctggaaggggaagaggccagtatcaacactcccatgtataagttcttggcaagaataagttcaaaaaggcaggtttagaggtcatgtctagcacagaccatcatcaacattgcccctctctttctcaagagtaaggacaatgctgctgctgaggcaggaatcaagttacataaagagacctcagaaatcaatgggatggttttttgggtacattgactggtttagcgcctctgttcattcgtcaaacatttattaagcacctgctacgtgcaaaacactgttaacagtgcactactgtgcacgctcattctcagaacaacaatcctgcgattcctggagagggatggtagaagaggagtgctgccttgttaacgaggttctcccaacttctttttttcctcgggaattgttctctttaatgtggcaccagcggcaaccttcattcttaggtcgcacaaatctgagaaggaagagaaaaacattgcacgcagggcgagacttatatctgggaagatgcgtcaggaacttgggagcacttgggattcagtcccctaaggtggttcatgtacaggctggttttctaagtggagaacagataatagaatttgcagagccaggagctctgactcctgtggctgggctgaccttaggctccagcccgcaaccccagtaggtttctgtgcaaaaatcttttgagatgaatgcatactttgtcttctaacaatgcattcgtgacagctgtctatccaatcggtccgcctccgttcagagcagttcgtgccacagaagcatctcctgcgctatagttatgcaacctcactcgcagcgggagttatttcctccgttctggctgcgccagattcatgtaacacgcctaccctgggcttcaatggaagtcgttctccattaacaatcactccagctttccgagatgaatgccctgatagcataccccttgcgcagtaagaatccaggcagcgaggcgaggtgttaaaacacacatacattctcatattctctctctctctctctcacacacacacacacacacacacacacacacatacacttcgtgcatgcagctaggggactgcagcagtgcaaccagggggacagcaggaggagctctctttgcagtccctgcttctaacccccactaactaaagatgaactcatgccagttccattctttgctctgcaaagaaaacacacacacacacacacacacacacacacacacacacacacacacggcagaagagagtagcctccagatttcccctctgagcacactgtctttctagcctcttcgttcaagcaacccggatattccaagcagagtaacggggagtaacgcgccacaacaatgcaacctccctagcagctcccctcgcagctcccacccccgccccctttcgcggcgtgccaagagtttggagcgcgcgcacgcacaccgagcacggtgcagggaggatatccctccgcctccctccccctttctccgctaagtggctcgacaacgatttgggaaatgaagggaggagggaactactttcctgaaacttgctatgctgcacatgacttcgagttgcagtgattcgcccggaggccgcggcttttagtcctacccacacaccctcacagcctgggcaccccgctcggcagccccaccccgcgcccgctctggcctccggggaaagcgggcggccgggagaagtcgcgagggactacttcgcctccttctctcgcgggcgcccccggttcgggcagcggctgcggcggcggaaggagcgggcggcgtgagcgcttccgccgcccccctcgcggctcccctctctcgggcgtgaggagctggcccgctgagctgctggtgggcactggctggcggggaacctgcagccgctcttgtcctctcccgccgcttctcgggatcctgccccccggacccgggcccgcccgctcttctccggccgggtgggaacgatcggtttgcctgcccctcgcctcacacgctccccgccgccccctccacccccctgaggaggagtcccggctggagcgtgtctggaggaatccgccgccgcggggcccctagccctgctctgccggcgcctgaggaccgacccagacgccgccgggggttgaggggcagccggcggcgaggcgggagatggtggggtgggctccggcaggaccgcgccgccgctgcccggagcctgggctcggcacccccccgccggcccccaccgagcggagctctgcttcctcctcgccgcatccctgagggaagcgccgcctctgctcccgggttctccgcccgccgactccttcctggccggaccccgctgcgctccaccccagtggctggaggagcagctctccagtcagcctttgcagcccctctctttttccctttccaccgggcctcctcggatcccttggctgggcactgaggcgggggaagaggctggggtcgccacggcggaggttgctgccgccacccccctgcgggggtggccggggttcccggctgggggggtaccgttctgggtgaggcatccaccatggtgaggcccctgtgccgctgcccccgcgcccccccggccgccgctgcctcctgcccctcggtgctgctgttgctcccccgcctgctgttgctcctccatctccagatcggatcacggtgagggaaagatgagcgaggagacggcgacttctgacaacgagtaagcgcctcattgatctcgattgctaatccccctccccctatccgccctcggctctcccccagacccatccgaaacttgggtgccggaaagcttgcgaccctggagagttcggtgcatcttctggagatagctgatttctttagccatttttagtggcagcacccctccccatcctcccacatttagctgctttcttttggggtaggggattaagtgttgggagaggatggcaattgtacgtctatgagagggaataatgtggatggatggaagtggagtagaaactacccctttgcctgtgagacccctgtcccgtcctttttcactcacataccagtcaccataccttcagtatccatcctacttcctttatagctgtttcacttggaaactaatgtgtgggagcacctcctgcagcaaactgctcttgaatcttaattcgatgagtcagtgactcttaaataccgattaagccttcaccctctcccccctcccccttttaaacttatgacctgtaagattcttgtaaaaaatagggttagggaaacatttttagaatttaataggattaaggacacctggagtgtgggcgatgttgagctagagtttacctttgtgaatattggacgtgtcttcaggaacggagaagaattttgaatgctaattttt

SEQ ID NO: 6752 - DNA, 6000 bp, Homo sapiens
ggaagtcaaggctgtcaggccgggcctggtagctcacacctgtaattccagcactttgggaggccgaggcgggtggatcacctgaggtcaggagctcaagaccagcctggccaacatggtgaaacccatctctactaaaaatacaaaaatcatttgggcatggtggcgcatgcctgtaatcccagctactcaggaggctgaggcaagagaatcgcttgaacctgggaagtggaagttgcagtgagccgcatcaagctactgcactccaggctgggtgacagagcgagactctgtctcaaaacaaaacaaaacaaaaaaaggctgcagtgagccatgattgagccagtgcactacagcctgggctacagagtgagaccccgtctaaaaagaaagaaagaaaaaaaaaacactaaggaaatttgaatagagtatgaactttagttaataataatatgtcaatattggttcattaattttaacaatggcaccatactaatgtaagatattcatactaaaggagactgcacatgaggtatataggaactctctgatctatcttctcaatttttctgtaaatttttattttatttatttatttttttgagacagagtctcactctgtcgcccaggctggagtgcagtagcacgatcttggctcactgcaagctccgcctcccgggttcacgccattctcctgcctcagcctcccgagtagctgggactacaggcgcccaccaccacgcccaggtaattttttttgtatttttagtagagacagggtttcaccatgttagacagcatggtctcgatctcctgaccttgtgatccgcccgcttcggcctcccaaagtgctgggattacaggcatgagccactgcgcccggcctgtaaattttaaattatttcaaacagaaaatctttttttttttttttttaatagagacaagttctcactatgttgcccaggctggtcttgaactcctggactcaagtgatcctcctgcctcagcctcccaaactgctgggattataggtgtgagccactgcacccaaccagaaaatttatttttaattaagtcaattaaatcattccttttaatcttggtcttaactaagtcaacaattactactggtagttaacttgtatagagcattttgtattgaggcacagctttgggtgatttgcataatatgctattatactcacaatactcaccttacaaatatagaaactgagacatgagagagctcattcatgcaacttttaacaactgtttatgagtgagttagtgagtgtcctggaagagtgtgcccatggtctgggctcctccacggagtgccctgcagttgtctcatgtgccactgtccaggttgagctcaatcaagtgaccccacccctcttcaccgggatcctcctccttgaccattatgtcactgccaccatctgccaggtctccccaggagtcatcctgcactcttctgtcacttctcaaatctaacttgacaccaagtcctgggggcccttcttcggaaagttctccccagcctatgttctttctcctgtttgggtcctcactgcttctcctttgcctctgctcgggtctcatctgctctgaggggatctccacctaagccaccacccatttttccagaacccacatcatatactctctcaaccccaaccaaaaccttcccatggcgcattgaataactttgcaacctggccacagcccgcctcattccctccactccctagcactccaccgttgtaccccaaaatcacactgcttgcaggccattgctgttttcttttcctttcctttcctttttccttccttctttcctttctgtttttctttttttgaggcagagtctcactctgtcacccaggctgtagtgtagtggcacaaccttggttcactgcaacctctgcctcccaggttgaagcgattctcctgccttagcctcccgagtagctgggaccacaggcatgcaccaccacacctggctagtttttgtatttttaatagagatggggttttgccacgttggctaggctggtctcaaactactggactcaagtgatcctcccaccttagcctcccaaagtgctggaattacaggtgtgagccaccgtgctcagccctgctcttggttttcttgaggactgcataataccttctctttttgcccttagaggtcctacatgctcttcaagtcttaggtcaaattcaactgctttcttacacagatcctctctctcattggcttagcagtcacctgttacctgtctcatggtaactgctacaatgactctgaggactagaggctggtgcgtatgtctctagctgtgagttccctaaggcacctctgtatcttcatgctcagaaatcactgggttatttcctgcagtttctatcaaagcaaaatgtccacactgcatcattaggggcccccaagtggccagaataagaaaagccagctgggcgcagtggctcgcacctgtaatcccagctactgggaaggctgagacaggagaatggtttgagcccaggtgtttagatgagctatgatcacatcactgcactccagcctgggtgacagagcaagatcccatctctaaaaagagttctgagggatccagagaggcttcaggaaggaggaggacttgagagagactgtcagatgaaagtcacatttagagtttattaagcacatgctccatgttgggcattatactatagcagtgagctttcacgtggatccctcatttacttctcagcacagacctactaggtaggtatttgtctctgtagatgaggaaactgaagctaagagcatcaactgtgcagtgtcacagctagcaagtggctgggcagggataagagatacagcttgcccttggagatcatacatgcacttcaagtcttgggtcaaattcagctgctttcatacaggaatcctctcttttgatgccctagcagtcatcccttacctgtctcattgcaactgccacacttgattctgtggctctcaaagaatccaaagtccagcctaagaactgaagaatgagtaggtggaaatgcactgtggtaatcaacgcataagggagactgtactgagtctgccacaaacagggtccacccaggcctatcccatacatcccggagagccatggagcccaacaatggggtgctggggtccctgaggctgtagctggaagtactctgtgtccctaaggcagcactcctatgctgacctccaactgctaatgggctctgtgcagcagggacaaccctctgcacagtccagacctgagggcagatggcaggtgacctgggggtgaagtgttatgtatggagcagggcagctccctgtctgggatcacttttcttagaggaagcctcctgcctattgtcctgctcctgcacttccctcctgggacctggcaacctcaggtgggaaggctgcattgaggctgcaggcttggtcaagagaagcaggaccctggtgcgaagggaaatgagcctggacagcatacttgtcacctgccccaggactagtgcccctccaagccagagagcccagatagccctcagtggggctggtgagagtcacagttctccgcacgtggccaggaagttgagcaagagtaacccaaccacataaggtatggtgcaaacctggaaacttctgagagcaaagggatgctcttagttgttaggcgggggccgcccagcagagccaggacggtggcgaccctagtccagagccttccactttagcaaggtagaatccaagggccccagaagggaacagactccatctgggtcgcctaagcaggtgagagaggaaaacccaaccacagtcgcgccccagccctcgcaggtccctggctgaggactcccctctccacctcaggctgggcggcccccgccttcacgcttgctcccacttgtccctcgttcttgctaggcttggcaggtatttgttccctgctccttcacgctctcagtgccgtggccacgtcgctgggtacgccccaccaggcaagagacattttccgtcttgttctctgccacgtccccagagcctggaacagtgcttggcacagagtggacgctcattcgtggagtaagtgcctgatggataatccatcacttgcttttctagtatgaatggtctatttacgggtccagcgcccctgctggcttacgaccttttccagggcggggaggggctgtcctcatctctgtgaccccagcgcccagcccaaggcctggcacagagtaagtgctcaaccacattttggtgaatgagtgaatggaagcggcccagcaaccctgagccaaggagccactgtggggcaggtcagggcggttcctggcacagggcttcccactagcctggccaccagctctgcggtctcctggaagctggggggcctttgggtaagggagaagagtggccaggagttgtctgcgtgtgccctgtgacggtgggatagagacagcgattggattgaggaacgggaggttccccgaggctgtttagagaggcgggagcgggagctggtcagggaggctggacagaccacccgagggagcggagcttgggcacgaaagccaaaactgggcggcgcggggcgggtggggaaggccggctgagaaagccgggattgcctcctggtgtcaaagctcggaactgcagcaggatcctgggggcggggcttgtgttcagcagcactcgccacgcgcccagccctcagccctcgtctcgccttctgctggctggcccggcgacgttgtgcgccagcgtacgcggggctctgagaacccggaagttacgttttaggcccgcgtcacgggggcgggagtcagctgagctgccggggcgaggttgggatcacctggcaccggctgaagggagcctgtgatttttttgtagcgggggcggggagtaaggtgcaagactgcgccagattcaaggacgagggctgcccgattatctcgctgcataaggcaagagcaagaggatcctcaggattttaaagaggaggcgacggctgcaggttcccaggatctgtcagaggctggggagttacagcttccattctggggcgacggggaccccgggggggtagcccttttgtaatccccaggccccggacaaagagcccagaggccgggcaccatggcgtccatcctggatgagtacgagaactcgctgtcccgctcggccgtcttgcagcccggctgccctagcgtgggcatcccccactcgggtaaggaagaggagggtgccgctgcccctttcggctctcctagcatttgcgtgggagcagcgaggagggcagctccaagagctcggggtcatcccctgggccgtgccttccgggtctaggcccctgattctcctcaggctctcttggcccccagctggtggatagtcgaagtttgaaagagcaacgggagctgccgcgtgatctaggctctaccgctagggtccttttgagagggaattggggcccagataaggaattactcacctacagggcgcagttgggctgttgggagaacttagaatgggctcccggcttctgctgatgcttttcccaccaggccccttctggaggtgggagggaaggaatggacaaagaaagtggtgaaggcggagtattgcagaggaagaagggagggtcccagagggaattttgtcgctgaacggggaaaatggagatgaaatctttttggccttggctatagctgggtgcagcctggagtttggggacgtttttgtagaaagtagtgagtctccaggagaatgagggcatagggagccctggggaactgttccagtgagtggagttaacgaattggagctgctttcactctagtctttaccttcattcaatgctcaaaatatcccagcacttgccaactctacactgaggctcattaccgcatgggcagggaggggggcagagaatggggctatacta

SEQ ID NO: 6753 - DNA, 6000 bp, Homo sapiens
caagacttcagtcgatgctggagatgacctcacgtcctgtaccagacatgacttcgcctcttacagtgaaacctccacccggcagtgcttgccaatggattgcctcttctaaggcacacgatggacacagagcatctttgcttttcttcctgaactcctgtgtgcttggcccacaatcctggtattttctttgctctctgctcaaatgtacacccccatacttccatttttaaaggcaaatctggcaatggttatgaaaagtaaaagagatgattacttttcccaggaggcacctgcctcatatcagtcaaccctctgacctcccgaggagaagaccacctggctgccctctcctactaaccacttccagccttctaccacaactccctgccttgcatctccaacccacagccaccattcctcttggttacacacaataccactaatctttacatatactttactaaattatcagttcataatctccaacaacataaccgccctacactaatgtttaattcactggttaaatgatcacattccccttgcagtcaatatctccaccactcacactacacctggcttctgttttttaaaatgacgtaaggcaccagcaccatgagaggaagagtcatacattcgtttaatctacgtgctgcctcaagcacccatttttagggctgacatacgctgttggaaacccagccataccccgccacctttggcctagaggaaacgtttcctcctcgtgtggctgtgtgtgacatggccagtgtgttcctcatctcattaatccagaacacaacacctcccacagctgctgctcacaataaaacctaatggccaacgccagagtcatgctaataagttgcccccttcacacatttttttaaaactagccaatccacaaccccctcaggaaagcctaagggataatgcccatagaacttaataaaggcacagccagcaggttctctctatctctccctgtctgtctgtctgtctgtctgtctctctctcattccctcctctcccagctgtttgagctccctgcaatctctagacttcctcttcagcctcccgttggcaccgctaacctctcctggatctgtaagtaacatatttcttctatttcatgcattttacattcacctcctcattgcgtctcacctgaaccacacacccaaacctaacttttcccaatcagggctctcctagagtggctgtcttggcttatggccactcttgacagacctcaagaccaaattagaaagaacccataaccataagaatcacaacaccctgtcctccctcatctctccagtgcacacattccaaccagactcaacactccctattgaatttgcccaacttttgccacctctgtgcccctatgcaagtgactcccctgcctaggatgctctccctccttccctatcaagcacgcactacaatcagatccatcagatgggccatcagtgatcatctcaagtgacacctcgtccataaagactttcctagtccttccaactagaaataatcccatccgtctcctaaatcccatcacattagatttcgtttgtctcttctttgcttctaccttgcagcgtcaactccagagtgtctctgggaccctctgagctgcagtctgactggaagaaaaggccagagactggccttaggtagcatttgcacaagtgctgtgttttattagaattctacgcggagggttgctgatgaggacagataatggagctgctatgcaatgccccctcaaccctagccaccgaggcctatttactccttctttctcccactagactgcaagcgtctaaggacaggggctgtgtgcctcaggtcagcaccctcggcagcgtcgagcccagtgcgtgacatggaggaagtgcttgccacaaatgcctctgggaggcatccctgctggaaggaaacacagcttcttctggtctgtgcagaacaagtaagtcctagcacctactcccggttcttggctcactaaagccaagggtgggagtcagtcagtccttcctcagtaggttccgaggacagttgctgacttgctctttctttaaggtgccttttacttttgaacctgaatttttctagaaaaatgtaataggcagggcacccaatccaaagggatggcccccagtggcaaccctgagtaaagtaaggccaattcactgtcacattgcttggtcaatttcactatgaatccacgctccgaggacgcactcttgcccagtaggcaccacccctcactggcaacagagagacagcaaattgctccgcaccccagtagcacaggctttccctgcgccgggtgtggtgcatcccaggagagctttctcacaccaggtggcatccaggtggatctggcgaccgcccagcaagcatgtatcccctctcacaaaagggaagaaaaggaagagtggccaagaaggggtggaaaccccagttttcctctataaatgtgacgccggattttaacctctccctcggcaaatctacatatcagacaaaaaagaaactaatatagatattagtcttgtactgacttagactttcacttaccccgccccttgtttcttaatggccttttttcttttttttaaactcttgtacctaggttagcctgtttcctgttcatattaaggaatccaggccctttgcagtaaagaaagccaaggataccctggagctttatattaggaatgtttctagattgttggttgaaagcatgtccatttcttaatttgcaccctaaacacacttcacggcttcatttaaatctgagcactctgtgtattccaactgcctatgcagggttctaacttaaccaagtacttaacgagtagcattaatattcgttgtcttctccacgggtgcctgcactcatcaaggtaaatagttaccggctacctccacggcccttgattgagctgagaattgtctgtccttatctagacagtggattgtttgtcccccaccatgggaaaaccctgctggttactttccaaaggcctcattttaaaaagacacgtttccacttacagaccttttaaaaatgccaggcaatttggaagaacagtaagaaatctactatctgcgtgacagtcattcagagattcttgtagtgtgccaggcaccatattaagtgctaggaatgcaatgatgactccaaggagtcctggttcctgccctcatgatgcttatggtacggtgggagaggccaacatgtagggaaaggtcactctaatgagcgcctaattaccgagtgagctcagtgttaggaaggaaaggcacggatgtgaggactccctagagggtggggaagatgttggagctgagctatgaaagatgaagaaattggttattcactgaatgtcagggcacagaatgtcagggcaggaagaccacacacacacacacacacacacacacacacacacacacacacaccctactattcatagatgaggaaactgaggcccagcagagctagatgacttgccgaaggtcagagctaattctagaaacccatccccaatcccttcctgctaaaccacttaattttatttatatcccagctatagattatacaaatacacttgacaaataaaacggagaatattgagttaaaaccacatctctgaagaccacacgcataaataacgatcgtgttttaatgcggacgataccttttcattttgcaaatccagagttctcatcatatcaaaattcaagacagtttgttctgtaagaaggggaaggtcataaccctgtctagaatgtactggcaaatctctctaaccgtgcagtgctaatttgggcctgagctgtgtaaccagaccgacttcacgctccagctggggtttcagatccacacatggcgattgggtggctctttgctgtttcacagcaagggtccttccctgggctcccggagcctctggggatttactgctcccgacgtggccgtgttcaagccactgtgtgcatgcgcttaatgttgaaaacattcttttgaaaagcccaggagattccactcgcaatctgtgcgtgtgcatgtaaaagcgcagagactggaaagaaccgcggcagagcacaccctgaccgaaggttaccgcgggggagccgcggccgtgggagagccgcggccgtgggagggagtgcgatacggtcttttcactctagacactcctgagttatgtacaattctacgcaagaatgtatgcgtgtgttagcatgtaatacatatgtattagttttttcaggaagattcttaaacaacaacaaaatctctatagaacaaaggtgcgtctccgcagagcgcaacagcatttgtcttggatgtaaccgccttctccagaaatctcagaggaactcccctcgaccaccgcctaactgaaggacaccgtgcgctccaccgcaaccctgcgggcgattcggaaagttggaggcgccccggggagtcgccgcacttgccgcccgcgccccctaacctgagcattcaaggagtcttgacttggccgctggcgcactccgcacccacccagccggtgctgatgcgggagggtggggccgcggcggggcggggcaacgcgagcccgcaccccgctcctccccgcccctccctgccggccccgcccgcgcgcgccccccgcccgcggcccgggcgcccggcccgccccctcccctcggcgcgcaaacgaacctcgcgacgccgcgctcggcggcgggcgggggccgggcgagggagggggctggtcccggccgccccactctgcagttgtctcccgagcgctggctgcgccgcccgagccgctgggccggggaagcactggccgttcgctcccgggccggctccgccaggcgctcgcaggcatgcagcccgggagcaggaggcgctccccgggccgctgctgagccggccggggcggcggggaccagcgccagcggagcccctcccaccttgccccggggcagacgagcggcgccccgacaccccctcttctcccgcagccccgccagcgccaccccccgcgggccgcaggggctcatgcagccgccaaggtaagcgcgggtcgggagccgggcagacccggctctgacatctccgaggcgccgccgacacatgccggggccacggcgctgctttggtcttccttagccccgcgtctcatcttgctcccatcttgcccacatttggagctttgctgcgcctctatcgctttagctgttggcagcaggaaagtttttgtggtttggtgtttgttcttttttcctaaaatactctcccccgggcagccgccagcgcgcgtggttgggcagacccggcacacgtcccttacaccgtgtgcgggctgggagctccttccctcagcccggctcgcggagccccggacggagccggccacccgactgtcccgccgtgaacccccattggcccgcgccgcccgggcccccgcctcccgctcgacgcccggctgcggagctgcctggccatctcctgccctcggggatgtcggcgcagtgcaccgcgtgggctcgcgtcccggcggccctttgcctcggcgcgccggcgtacgggaaggtgcggaccttggattgagggccgaggatgcccattgccaagccgccccggctttcctaagtggacgggagggcacggcgacgattcagcgccggctcgcgccgcagctcaacccagggtacaagcccgggcatgggggacaggtgtattcaatgggagggcgggtgtgggggacgctcgggtgcaattcgggattgcgtcttattaatgtaattgtattagacttgctcggaggtagaatcagttctcccaaattgagatttctaatgggagcctgtgagctgctattatgtggtgtggttttgggaggtgttgggttgtatttattttataaattgggtgtctcgcgggcggagtaggggaagtagcgccatctagcggaagtg

SEQ ID NO: 6754 - DNA, 6000 bp, Homo sapiens
cagacattataaattttaatgcagttgaatttatcatttctcattatttttacagactcttccctatcctcatcttaaagattttcttcctaatctaaaagttttaaagttttgtctttaatccactttaatttgatttctcttctatggtagggaccaaattttattttttccacataggttactaattgtccccgcactgtttattggagcctttccccgcactgatatgcagtaccatatctgacacatcaattctctatatatgtttgagtctgtttctgatgtctctaatctaaattagtgtcacattgtcatctttactgtagaaatgctgtagctctataataacttaatatttgtagagaaagtgcctaactttgttttcccgcttggatcttttttttttttttttttttttttcaatttggctgtttgcccttttaaaatatttagaatcagcttgtcaaatctgatgaagaatccttttgtggtttatatttgaattgcgctgaatgtgtgtgttagtttaggggataatttatcatcttattcgtgaatatgatatatacctctgtttagctcttcttctgtatctttacataaaactttgtattttctttgtgaaaagataatacatattttataggattatttctttgtaccatttttgttgttctattataaatggaatccttttaaaattttaattgtgaccagctttgaagaagcatctcttatgactttttcagctgataaattttcctgaagattatagcaaaagtaccaaattttgagggtattaaaaagcagaaattaattggggtgtatcttatcacatctgtttttagtaagtgtgaaaaggtcaatattgtccatttatttgtcttttcacttagagattgtgtgagagaactaatattcatagaccctgttgactcaggtagttttcaaagtgtgtatgtgtttaagtggtgtgtgtgacttttttctgagacagtggtgagaaaattgacatttttactctttagaatagttcttagaaatgtatatttaatatactagttgaggtcattgtgttctatcaggaaaaaaaattgttctctctgcttccttttgtgtaatgttcttctgtttttctttttttcacttgaccaaatatctagcttattctgtgtttacttcaagtcgcatttcctttcatgccttcccagaccatttaatccatagttatttcctcttgttaatttctaaattcttacagattctacttataaacatagaatggcctccatattgtatcattaaatgcagagaccaagggcacagtacaaagggtcctattttaaagatctgtgtgtgtgtgtgtgtgtgtgtctgtgtgtgtaaaaatttttggaggaatgcactaaaaaattttttttatgatagttaacttttaaaactgggtctgaaaggtctaagatggaaggaagagttttacttcatgtgcttttatactatttgaaaattttgctatctgcatgtattactatttattttcagggttatagtgtttattaagtatgtaacagtaggagttggctcaaaattatctggaaaaataagaagtaaacaagattgccaaaatgttgatgataagtgaagctagataatagacccatggtgattcataacattattctctccttttatgtatattagaatttttcaccataaaattttaaaaattaaacattgatatattctagctataatttaggtctgaaatgggctttgcaattcgaaacacttgtaaatgtatcaggacactaaagattcctatttttttattgctatataattcacctaccacaaaatcatcctttaaaaaagtatgtaatttggtggtttttattatattcacaagattgtgcagccatcagcagtatcaaattccatatcacttcccaaaaaacccacactgattatcagtcattgcccctccttccctattcccagcccctggcaaccattattgtgacatgtgtaactactttatttctctttgtggttgaataatattccactctatggatttactacattttgtttatccgttcattagttgatgaatatttgggttgtttgtacttttttgactatgtattcattacttgttaaagtttaaatatgtaagaaaagacctatggtttttgtttgtgttttaggtggggggaaatgattctatttttattctcaaaaccgtttttgaaaaactttactgctaataaattatgaggttttggaacatacactgtacagtttcattaaaagtaaaattcttgtgtcatttaagtagaaattgtttgtattttagataacatttggtcagccaggcttggacattcagagcagaagtatggaatacgtacagcggcaaatatccaaggaatgtggaagcctaaagtcccaaaatagggtaagtaatgttagtttatcttgtgatatggaatttaactaattaatagataggtaaagttttccagtctttctaattctccatatagttgaattgtactagaaaatttttcattgtataaatttgctgcctatgtgcttaaacgctgttagttaaaaactctgcaaacttctcatttgagtctaaaagattgccagagctgcatttattagataggaccaaaaggaattatatattgttaattaaataaactgtatctgtcaccccacctttagctcagacctagaattttcttagccctaattccatgtatctaggaaatagaagtttgccccaaactgagtcagatgcttacttgtagtagactagtcactgtgtccagggactggagctaaagatacaaatttgtctacttagaagcctgcatttatggatgatgtaaggggtcaaaagacttaattttgttctttggcctcaaagaaccaaccttcccagaagggttgtggaagtaggggtattttacgtcattgttcagagactttttgtgtacccaagctacacacatgtgtgtctttgtattaatttgctaggactcccacaacaaaatattacagactgggtagcttcaacaacagaaatttattttctcacaattcttagaagttcaagatcaaggttgttggtaggtttggtttcttctgaggcctttcttcttggcttgcaggtagctgccctcacatggtctttcctcactttgccctcacatgctctttcctctgcccgtacatccctggtgtctttctctgtgtgtccaaatttcctcataaagaaaacagtcagattggattaaagtctctcttaagggccacattttaacttagtcacctcttaaaaggctctatatccaaatacagtcgcattactggaggttagggcttcagcatatgaatttgaagaggacataagtcagaccataacattttgtcctttgttcccaaaatcatgcccttctcacttgcaaaatacattcatccttatcctaacagccccaaagacataacccattccagcatcaactcttaagtcccaaatctcatctaaataacgtctttcaatcaagtgtgggtaagtggctcatgcaatagtagaggtacagatccaaaacagggtaggctgtctggagacccaagaaatagttgtagtctgagtccaaaggcaccctgctggcagaatttcttcttgctcagggggagctcagtcttagttctagtaaagccttcaactgattttatgaggtccgcctataccacagaaggtactgtgctttcctcatagtccaccaactgaaatgttgatctcatcccaaaaacatatcatagaaatgtccagaataatatttcaacaaatatctggacactggccccaccaaggtgacacgtaaaattaaccatcatagccctcattgcagtttttatctgtttcttttttaggtccctttgaaatcaatcagacatgtcagctttcaagatgaggatgagattgtcagaataaaccctcgagatatcttaatacgtcgctatgcagactacagacatcctgacatgtggaaaaatgacttggaaagagatgatgctgattccagtattcagttttctaaaccagacagtaaaaaatcagactatctgtactcttgtggggatgagactaagttaagttcacccaaagactctgtggtatttaagacgcagccttcctcattaaaaattaagaagtcaaaacgaagaaaagaggatggtgaacgttctcgctgcgtatactgccaggaaaggtttaatcatgaagaaaatgttaggggaaaatgtcaggatgctccagaccctattaaaagatgcatatatcaagttagttgcatgctctgtgcagagagcatgttgtatcattgtatgtcagactcagagggagatttttctgatccctgttcgtgtgacactagcgacgacaagttctgcttgcgatggttagccctggtagctttgtctttcattgtaccatgtatgtgctgctacgtccctttgagaatgtgccatcgctgtggtgaggcatgtggttgctgtggtgggaaacataaagctgctggatgaaatggtccagtgccaaaatgagcttaaaatctttgtttccaggaattagctaacttggatttgtggaagcttttggcaagcaatatggaatcttgcctggtatcattgagcccacacatggaggaagcagaactcatcagttcttggcgtttcacgccatgcctaacttttcccttgagtgcatggcatgttttgttacaggttgtagagtatttgcagaaggaaaccatttctggttatttggctataaaaagtcagcataaaatatgatccaactaaaagggattaatttttggcatttttgtatatttatgcattaggtgatgggacttttaaaggtttgaatttattaggacacgaactaaaaataaaagtgcactaggggacagttgatttcaatctaagaaaagttaacacttgggaattacaagaagtaaaacaagtgcaactaaatcatttattagttgttttttgaaagcagttttatgtataaataacaaatgtttatatttaactaaatgtaaggtacgaattattacatattaaacttttcttccccttcctagttctgaagtagatatatatatatatatatctactgtcacattccatatattttgaatatttaactcatctagttaataatgtttttattccatgcgaatgatttgatattttcatccttatttctctttggctacaatttatattgagttatatctgtacattctggtaatctaaaatccttaaaaatactctaatagccttgagtgaccaactttttttttaaagcacagatgtaattgtctaatgttctgatgggaacgtaacacttatttttatataaaaagagactgagtaaacaaacattatagaaaaaaagtgaagttttttagttgttttttgtggtattcaaccagcaagttgttttctttcagagtttcctccttcaaaaagttatattgcatttacaaatgttttacaaggcagaaagtttgactggatagttagtgtaaaagcttcatgttgagatcttcacgtatcattctgctaaaccagaatatgttcagctgtgttactaatttttcagcttaatcctcagtgcttattatttacataacaataactttttatcagttacattttatttttatttaaactggccaaaagcaaaattattttatgttaaaatgtgtgctaaactatcccaggaaagtatttaatccaacattgtaaatgaagtatcttgtacatataaatttatttcttttgcagagcattatattactggatgtttaatttacaaaatagttgggtaaatgttccaacaaactttaaagtaccttgaagtcaaattgtctgtttttgttttgttgttgttgttgttgttttcttaag

SEQ ID NO: 6755 - DNA, 6000 bp, Homo sapiens
ctgaagttcttcgcaagaggccgggctgctttgtaccttaagggttttagtgtggaaagatgaagccagaaaggcgatatgatcaaagtctataaaaccttgaaggttatggagagagagaacaagtactgattcatcaaatctgagatgaccagaccccaggacggcccttaaagtctgaaagaggaatttgaaggataaattaaaaataaggatccgttctcacactctgagttgtaaattgaagcaactcagttcctcaagacatggtctggacaaacatttttcaggacatgggggaatgggtggttactcaagaaatgttgtcaaattcttggtcagtaagtgaatggtggattaagagccattggtaacatatccctacgcttgcgaggttggcaaaaatacctggaaccagtgttgggtcgtttcctccatattagacagggatctgttagagaaatctagatcaagctagtttcagcaaaataaggaatttttctcagcttccatagctggaagaggtactagggtagctcacaggagctcaggaagagctgcaggagagtcatatgctgaagagtggcttggggaggcttagcctaaataaagtcttcatcactccccaaaaagctcacctgataaaatacaacttaagtaaaaacaagatgtcagctgggcacagcggctcatacctataatcccggcactttgtgcggcagagacaggcagatcacttgagcccaggagtttgagaccagcctggctaacatggtgaaaccctgtctctactgaaagtacaaaaattagccgggtgtggtggcgtgtgcctgtaatcccagcagctcaggaggctgagacacaagaattgcttgaacccaggaggcggaggttgcagtgagccgaggtcgcaccattgcgctccagcctcctgggcgacagggcagctgtcacacacacacactatgtcacgtcctcaaatgctgcctcaactactaacactcataaacactcaccctcgcacaagattgctgccctaaaccgatcctatgttggagtcggaccagaactgaagcttctgtagcaacaatctcaagaaagattctgattggtccagcttgagtcacttgcaatcaccattttattgaaagtaattgttaggttatctgtcttggcttgactttaatcccaaggggcagaaactgacagacctgggtcttctgtgcacctgccagcagcaaggagggcatgggcccgagattgatagaacttacaaacccagctattcccctagacatgaatcgcctaagggagctccttaaaaatgctgatgcccaggctctaccccacagagattcagatatagctgctttggagaagggcctgggcaactctaatctttttacatctcccacagtggtctcccaaaagaataaatccctccccttcttgaggctttgggttgggctcccaggtgcttcacaggctcccccaagctctttgctctgtttctccagcttcacctcttccttctacagccgcacttcagcctttgcagatcctcaggtaaagcacactttgttcctggcgtgctgggtgttccttctgcctggagttttctccctgccatcccctcccttgcccgtcaacttcccctggcatactcctacactgggaaagcttctttcccctccctgcaccccaagctgggctggagccccctggcgcctgtgttctgtgtctcccctgtcagagtctgtgttatgctttattgaaagtgattgttaagtaatctgtctcgccttgactttaagcccggtgcggacttgctcaccaccattggaatgaatggcacacacagtacgccaagcatggggttcggccagcttggcttggcattttttagccatttattgggtgcgtacttaagcgttcccagcctcagtttcttcatctgcaaaatgaggatggtaatagaatcttcattagctgaaagtttctagaaatgtaaagtactcagctggcatctgacacaatgtaaaaatacgtcaaaatattagccattattttgaaagacaccaccttttttggtaaaggtcattcactcctcacctctcctttagcactcatttttctctattatctgtttctaccagcaattcagaaatagggactgtcttatttctttatcccccaaggtctagcctgcagcaggtcctgaatatatatttgttgactgatgactcaggccctagatttgagaacactctgttcatacctagaagcaggcaaagttggaacccctgactatcactgcccctgagaagacttcagccgtatgcagaacccttcctttcagaagccccttgacccctttccccccatcaaatagctacccccagagtggaaagggagagaaggtggagggggatgctcaggattgaggcctccacagccagtgctgaagaaaaggggcaagagtcatgcatgagagtgtctctatccccaggtctaagctgtagcctaggggacaccacatacttggttagactctatggggctgtttgtttgaagtcaactacacttttgagttaaatgagtttctatggcgaacggagtgctgagttctcaaatctaacgttttaggaattttttattcctgcagagagttggggagctgtttaaaagttggttggtttagccagtatagctagattcctcaaggtcaacacaacgccatactgctctagctggggctagatttctcatgatagtctaaactgtgtgatggccaagtccccactttgaagatgtccaaattcagcctcagacatttctcctcaagaaagggggggaaaaaaagccttttgtgcccctttcccaaattatttgctcatgtcgcaagactggggtctcctcctaaaaaggcagccagtacccgtctcccggcagggacactggaactcccatggcctggggcctcttccgagttctattcagttgtagtcttggagtgacaatattatcagcccgatccttacagatgaagaaactgaaatgtagaggttaaaagtcctgctgcgagaagaaccaactgaaaaaaaaaaaattctcaggctttacagcaagcaaacttcactatgatttttcacaattctgattctgtattctctgggggttatctcagttgcttctttaggatggggttcattatgttgtacatatatcccaatgtgtctgtatgaatctttgtcttttttggggcagtgtggacgacgggttctttttagatactgttcctaaaaaggaatcagtgcatacacctgtttgtcaaagcacctttgctttttgtgcaactgctttatattaacaatacttaaaatagctttggaaaaaaaaactactgtatgtaatggaattgcagaatatgctgcacatgtattttatttagttatcctttctttaagaatattggatgacatttcctgacgtgggagggagaaactccttttttttttcctgcttttaaattgtaacatagttgaagatttcttttttctgttctcattgaaaaaaaaaaaaaaagtcctgctgtgaaaagtccattcttgggcaagggcagccccagaagggcgtgatttctgggcttctgcgggctgcatggcctcctctggatcctgagccctggtctccaacctggacatgctgcagcagtgacggtggttaattactgtccaggtgacttggaatgccagtgatcccttctcattggcgagagactctagaactagctcgtgaaaggcagactctagcaaatggtgttaattagtggaaaggccacttggtcacctctgtgcagcctggcacagtgcctgcttagcgtgccccggtggccgctggaatgggctgccgttcggtgatgctgcagaataaattgttgggtcgggccccaggactggccaagcttgaaaggaagagcattttcgatggtgggctttcactgggaaaaccgtagcattttgcagacccgtcctgaaatgaaccctggtttgggggaaaaatatttagagcttgtcgatctgagacctcaatatttcagggaaacacagtgacaccccctcgtaaagaagagttgtgtctggcatttccacctaagggaagagcagcttcgtgttgccctgttgcacagctggctgaggtatggtccccttgtgtacctgttttgtggaagccagattcataagtcttgctgctggggttgtgtcttcacagccatagggccttctcccctcccttcaaacttgctcctctccacactcccgacctggcagccggaaccccaaatgcagctgcagccctgcagccttgcacaagcctgtgtggcctttgcagcaggtaaggactgtgatagtgcttaagagaaacctccaaattggataaaaacccagaggtgtttttccccaaagaaccagatgggcaggcttgggagtgaggtgaggagggtggcgggaggagttggtttgactaagaacacttgctcaggactatttgtgtttcatccaaaagatgtctctcaggggaagttaccagtcccttaaatatcacaacggcagcagaactgcagggcccagggaaccttgggaaggagatgtttctttcccagaaaaataagcgacagagttaggaaaggtcaccatactgaagccctcccaagtgcagccttgcgggcctcgcagagagcgccaaaccatccggccctgcgcgccacgcggaccggcatagccatctctctggagtggcagctgtgccaaggtggcaaggttaggcccgcaggccctcagcacgggggcgcagccggggcaagtcttcaggaagcagcgaggtgcttgaagggggtgctggaggcaggccaaacccagtcaggatgggtggcctggggccacgacgggcgggaacctcgaggtgcgttagtagctgagatgcagagagccatcctgcccagacctagacaactcggaagtgggtttttcagcctcctgcaccggtgtcgcgtctgagtgcgactgatgagccagggggcgtcggtggaagcttggggtcggcagtctggttggaaagtagggctgggatttgcctccaaggacagtttttctacttggattggatattcgtggaggggattaagggggcgtcctgccccgcctcatgccctgcggcctcccaagggtgctgggcctggtttgcaaggacagccgcgggctggagatggcgcgagggtcggggagcgtggcgcgccctctgatctagggccgtggttttccgaggtcctcacggcgagcgctgcggccgggcagcctgggtccccgcccggccgcctccggctacctcgccggcctcgctgaaacccgagcgcgagggggcggtgcgcaggcggctggggcgcggggccgcgtcgacattggcggagaaccgagtgatggatggcgagggaggggcgcgcggggggcggcgcgggaaggggagcgcgccgggcgcccgcggccgaggtggacggagcctcccggctcgctgctcccgccggcggagcgaggctgccctttcttcgcagcgtgatttattttcttctttttttctgaactcttcttccagggagaggctagtggtaacaggccgagctggatggatgggtatggggagaggggcaggacgttcagccctgggattctggccgaccctcgccttccttctctgcagcttccccgcaggtaaggcactgccggccgggcgcgcggggccgggtccctgggccgcccctcaatgctgggccagatgtgcgcgagtgagtccgggctcaagttctccggacctcctccggaccccgcctcctatttccacgggtcttttgtttctcccgcaccccgtcgtgggtgcgatgcctgcccttggggacccggagaggggcaccctgcccgagttgccgtgagatggagccgtgtgggg

SEQ ID NO: 6756 - DNA, 6000 bp, Homo sapiens
agtaactccacaacacatttaaccaacacttatcaaccctgtcaataccaccactaggtctcaatcctacagaaatgccagctcctctgcaccaagacacacacacaccagagtccactactacacaacttgtaatagcagaaaaaacaaaaaaaaggcaatgtagctgtcctttccataagtgaagggtaaataagttacaatgcagccatataaccacatcttggaataccatgcggctgtgaaaaagaatgaagatgcctcatttaagcaaacacatggaacaaaatgccagcagtgagatacttgctaggatcctatttaagtatgtttcaaaatgtctacgtggacacacacatatgcatatgtgcaaatccatctagaaggtctgtaaagaaaaacaccaacgcggggtaacagtggtttggtggtggtgcaggctggcacctcccatgctgcatacatttctgcattgtttgaggagtttcacaactagggccactggcagcctgggacagcgagggtacgagagggaggggtgggcgtgctgagccactggcctgtgtgtgtctctgaacaaagcacaggccaccaacaagcctggctttgccctgggtaaaggagatcccacccagatgccctctgctctgccagatgccctctgctctgctttcccaggcagcagcatcagggaggacctgcagggagcccaaggggcggtgtgcttggaaacaagtctctaaagccagagtgtgccctgggggaggggtcgcaataatctgtcaggatcaaatccttgcttcagtgggtaaagataaatttcaggtgaaccccacccaaattatcacaggaaatggctgacagaatgtgatcttactctacttccctcctccaccccaaacagggccaggtgaccacaaacatgcctcgggttctgcaggagggaaggctgggcacgccactgtgcccacctttccatgggacccccagaacccagaaagggcccagcatgcagagagatgttttgactccagcgctggagggaaaacagggcacagagcagttttgaaaacaattctctgtgggaacaaataggtagaaatgtattcagggtctctctgccaagaaagaccaagtggccattctgctgggggcctgccaagtctccccattcaggacaacacgcaggactctccagaggcaggatctgggcaaccagtctgccctcaagagggccccagcctgacctatcgaaggtgagtccttgaattcctgcatcaaagcacctcaggttccaagaaaatctgctcctggtcttgctgctcccctaagcccctcttagcaaactttccaggtctggactcggaagttctaattggccaaataataaagtagcacgagctgcaaagatgtttttcttggttttgtgttattacgcattgttataatatcaacaattacctaaatgtgacagagaccaatgtgtccacaggataactcctggaagagtgggagtgggaaaccacactgctacacagctaaccaggacagaaagctcttagcatgcagctgttcagagagtgggggtggaaaatcagagcagagccacggccaagggaccacaagtgcctccagagtcaaggctgacccttgcacttctcaaagggtcttcacatacttgacctcatgtccctgaagactttgcaggtggtcagggcagacatcaccaagttgcagggagatctgggaaccggtccctggtcacatagaggaacagcacagagcagctggccaccttcctggttgtgatattcaccctctgccatgaaattactgtggatcctggaaatgcgggaagtggggcgggggcaccttcccgagcctaatggagtacggggcccggcatgacctcagtcactgactgcagagaccccacaatgctgctagaggcccacaaaccacggacacctcagagcccacggctgcagcaaagccatcaccttgtgccctgccttctcagtcatccctgaggcctgcctgggtttctcccttctgcaagatgctcttttctcccccaacagcaagctcctcttctcccttgaggaacaccagttacttatgctctgcacacctgggaaggggctggaaatgggcttcccaggggtgccctccaccagatgctgaaccagactccctccagaggcaggtttctgggcagttcaactctcataatgggtcacctggggtaccggtaacatgcactcccaactgcacgctggaactgtgtgtactaggtcggcatcaggggcccggaaatctgcattcttcccaactccccgccaccccgctgccggagccctgtgcacttccaacttggaggccggcttccaccctggaggtaggacttctgatgtctgcacacctgaagggtggaatagtttctctgcttcaagaacgagcactgtagcacactgcagacactcaaagggttggtcccgtgctcttttgcctgccttcggtttccaggcgctccgaggaaactggccccacctacagcgggaggcccgggtctccagagcccctgcgccaatattctagtcaagaggctcgcgcggggccagagcctgaagcgggagatgaacccaccaggaagacatcccaaggctgaggccctgacaagccggccccgcccacgacggcgagcccctcccctcggccacccccctcctcaattccccgctaccggtgctgccgagtggcaggccaccctgacagaggccgtagaaaaatttcccaaacattaagtatcctgcccagcacgggcatcatcccccaaagcggatctcaaccccagccacgccccaatcgctgcccccacccgatactcaggatccacctggagccgagctgagcctagcctggcccctcccccagggccacacccaccctgcagccgcgtcccgagctgaactctgagcccacactgactcccacccccaacctgagcccccacacccttaactgaccccgaatgcctagaaatggccccgctctcaccctctaccccatcacctgccacgtggtttggagcggccacaaaagcctccctggggaaagttagtccgagatctgaaagcctcacctgcagaccttgggccctttcagttccaaatggtaaaaaaaaggggccttcagctctagggtatccaaggctgcagcttctttttatgccttttaatcactatgtgaactattttacaaatgagagaccaccacccttggtcacaagacaacagtattcagtagacgggttttgagcctgcccccaaggtagaagaggtgagtgtcacagaagaactcacgtgagctcagaggaagcatacaattctttacaccaaaatggggaaggattgccgtccattaaaatattttcatctttatgttaaaaacgaaacaaaaaggggggagggaaccgccacagatgaatcaactacaaagtatcgggccgcgcgtgggaactgttgccgctgggctggcgggggcgggcggtgatccccaggctggaggctcagcgcccgccctggtgcaggtgccgcccgccccgcaccggcccagggcaggtgagaggtgggcaggcgagagggcagcacggaggatgggcagcggccagggcattcctttccggagagagcctcgaggccgaggagcctagggccgggcgcgcccccgccgggccggatgggcgggggctcccacaaagagccgcaggcggggagcgggacccgggaccgccccccgcatcgccaagcgccgccgctgactttggttacgacaaattaaaccttagagcgctggaaaaattacaggaagaagagagcgaagaatgtgccgagtggcgaaggaaaccttgtccctgcgtgaacttcgcccgccgcgcgccggggccggcccctcccctcctgagcgcgcgcccgggcagcgggggaggaaacgaggagggaccccggagagcgtcccctgcccccgctccgggcgccccaccgtcacgagtgccgcctgcggtccacacccaggccgcccgcacctgcccgcgccgcctcccggccgggaggggtccccgcccccagcccagatgactatatccgcccccgcggccccacccgagcgcgcccggggagggggcgtgcccggcgggggcgcggtcgcctggcgggcgccggctccgagagccaagacccgcctcgcgcgacgcgcggggccagccgcgggtcggagcggcaggggaaggggcgaggccccgggcgttccggcccgcccggcccccacctcgcgccccatcggggactccgggggcgtggtcgggcagctcgcgccgaccccgtccgcgcgatccgggcgcccgcgccgccccactgacctgtgtgagttctcaggtgcgccttgaggtgcgaagatttcccgtaaactttctcgcagcccgcgtagtggcacttgtgcttcctctgcggggactcgaggtcggcgcgacttcggccccgccggaccctttgtctgaggccgggctcgccgctccccgcgggccccggctcccgctcgggctccagccccgcctcgggctccggctcgctccacgccgggctggggggcgcggccgccgcgccttcggcgccgggggaggtgggctcgggggcgggcggcggcaggcggcagggggtcctcgccttccgggccgcggcgccctccctgcgctccgccggggcgggcgccggcgcttgctggttgaggtccgctaggatccgcgccaccacgaagagcgaggcgctgtccttaccgtcgcggcgctcctcgacgcggggcagcgtgggggtggcggccacggccgcgccctcgggccgggactccggcccctcccgcggcccgtgcacgaccgcgcggctcgacatggacacgaggcactcggcggcgaagtggtccacataggcggcggctgccatgctgcgggctggggccggcggcggtgctcttgctgcgagtcgtcagccgcgcatccgcacccacggcctcgggagagcgggcggggggcgggggcgcggcgcgccctctcctcgggctgggctgggctgggctgggcgcgcagccgcctgtgccgtcacccgcgcggctccgcgtctgcgaggcgccggcccggccgggcaccgaagagtgagcgcatggggcgcgcgggcgactggggtccccgcgcggcgtcaggggcggccggttctaaggatgccgagcggcaacgttagggaccacctcgccaagtcgcggccgcagcttcgccgcgcattgtggcaggcgggacagctgccgtgcgcgccgcggctccgtgtgggcggcccggccccgggggtgggcggggccggggccacatctggacccgacgtcagcccccagccacatcctggcggcgcaggttacaggcggcggcggctgcggggagctgcgcgcgcggagggggcggggaccccagagcgcgcaccggcggaacggagcggtcgcgtgcccgcgcctgggcaagggggcgtgaccgagggccgggacagacgccattggtccgtgagtgcacggccaggccaatccgagccgttagaggggcgtgcccggtcccgggccctgcgcgcgccagtgggcgtgtcccctgggccggtgggaggaggggcggaaactggagcggggcgcgctgacgcatgacgtccgggggcggcgggccgggtagtcgcggcgcggagcggctgcttgtaccccccgcggcggggacacagcgagcacttctctgccggagcttttatgtggtgacagccttggcccccggcatggaggggagcggtttctggagggcgccatttgttcctcccgcgatgggcgccggcggggaggcgtgtctgcccggccgggcgcggggctgcctaggggcggaacgcactcgcgccgcgccctccgccgccggcttgccgggtg

SEQ ID NO: 6757 - DNA, 6000 bp, Homo sapiens; identical to SEQ ID NO: 716

SEQ ID NO: 6758 - DNA, 6000 bp, Homo sapiens
aaatattaatgctaacttttagataacatgcagaaaatcttaacttttaattaggcaatgatttctaaagtagaatatcaaaagtgtgaaccttaaaagaaaaaaatggataaattgcatttcatctaaattaaattcttcttttctttgaaagatactagtaaagaaataaaacagcaaggccgcagactgggagaaaacattacattacatatatctgacaaaggattcatatccagaatatataaagaactctagctgggcatggtggctcacgcctgtaatcccagcactttgggaggccaaggcaggcggatcacaagttcaggagttcaagaccagcctggccagcatagtgaaaccccgtctctactaaaaatatgaaaaattagccaggcttggtggtgggtgcctgtaatcctagctacttgggaggctgaggcaggagaatcacttgaacccaggaggtggaagttgcagggagctgagatcgagccactgctccccacccagggtgacagtgtgagactccatctcaaaaaaaaacaaacaaacaaaaaaaaaaccctctcaaatcgccataaaaaagatggagaatgcaattaaaatgggcagaaatcttgtatcttcgcaaagaaaatgtgagtggccaatatgtaaatgaaataggcttacttacatatcaccaggcaaatgcaaattaagaccacaatgcgttgccactatacacccaacaagatgaaccgagaggatgtggagcagctgcatttctcttgcattgcgggtgagatgcaaaatcctccaagtgctttggaatattttggcagttccttataaaactaaacatacactcatcacatgatttagccattttactcctaggtatttgtccaagagaaatgaaacctcatgtccatataaagacctgtatatgaatctttattcataatcactaaaattagaaagacccatcaacaggtgaatggaatactatttggcaatacaaaggaacaaactatggatctgcaacaacatgaatagatctcagaaacattacacccagtgaaagacgccagacatgaaacaacgtatagtacatcattctacttttatagaatgcctagaacaggcaagaaaaaaaaagtaacaagtgtaatgacacaatctatgtgggtcagagcttgtctggaaccctcagttgcagatgggtcaaagggtcacaagagaactttgggaatgatgaaaatgtgctgggcgcggtggctcacgcctgtaatcccagcactttgggaggccgaggcgggcggatcacgaggtcaggagatcgagaccatcccggctaaaacggtgaaaccccgtctctactaaaaatacaaaaaattagccgggcgtagtggcgggcgcctgtagtcccagctactcgggaggctgaggcaggagaatggcgtgaacccgggaggcggagcttgcagtgagccgagatcccgccactgcactccagcctgggcgacagagcgagactccgtctcaaaaaaaaaaaaaaaaaaaagaaaatgtacactagtttatacatttgttgagactcagtatctatacatgcaacattttatttcatgtgctatgagttgtttttttgaagagcattaaaatgtagtgccagaaaattttgatactgtttaaaaaaacaagttttctaaaagaagagtgactgaacaaaatagttcgggtaaaaggcatttgggtcaatgaaaatgcacaaacatggataaggtaacgtgatcacctgatgcctcccagctatctgcttcccttccttctttttaccttgagagtctccaaatattcttctagaccatttaaaaccaccttcctatgaacaaaatgccattcatctccttttccttctgccatgaaaaattaccctctgtgggactcctggagcctttttttcttccagtctaaaatgaatgcaagtaagaactgaattaataattttctgctgatttggctaatacataattactatctaagcaagagagcgcaaggatgtgggtgctggtgttcagtgcttctccacccctcccagatggctgcctatgttggagggagctgagaaaggaggaagggcggcaggctgcatgtccaccctttgttgcggatgtaggtgcaagtcgggcagcgactgtgatgtgcagtagtgtgtgggtgtgtaaggaccttatagcccatgcatcctgatcacacctttgcagtctttctctctgattttgccttttgaaagagactgtgtttttaggtgacacttctagtgacttgccgactaatttacaactcagcctaggttccccagaaaacatatcctgaggcaaaatttaggtggtgatatgttactaggatgtttgattccaatgaaaacaggagcaaaggaaaagggaattgtggcatggaaagagagggagcagataggagggttcattaccaggcagaccacccactgctgagtatgaagtacaaaagatggatccatctcacaggatcatctttgagaggccaacagcgactgcatctcaggacatttcttaggaggcaataaagggagactctttgatccatggatatgtgtccattagacaaaagtctgcctcatagacttctaacttgcctgaaatttcagattgcatatatgtgagtactgagcaaatcccgtggcatctcagaccttgcggatatgaggtgatcatatcccatgtgggcttgttcccatgtaaagctgatcagacctcttgcagaactgggtgctgaggcagcagctggggtgataaagccaaaagctccagagaaggtgaagccaagaaggtctgatgtgatgcacggttggataataatgtttgtaatgtggctttgcaagtcttagaacatataaactggtagtaagggggctaattcttgctatgttgttggttttattaaaacaacttcttttcattgtttactttttatagccacgatccccagcagggcatttctccaaaagaactgcatgcaaataggagaaataaactgaaatatgaatgtgtgtgtgatgcaacagatataattttccagataattccattgtgcattaacagaacattgaatgcaaagcagtggtgaatagacttttccagaaaataattaggatgctatatttatctctgaatctttcaggtactgcggtcacattttctgttccaaaaataaaatagctgattttttaaaaaggcagtatatttaaaattaatgcacagaaacatgccaacgtgagatttaggatctagatttaggtatttactaatataaagtctcaacgatgttaaaagcttaagcttcatgggaaaaaaaatgagtcaatacaggaaagtagttatctattattaaccattcattaagtcctggaataatctgaagaagtctacagaacacaaaaacgagcttgatgtgtagattttgttagttggctacaagtaggattgtgtaaccatcttcttcaatattagaagtccgaggtacagataaactttattggggatcactcactaaaatataaaacctgtggccgtaggtgagtggcccctcaggtgtgcggtggtggtccagagggtggggtgcatccggtgtgcactggtacaccagggtccttgcaccagtgcgccagtagccttctaatgacagccgaaggaggcctgctgcagggaagcaaggacccttgccttatattaaggaccacggatagctctgggcggcaccaaaaaaggcacgtattttacctggaatgacaatccagtctccaagtctggctgggattccagtttgctgataacaaaacacatattcagtcctcacttaaccatccattacatttgtatatatgtgagcagaaagggctcagtgctcccaagaaatgttcaggagtgagggtaagaggtgcagtttaaggagcagctgttaaaaaaaaaaggtccaattgtataaatgaaaaatagggccgccacggcaggggctggaagacgggtcaggcgggaaagcctgggggtgggggtgggggtaggggcggggatccctgcgtcgccgtttggctgctcggagagtaggggggagagcggatcccagcaggttaggccggaggaacagcgccatgtgctccgggctcctggagctcctgctgcccatctggctctcctggaccctggggacccgaggctctgagccccgcaggtgaggcgggggcttcccggcgttctgcaggcaccgtcgggaggcggcggcccgcagtccggcgggcagaggcgcggcacccgggggctctcgggctgcgctgcagcgggcggtggtcgtcgtgcggggccaacttcggcggccggggtaggcgggcagcgtttccgccgccgcttatgccggcgccgaggctgccgacagtccccgcactcgcccggccgccgagagcccagaggagccggctcaggggacgaccccccgcccctcccgactccgcgcagccgcggctccgctcgcagcgtccggcccaggtcgcccccgcactccgcggtcccagaggtccgagtcccgtgcggcggccgccgaggcgggaggggagcgcccagggccccggcctcgggccgaggcgagcgtgggggagggcagggtgcgcggcgcggcggctccgcctccgactctccggcctcctcccccgccccgcgcccgcgcgcgctcctccctccccgctcctccttcctctcccagcgcccgctcctccccctcctcccctccccctccgccctcctccgctccgggccagcgcggcggcggcggcggcggcggcagcagcaggagcagccccggctgcgggtcgcgacggcggcggggcgccccctcccccgtgccggggcgcggcggagggatgtggggccttgcgggaggaaggcttttcggcatcttctcggccccggtgctggtggctgtggtgtgctgcgcccagaggtagggtcgcgggtgggccggcgggcggcgggcagggcgcggggtgcgcggggcgctggcggctgagccgcccctgaccccgctctttgtgctccccgtccctcccccagtgtgaacgatcccgggaacatgtcctttgtgaaggagacggtggacaagctgttgaaaggctacgacattcgcctaagacccgacttcgggggtaagtgggctgcgcgcggccgttgcgggaagcgcgacccacggcggcggcggcctgggcggagggaggcgggggccgcatccgcggagcagcggcgggtgggagtgggggcccttcgcccgcgcccctcctgggatagcccccagtcctcagagccgcccgcgccccgcgccggagctgggctgatcgccgtgtcctgtgcttcccgcaggtcccccggtctgcgtggggatgaacatcgacatcgccagcatcgacatggtttccgaagtcaacatggtgagtgcccgccctcccagggcggtccctgagcccccggcccgctgtctgggatcacaggcgtccacagtgctgggccggaggcctcttcggccggggccgagtttccccggtccgcagagggagccgcgctcccaggcgccggcccctcgcttgcccggctccctgcacccgccccgggcgctcgggggcctggctggcgtcggagccgcgagggcgcacccttcctgcgggggagtcctggccggcctagtgctcccatctgccgctgcccgtgggctcccagctcctccagcgctctgtcgcctggtcccgaggtttcccgagcgctgtctcgcctccttagcaacaggcgctggggaaccgggagaggcgagatgtgggggtggctcctatattctaggtaagaggtacttaaggtttcctttgttgtcgtttggaaagagattctggctgcaggaaaggggaacgaagacagtggtctgtgcgttccaggggtgtct

SEQ ID NO: 6759 - DNA, 6000 bp, Homo sapiens
tggcagttggagagaaagcagagagaagacaggagagagaaaagcgagcatatcatctcacaccagttagaatggcaatcattaaaaagtcaggaaacaacaggtgctggagaggatgtggagaaatcggaacacttttacactgttggtgggactgtaaactagttcaaccattgtggaagtcagtgtggcgattcctcagggatctagaactagaaataccatttgacccagccatcccattactgggtatgtacccaaaggactataaatcatgctgctataaagacacatgcacacgtatgtttattgcggcattattcacaatagcaaagacttggaaccaacccaaatgtccaacaatgatagactggattaagaaaatgtggcacatatacaccatggaatactatgcagccataaaaaatgatgagttcatgtcctttgcagggacatggatgaaattggaaatcatcattctcagttaactatcgcaagaacaaaaaaccaaacaccgcatattctcactcataggtgggaattgaacaatgagaacacatggacacaggaaggggaacatcacactctggggactgttgtggggtggggggaggggggagggatagcattgggagatatacccaatgctagatgacgagttagtgggtgcagcgcaccagcatggcacatgtatacatatgtaactaacctgcgcattgtcacatgtaccctaaaacttaaagtataataataataataaaaaaaaaaagcgagcagagagctggtgaggcaagtgcagagcacaggtgtgccacagcagctgtgggagggccaaggagtaaagggtgcacgtgcgggtgtggcaaggttcctggaaaagaggggctggaagggaaaggggaggaagacagagggaggagccggagtttcacaggtagtgcctgggggctgtggcagccctccccaccccacacgtgctggcctcttccacggcacccagtgcacccactgttaagactgatgctcagcccctttgggcttccctcttctctggtcaccgtgtcttccaacccacttgtccagggccacctctcgccttggggagcccaaaacaacagccaccaggcctgatagagaagaaacactgcttgaaccaggatgatgaagctaaaagggatggatgggtggagtgatcgccggagccccctctggggggtcagaaagcccaggaacccttgaagggtccctgggggaggaaaggagggcatgcagctggatgccactggctatagacttataagtctaagaggggagcctcagcttgttgggggttgcaggtcggataggtgaggctgggcccttcctgctgggaaaagcagaagagggagagtctatggcaggggaggtgggtgggcttgtggggcggaggtcagctgggccagcaggcactgtggtccccttggctgaatagcagaggtgacctctaggagcaacactccaaggtgcgtgagcctgctggccagcaatagtgcttcagcgggggccagggaccctgccttcagtcacacgctagcagctatgatggtacctgggagggagggaaggggcctgtgtttcctgcctggcctgtgaggtgtgttgtgggttgaccgtgtgtatgcgactctcaaggttttatcctatctcaccactgcattgccgacagatagaggaggtgggactctgactatcacccctgctctgcagtggatttggctctcagcactcccaggctgggagctggatgccctgccctggcagcatgactcagactgcccaacaggtgcggtgtgcacaggaggactatcctaggactctggccgcctcagagtacagccccacacaccaccccctctaagctctcagcccttacaccataaaccatgagctctgtgacggctccagggagcacccatgtctaccagcgtgggcacggagcctgttccaagagtccccaggctcagccatgggggctggggggctttggggccgtgggagccagccttggtacctgcatccggcaaggacgctctgcacctgcaggcaggagttgtccacgggcccccatgtgcgtgctgatggtggtcgtgttgatgtcgccgatgatgccgagtgcctccttcagcacgtggtacatgcgcagcatctcgtcgcgccactgtgcctgctctgccgactcttccatcagcgttttctggtccccacgtgagtacaggttggacagcagctccgagaagatgaactccttggtctgagagcgggcaaagagggaaggaggttgggacctgatgcctttgctgccctggcctcctgccgggccctgctgggactgtgtgctggacttggagccctgagtatggcttttcagacgcggcttctacaccgcttagactcaaagatctgcctccccaccgcccttttctcactcagatagggacactgaggtccaaaggaaaagtcacctgtccaaggtcacacatctgggaggggacccaggacctatcatgccaccaggacaccggtctactcagtttcttaaaaatgttttttggagataggatcttgctctgtcgctaggctggaggacagtgggcgagatcaccactcactgtagcctcaacttcttgggctcaaagtgatcctccaatgtcagcctgtcgagtagctaggactataggtacgtgccaccaccaagcccagctatttttaaaattttagtgtagagatcaggtctcactatgttgcccaagctggtctcgaactcctgggctcaagctatcctcttgccttggcctcccaaagtgctgggattacagacatgggccactgtccccagtcccacgttatatttctatgagacagctctggtctggactgtgcctccctccctggaccttggtcccatagggctggtcagcatctcccccaggccaacatggccacctgcatccccagtgctataggagccccctgcccctatgaggcagtgcatgcacgttgttgatcatgacgtgcatgatggtcttgggcatgacaccaaccatgaggtcccacacggtcttgttgacaatggccatgtaggagtccacaaggttctgggtggtttccatttgccgctccagctatgggtccatggagtgcatgaagctgtcggagccattctcctcagccttgctgtcctgtcatggagaacacagtggcatcagggtggccaggccatgcagccaggctccaggaatccctaggatctcagcacctccaagggtacctggaacattgaggcacagagaaaaacaactggcgtgaacatgcaccgagctccccacacgctctagacggtttcaggtatctgcctctcaggaccccagactcccctgattcagtctcctcttagttctgactctagtgcccagaatctgcctcaagttaccaatccagaaattggaaaaaaacatctccaggtcccctgttggagacctggccagagcttgtgccaggctgcagacacctggcagggggcaagaaaggggcatactcactttccccttgtcctgggaggcccatgcaccaacactgccaccgccgccgccaccagggaacacggcaaagtagacacacacagagaggaaaacgggaagggttgagtgaacctgggacactgcaccccaactttaatgtgttgtggaattcagttagctaatattttattgaggatttttgcatcaatattcatcagtgatattggcctgtagttttcttttttggtctgtgtgtttgattttgttatcagggtaatgctagccctgtagaatgagtttgcaagtattccctccttctctatttttggaatcgtttgggtaaggttggtattagttcttctttaaatgtttgctagaattcagcagtgaatcatcaggtcccaggcttttctttgctgggagactttttattaccactttgatcccattatttgttattggtttgttcaggttttgggtttcatcatggttcaatcttggtaggttagatgtgtctggaaatttatccatttttggtaggttttcctatttatttgcacacagttgctgaccactagtgatcctttgaggttttttttcttttctttttttatatggagtcttggtctgtcgcccaggctggagtgcagtggcgcgctctcagctcactgcaagctctgcctcccggtttcacgccattctcctccctcagcctcccaagtagctgggactacaggcgtccgccaccacgccctgctaattttttgtattttttccgtagagacggggttttaccgtgttagccaggatagtcttatctcctgacctcctgatccacccgccttagcctcccaaagtggtgggattacaggcgtgagccacgcccccttgggacagggacacacacacacacacatagacacacacacacacacacacacacacagagttggtggttgtgccgcccagtcgcgagtgtgaggaagggaccagatcggtcgggcagaaaggtgctgggtcaagagaggagggggcagccggtagcgcgggcacgccgggtgcgcgcggggcgcgccgggttgaggggtgaggggtgaggggtaagaggtgaggggcgacgaggaccggggcggggtaggggcagccctttcccaggcggtagcgggggcagtggtgctgttgcccttttaaactgcggcttgacgggagccgcgcctcctgtcggtggagtcggttataaagggagcagccccgcaggccgccacatagctcccgccaagtcctcggtgccccttgccattttccagccgcgctcccacgagggtcacggcggcggggagaggtggagccgcgagagctcggccgggggccccgcctggtggtcgcggccatgacagcggctcgggacaggctccttttccgcgcccctcccgccggaggtgaggggaagatgtccatgtccgggttcaaggccaaaccgaagttactggcctctatcttccaggagaaccaggagccacagccgcggctcacgccccaccgcaacattaaggtgagtcgccgggtggcggcctggcggggcagggcgagggcggaaagcgggtgcccagagtcccaggagaaaggggaagctgccccagagaggccgcggttccccgcccctttctcctgcaactggcccgcccggcaaggcagaggcttgggtgggagaaggcggagggcgcgtctctccaactcctagcgcggggctggcttgggggctgctggcccctctcggcccctgtcgctgcgcctcgaggtgggagcccgccgctgcgggagccctcttgggacccatggtcgccctcagtcagcccacctgctctagggaccgcgacagggcggggcagggcggctcccgcgttgttggagcccaggcggggaaggggaaaggcctttaagattttcggttttttggccgggcgtagtggctcacgcctgtaatcccagcattttgggaggccaaccgggctgatcacttgaggtcaggagttggagaccagcctggccaacatggtgaaacccgtctctactaaaaaatagaaaaattagccggtcgtgttggcaggcgacttaatcccagctatttgggaggcagaggcaggagaatcgtttgaacccgggaggcggaggttacagtgagctgagatcgagccattgcactcaaacctgggggagaagagcgagacttctctctctctctctcaaaaaaaagttttctttctttttttctttttgttgagacagagtctcactcactctgtcgcccaggctggagtgcagtggcgcgatctcggcttactgcagcctacctctcttgacagtccactggttaaagcgattctcctgcgtcagcctcccgagtagctgagattacaggcgcccgccaccaggcctggctaac

SEQ ID NO: 6760 - DNA, 6000 bp, Homo sapiens
cactcaagtgcccattgacacgggtctggtgaaatcaactctcatgcatccactcagggattcgggccacacagctgtcaaaagaaatgagaggcagccatgtcacctccaagaaaagtggagaagagaagtgccaaaggcaaagcagagaaaagtgtgtaaagtcctctaccatctttgtgagaaagaggcggagagaaacaatacatatatatttatacttaaaaagtgaaaggataaaacaataatttttttttaagtttacttgtggcggccaggcgtggtggctcacacctgtaatcccagcaccttgggcagccgaggcgggtggatcacctgaggtcaggagtttgagaccagcctgaccaacatggtgaaactgtctctactaaaaatacaaaattagccaggcatggtggcacgtacctgtagtcccagctatttgcaaggctaaggcaggagaatcccttgaacccaggagacagaggttgcagtgagctgagattgcaccactgcactccagcctgggcaacaagagcaaaactccatctcaaaaaaaaaaaaaagaaaagaaaaaggtttacttgtggggaaagaagaatgagggagaaagacagatgccacagccagactactctgaaagaatcttgtttgcagattggactttgccaaaatgcaaacgtttcacttaattataaaacagacttatatttaaaaactaattcctaaaacaatgcatggaaatccaatggaaaattcaatgagtgaatcttactggaaatctgcctttagtgttagtgctattgttatttgctcagacagctcactagacacataataattctcagacattgccagcgtctccccacagtcctcggatactgtgttccccgaactcgctgtgtatcaagtgtgtagaataaccacacagagaataataactttaagttcttgaaaaaacctaataggacatatgcaaggtgaaaaagaacaacaaaacagtcttttaaactgcttccagtactgttagcaatatgggtgtgttacttgaaactatattcaggataaagcaaaagagaaagcttttaatgtcattaggaatagggcttttagcataagcaaaaagagacacaaacatgaaatcaaggaagttaagtaaaatccctctgtttctaaatttgaattgaaaattatcatgatgcattttctttacagatgcacgcgcgcgcgcgcgcacacacacacacacacacacacacacacacacacacagagacacacagcttcatagttccgcctgctgaaaaggctcagaaacaattcagttcagaagcagatcctagtttctgaatactgtttctcactcaaaggaaccagggctccttggagaagtgcctgagcctagatctgcggcaagaaatgtacaagatgatcccaaacatctttgcattccagatagcaaagaggctctcagagattcctggggtggcgtcagaaggattcaggaggctttgtgaaactgggaccatgtgaacaatagtaagaaaaataactgctgtggatttaaatgcatcaaatatgttcaaatccatgaatttatactgacactctgaagaaaaggaatgcattagtcacattggaatgaggccaaggaagcaaccaattccactggagatggaaacctttttcttgcctttcctctgcaagctgtgcctcagagtgaccaaatctgcccagggaaagtttctatttatggatgaattccagctaacaaataaagaagagtcgacctaattagaagatcaccattttgcagctgggcatggtggctcacacctgtaatcccagcactttgggaggccagggtgggcggatcacaaggtcaggagattgagaccatcctggccaacacggtgaaacccagtctctattaaaaatacaaaaaaattggccgggcgtggtggcaggcacctgtagtcccagctactcgggaggctgaggcaggagaatggtgtgaacctgggaggcggagcttgcagtgagccgagatggcgccactgcactccagcctgggcaacagagcaagactccgtctcaaaaaaaaaaaaaaaaaaaaaaaaaggaagatcaccattttgcaagtcctagggatatcatggccctagacagtcatcaccaaagtccgccggcattgcaaaagagatgtctcctaacagaaggacacactaccaccaaaaagtcttattgcaaaagtccaccttgaatctgaacaggtttcgagactaactattggtcaggaagtgcagggaacaaaggagcatgagaaacaatattgctggctcatctcagagtccaaccaggacccttgggcctccacctggggtgtcccctgctagcctggggatctcccatgacctcatcagggccccacacaggtgagcatacaggtcactgtccccacactctcaccaactgtgaccgccagccggcctcttattccctctgaggaatgtgtcctcatggctcccccatgaggagaaggactgcacccccgcagctgggtgaggagtgagtggtcagtatccacccttcacggtggtgttcttgtgtcctcagacggctccacagacacataatgattctcagaccttacagcgtctctccacagtcctcacacactgtgtccatgcaccaggtcatccaagtgacttcatgggggaggatgcctctggagagtggacagtctggtgagaaccccttttccccacagctgcagctcaacaccgcccaacagaaatacaaggtgagccatagctgtgagccacagagcagaggcaattttaaattttcttttttttttctttttctttctttctctctttttttttttttttggatacagagtctcactctgtcacccaggctggagtgcagtggtgtgatctcagctcactgcaacttccgcctccagggttcaagtgattctcctgcctcagcctcccgagtagctgggattacaggcacccaccaccatggccggttattttttatatttttagtagagatgaggtttcaccatgttggccaggctggtctcgaactcctgacctcaggtgatccacctgcctcagcctcccaaagtgctggaattgcaggcgtgagctgggccaatttaaaattttctagtagtcagttttgaaaagtaaatagaagcaggtgaaaaaaattaataacattctattcaacccaacatgttctaaatatttcaatgtgcaatcgattattatcacaagtcttggcaatcccgtgtatattttacattcggagcatatctcaattctgactggctctgtttccagcactccatagccacgcgtggcctgtggccactgtgtgagacatctcagctcccagttgcaggccacactgcatggaccctggggaggaggggtgttctcttggggaaggatggggctcccattgtttccatcttatctgaacctgaaaaagagcttatttgtctagtgaagggcccactgcctggagagccactgactggcagccggtcgggctggccattggtgctgaccacagagcctccacacctcccagccatggcagtgccggccatcagctcacttccccatgtggtctttccccactgctcccagactgatttcagatgccccggattgccctgactgtgccttcagaattccggccacgtagcaccctccctcagcccccggaagggttcccgctgaagccgtgactctctcaggcctcaggagccaacaccagttcaagaaagaagactcgggagccaggccagggaggctgctgcggtcattgtgcgcccaggggctgtgcgcgctccagcaaagcacgtgggagccactcaccagaccctttgcacgcccactctgcggtgacagaccctgagagaaacgaatgaaagcaaagacagacccagaaaatggcctggcacatgtgcttccgtcagaagttcagagattccctgagccccaggctgtctgccaggcattgggtgggggagtgagcccagcctccagcttcaggactctacatatgggcagaacttgacaacctgggcactcccactccaccccacctgctctctgggcaagccaccctctcacatgactcagagtcctcatctgtaaaatgggaacacccctaattgcccttacgtccaatctgtctgctcctctgtgagaagcgggaggcggacaatgcccaagagcctcagatgctggggaagacccagcccctctgcagagagggatagttcagggtttgggttttttctttcctcctgggctgagaaagctcatggaaagctggaataaccacgcatactgttacagcaaatccaacagagctcccaccgtggtggttttcaggtgactgtggatgccaagcaggcaagctcctggtgaaggggggagagcagggattagaagcactcagaaggggctgagagtcatgtggggctcacactgcatttgcagctgggttcaccctgacctcaggcccaacttagatgaggaaggattagcagtaattagtgccatgtgccgccttctcccagctccccggggcacgaacactgcccagctgatgaggggattctgaaagaaccattatgtccaattgtctcaattatgcaaaccctgctgacatttccagccagggaagggcggctgggtgggagggggccatggcggggccacttcaaaggaaaagctctagctcccctacctctctcacatcctaaggctgcctttgtgggattccacacagaacagcctggaagcttggggccctggcttccttttctggcctgggagtcaggtcatggggccatcgcttcacagcaatcatgagggcccaggcccaagtgctcacatgctcctcatggggactgctcctcttaaagggtgggccctcctcacccagctccctgccctggccaaggaggaggctgaaagagcctgagctgtgccctctccattccactgctgtggcaggtaagctcagatgcgggtaagcacaggtgaagggaggtcaggtgcaggtatcctcaggtgtgggtaaactcaagcgtggacaaactcaggtgcagataaccacagatgcagttaagctcaggtgttggtaacctcaggtgcaggtaggctcaggtgcaagtaagagcaggtgcaggcaagctcaggtgtgctttctggggcctgttactcatctcctcttgaggctggctggacaggaccctatggagcagctggtgaacctgtgttcagcctgggttccaagaggctgtctcagcagaagggacccaccaggttgattcacagaggggataagtactctgtcagctggtctcaaagaggctgaaaccctctgagcttccctcagggccagcttctaaatccaggtgccagggatctgctcaggagccccggctccaggcctcaacctcttgcctgtcattccttagcatcttactttgcttcagggaaaaggtgcaccttccttagaaccccagaaaatgctgaagttctaggagagacagggtttatacttgtaagcctttatcagctgatatttcacctgtgaaagccttggggaagagattggttacacggaacaggatcaggaggggagattactgctccctctcactgctgggagcagtgcaaactggtttctggaaggcagttcaacaacatgcagcaaagccctgcaagtccacacctaggaacccatcctgaggagcgaatcctgaagggatgccaacattgacacagctttgtgtgctaccgggaagcacagcaaacaacccaaacgcccagaagcagagggctggacacatcaatcatggtctgtccataggatgaaacatcacgcagtcacttttaaaatgacagagaaaaaggcataataaccgtacagaattattgtgtttttcattacacacac

SEQ ID NO: 6761 - DNA, 6000 bp, Homo sapiens
tgagatacgtcccatcaatacctaatttattgagagtttttagcatgaagggttgttgaattttatcaaaggccttttctgcatctattgagataatcatgtggtttttgtctttggttctgtttatatgctggattacatttattgatttgcgtatattgaaccagccttgcatcccagggatgaagcccacttgatcatggtggataagctttttgatgtgctgctggattcggtttgccagtattttattgaggatttttgcatcaatgttcatcaaggatattggtctaaaattctcttttttggttgtgtttctgcccggctttggtatcaggatgatgctggcctcataaaatgagttaggaaggattccctctttttctattgattggaatagtttcagaaggaatggtaccagttcctccttgtacctctggtagaatttggctgtgaatccatctggtcctggactctttttcgttggtaagctattgattattgccacaatttcagctcctgttattggtctattcagagattcaacttcttcctggtttagtcttgggagagtgtatgtgtcgaggaatttatccatttcttctagattttctggtttatttgcgtagacgtgtttgtagtattctctgatggtagtttgtatttctgtgggattggtggtgatatcccttttatcattttttattgcatctatttgattcttctctctttttttctttattagtcttgctagcggtctatcaattttgttgatcctttcaaaaaaccagctcctggattcgttaattttttgaagggttttttgtgtctctatttccttcagttctgctctgattttagttatttcttgccttctgctagcttttgaatgtgtttgcttttgcttttctagttcttttaattgtgatgttagggtgtcaattttggatctttcctgctttctcttgtgggcatttagtgctataaatttccctctacacactgctttgaatgtgtcccagagattctggtatgttgtgtctttgttctcgttggtttcaaagaacatctttatttctgccttcatttcgttatgtacccagtagtcattcaggagcaggttgttcagtttccatgtagttgagcggttttgagtgagattcttaatcctgagttctagtttgattgcactgtggtctgagagatagtttgttataatttctgttcttttacatttgctgaggagagctttacttccaactatgtggccaattttggaataggtgtggtgtggtgctgaaaaaaacgtatattctgttgatttggggtggagagttctgtagatgtctattaggtccgcttggtggagagctgagttcaattcctgggtattcttgttgactttctgtctcgttgatctgtctaatgttgacagtggggtgttaaagtctcccattattaatgtgtgggagtctaagtctctttgtaggtcactcaggacttgctttatgaatctgggtgctcctgtattgggtgcatatatatttaggatagttagctcttcttgttgaattgatcaacaaggccttaattacttaattgatcattaagtaatggccttcgtctcttttgatctttgttggtttaaagtctgttttatcagagactaggattgcaacccctgcctttttttgttttccatttgcttggtagatcttcctccatccttttattttgagcctatgtgtgtctctgcacgtgagatgggtttcctgaatacagcacactgatgggtcttgactctttatccaatttgccagtctgtgtcttttaattggagcatttagtccatttacatttaaagttaatattgttatgtgtgaatttgatcctgtcattatgatgttagctggttattttgctcattagttgatgcagtttcttcctagtctcgatggtctttacattttggcatgattttgcagcggctggtaccgtttgttcctgtccatgtttagtgcttccttcaggagctcttttagggcaggcctggtggtgacaaaatctctcagcatttgcttgtctgtaaagtattttatttctccttcacttatgaagcttaatttggctggatatgaaattctgggttgaaaattcttttctttaagaatgttgaatattggcccccactctcttctggcttgtagagtttatgccgagagatctgctgttagcctgatgggcttccctttcagggtaacccacctttctctctggctgcccttaacattttttccttcatttcaactttggtgaatctgacaattatgtgtcttggtgttgctcttctcgaggagtatctttgtggcattctctgtatttcctgaatctgaatgttggcctgccttgctagattggggaagttctcctggataatatcctgtagagtgttttccaacttggttccattctccccatcactttcaggtacaccagtcagacgtagatttggtcttttcacatagtcccatatttcttggaggctttgctcatttctttttattcttttttctctaaacttcccttctcgcttcatttcattcatttcatcttccatcgctgataccctttcttccagttgattgcatcggctcctgaggcttctgcattcttcacgtagttcttgagccttggctttcagctccatcagctcctttaagcacttctctgtattggttattgtagttatacattcttctaaatttttttcaaagttttcaacttctttgcctttggtttgaatgtcctcccgtagctcagagtaatttgatcgtctgaagccttcttctctcagctcgtcaaagtcattctccgtccagctttgttccgttgctggtgaggaactgtgttcctttggaggaggagaggtgctctgctttttagagtttgcagtttttctgctctgttttttccccatctttgtggttctatctacttttggttttcgatgatggtgatgtacagatgggtttttggtgtggacgtcctttctgtttgttagttttccttctaacagacaggaccctcagctgcaggtctgttggagtacctggccgtgtgaggtgtcagtctgcccctgctgggggttgcctcccagttaggctgcttgggggtcaggggtcagggacccacttgaggaggcagtctggccgttctcagatctccagctgcgtgctaggagaaccactgctctcttcaaagctgtcagacagggacatttaagtctgcagaggttactgctgtctttttgtttgtctgtgccctgcccccagaggtggagcctacagaggcaggcaggcctccttgagctgtggtgggctccacccagttcgagcttcccggctgctttgtttacctaagcaagcctgggcaatggcaggcacccctcccccagcctcgctgccgccttgcagtttgatctcagactgctgtgctagcaatcagcgagactccgtgggtgtaggaccctccgagccaggtgcgggatataatctcctggtgcgctgttttttaagcccgtcggaaaagcgaagttttcgggtgggagtgacccgattttccaggtgctgtctgtcaccactttctttgactaggaaagggaactccctgaccccttgcgcttcccgagtgaggcaatgcctcgccctgcttcggctcgtgcacagtgcgcgcacccactgacctgcgcccactgtctggcactccctattgagatgaaccgggtacctcagatggaaatgcagaaatcacccgtcttctgcgtcactcatgctgggagctgtcgactggagctgttcctattcggagtattgacattttaaagaaatcctaattaaaatggacaatatggacagattatgatggaattattcttgttcaggtactcttttcgtttggacagaggtatctgccggtactgagatgtaagtgatcagctgaagggagaaactgtacaccatgtgacggacaaattgcctgcctcaagaaagcacttaggaccattctgcagccactcagtgaccttggctagaaaccaatggctgtgcggcgtgaggtaagatgaaaggaaataccctagggatccaggacttctgcatttggtgaaacgtccgcttccactacaaggctttgggatgtctagtctgtagactggagtaacattaatactgactcatgcagaaacaatatagctacatattgaactgggggaaggggtggcaaaaccctctgcaaataggaagtgccacaagagcaccgagataaggatgaggccctgcgtgagcgcagccttcgggttttccttgggccgatcagcaccgactccaccgctctcggcgaggcacctccagctcccgggaatgagaaatgtgcccgccacagcaggggcccacaggaatgaagggcgccggcgctgcgtaggcccaacagttccccgcgccctcgcccccggccccggcccagcccggcccttcttcccccgccttggcagagtggcgtcatcagggggcgaaaaacccgacgagcatgaggcccgcagatcccgtgtaggagatgcgactctcgaagttgtcgtccgtgagttcggaggcagcggcgaggcgggccgcggcaagaagcagcgccacacccgggaacagcgctaggcggcggaggcgcatggcggcgaggtggggtggggacggccggaagggtcgcggctcggctgggactgcggaggtcgggcgcgcgaccacaaaccggctgcctgcgctggcgcgtctggcccaggggacctgcagccggaggtcccaacccccaaacccggctcgggccgctgtgtggcagccgctgattggctgcgcgtcgccttcgtccggcgggcgggaccagctggttaccgctgagtggccggagagcggggcggggcggggcctaggcggcgagtggctgggcgagcgttgctccgcatggtcctgggctgtgggtaggggctagggccgggtcccggggtgagccgaaacctgggggtcgagcggggcggggaatggggcgcagtgaggctgggagccggccctgagctcgtcttgcataggggtagccaggctcggggcacctgagctggaggcggaagcgtgaaataaggactgagtgggcaaagagaacctgggctgaggtgaggcccagaagcgagaatggaggagagaaggagctagcccccgaaggagtgttggagtggacacacttgggacgggacccattttcaaaatgtcaggctttggcattttgtccaatttctctgcacttggtttctcttgcgtgagcaggccaagacctcccccaactccacctcattgcccgattgtctcaggcacaggtgggacccagattctttgtccagccccgggcccctgcccttgtggctgctcctttttcttgcggtgtttttgtttgttttgttttgtttttaatgagttttaattagaaatgccatcacaaagtgaagatgcctggccgcttggtcgactgtgcaatgtctttaccacttagccccttttgtttcaaaacaccctgagtcctagtagaatgtttgttcttcccaactgctcctagttcgtagatgtgggtacattaaggaatcttaagggtaaagagggtggggaggaggggacagaaaacctgtaatccttggtgcagctccaagaatgaaatgacacttgatgcttacattttcttagcagacatggccgcttaccaacaagaagagcagatgcagcttccccgagctgatgccattcgttcacgtctcatcgatactttctctctcattgagcatttgcaaggcttgagccaagctgtgccgcggcacactatcagggagttacttggtcagcagcctatttcttcactaatttaaatttaagactcctatccacatcctctacatttaagagtggaaaattc

SEQ ID NO: 6762 - DNA, 6000 bp, Homo sapiens
atacatattttgcaagatttatacctgttactttttttggtgctaatgtaaatggtaatgtgcttaaattacaaattttaattattcatttccccatatcatcttttttaagagatggcctctcactgttttgcccacaactcctaggctcaagtgaccctcctgcctcagcctcctgagtagctgggactacaagtgcacactgctatgcctagcttctatatgattttttttttgagttttttggagacagggtctcactatgtcacccaggctgaagtgtagtggtgtgatcttggctcactgctacctccacctcctggtctcaagagatcctaccacttcagcctccgaagtagctggtactacaggcgtgtgccaccatgcccagctaatttttgtatttttagtagagatggggtttcaccatgttgcccaggctagtcttgaaatcttggactcaagtgatttgcccatctcagcctcccaaagtgctgggattacaggcgtgagccactgcacctgtcctcttatatgatttgctttaaaatattgaccttgctatgatacttctctaccacaaaattatacacatatcaatagattgaagcactgagatgaaagaggtgtaatcagagttagtgcttaaggcagttgtcctcaaactgaggtatatatgccatgatgatgtacaaagagtttccaaggaatatgggtagtattaggggaattgatatttacataattgattttataagggaaatttaacttcatgtttctcttacttctactttcttttctttctttcttttttttttttttgagacagagtttcacctttgttgcccaggctgaagtgcagtggcgcaatctcggctcactgcaacctctgcctcccgggttcaagcaattctcctgcctcagcctcccaagtacctaggattatatgcatgtgccatcacacccagcaagtattttgtatttagtagagacagggtttcaccatgtcagccaggctggtctcgaactcctgacctcaggtgatccgcccgtctcagcctcccaaagtgctgggattacaggcatgagccaccacacccggctaccctctactatttaggaacggtatcttatcttaatctgacatgacactctgcatgccagaatcaaaggacagagtaacattttaagattctggcctatcaagagagtttatttgtttgttcaacaaatatttattaaatgactgaatgcttgatgacacctacttagtaggcatttaagatggataaggttatgatcctcatgcagttgaatgtttagtaggggattaacaagtaagttggttgaatacaacaggataaatgctataatagagaatatataggctgggcatggtgcctcacacctgtaatcctagcactttgggaggccgaggtgggcggatcatttgaggtcaggagttcgagaccagcctggccaacatggtgaaaccctgtctctactcaaaattagctgggtgtggtggcacgtgcctgtaatcccagctactcaggaggctgaggcagaagaatcatttgaacctgggaggcagaggttgcagtaagctgagatcgcgccactgcattccagcctgggctacagagtgagattccatctcgaaaaaaaaaaatcaagagactctttattattattttttatttctttattttgagacagggtcttgctctgtcacccaggctggagtacagtggcatgatcttgctcaccacagcctcaaccttttgggctcaaacaatcctcctgcctcagcctccgagtagctgggactacaggcacgcacagccacactgggctaatttttctagtttttttgtagagacagtgtttcaccatgttgcccagactgcatcattttattctcataatattttgcttagcattttaaacagcatagtagtaagtgttgaaatgttgtaactaggcaaggacaaggaggagaattagtatgtgatctagtgagagtgaaaaatagacatgccattgaccaaaatggaaacaaaacccttctggaaaaaaggtgtaagaacatttaacaaacatgttctgaagcactgaatttatcaatcttgtcatcaccgaacactgactataactgctcctgacatattcttagacactgaatataaatatatatatttcaagatttattatttatttatttatttttgagacggagtcttgctctttcgcccaggccggactgcagtggcgctatctcagctcactgcaagctccgcctcccgggttcacgccattctgctgcctcagcctcccgagtagctgggactacaggcgcccgccactgcgcccggctaattttttgtatttttagtagagacggggtttcacagtattagccaggatggtctcgatctcctgaccttgtgatctgcccgcctcggcctcccaaagtgctgggattactggcgtgatatttttttaagagacgtggtcttgctacgtagtccaggcttgagtgcggtggctatacacaggcactatccaactactgatcagcaggaattctgacctgctcaatttctgtcctgggttgattcacccctccttaggcaatctggtggtcccttgctcccaggaagtcactacgttgatgctgaacttagcacagccacccaatccgcatagcacactacagcccagaactgggctcacatgagccttctgcctcaacctctggagtagctgggaatacagacatgggccactgtgcctgactcaatacatattttttgaatgaataaattcattctccagaattgattgctgattgaaagtcagcatctgtgaatttcaaggctggttgatcacttgaaaattaaggaatttattttgattagttcaattaaggataaatcctgttccccatttcttttctttttctttttttttttttttttttgagacgaagtcctgctcttgtcccccaggctggagtgagatggcgcgatctcggctcactgcaacctctgcctcctgggttcaagcgattcttctgcctcggccccccgagtagctgtgattacaggcgcctgccaccatgcccagctaatttttgtatttttagtagagacggggtttcaccgtgttggccaggctggtctagaactcctgacctcaggtgatccacccgcctcggcctcccaaagtgctgggattacaagcatgagccaccgcgcccacccaatcctgttccccatttctaactctaaattttccaatttaccaaagagttctggcaagtgccaaggagctcatcttgtttcatttctacaccatccaactaaggagcgaagcattcgtgagtacaaaaagaccagagttacaaagttctaacgaaacaaagcactctaatctcattttattttgattttccagtttgtctgcctctaccttctagattataaactccctacaggcaggaaatgtgtaggcccaactgaaatccagaagataaacatttattgactgcatgcataaattagtcaagatgccttccccaaggctgacaatttagtgtgacacatatattaaaacatttttaagtcttggttctgctggacctgccagatggggaagaaatacacaatacctgaagattgttcacaagctgggggaaccagtgggtggattagttttttttctgagagaagatcctacttcagtgaattgtgggtcataatgtttgagaggcaataattatgctgaatgaaagaagttagacggaaaaaaaaggtgcgtgctgtatgattcccgtatataaaactttagcatgtgcaaacttatctgtactgaaagtagatctgtagttgataagggacgtgatggagagggacgagatgaagggattatgaaggggggggaggaaacttagaggtgaatacgttcatttgattatggtgatttcatgggtgcacaggtatgtcaaaacttatcaaattggacatttaaatacgtgcagtttgtcatgtcaattattttaaaataaagtcgtttttaaaaaagagataagacagtcagatccctgagggtcagattgaggaactctcgaagacttcaggagcagaaagatgttaaagcagttttaagaaaattaaactgattgtggtcttcccagtagataaggaataacatttagtaaaccattgctaatagccaaaccttggcatgtgtgacagcaaaataaatggaaaggtggataggtacatattacatcaagggaacaacccagtttttggtgcagaaggtgtggtgtatgcgtgtatgtgggtgagtatctctggagggaaaaagacagtcccatagttaaacaaagaagaatatttaccggcagcaacaggagaggctagagaaagaacatgattggggtaaaaagatgattctgcattttggacgaggagagagtaacatttaaagcctctactcgctctgaagcacacagagtgtgttgcgacactcgagtttgctggagcgagtcggcacaggccaggcctagttagcggaatgagcccacacagcaactccagactggatccgcaagccttgaaccttaaccctcaacctccgattccccaagttccactctcgtagctgaggctgaagtttgtctaagtcccgcctaggtacccaacggagatacggcgtgaacaccccaccactttctgggaacccagaggcggtcggcgtggcggcgcgaacctgcccagcgcgtgcgcgcggcgcgcagggaggcggcctggaatcgagggagcgcgcgcccttcacgtgacccgacccgcgggcggcgacgcacgcgccgcgccgcgccgctcacgtggtccgtccccagccccgtcgccggcggaggcgggcgcgggcgcgtccctgtggccagtcacccggaggagttggtcgcacaattatgaaagactcggcttctgctgctagcgccggagctgagttagttctgagaaggtttccctgggcgttccttgtccggcggcctctgctgccgcctccggagacgcttcccgatagatggctacaggccgcggaggaggaggaggtggagttgctgcccttccggagtccgccccgtgaggagaatggtactggacccacgcaggcccgggcggggaatggttctggggttgcgggcggtaaaggagagacttggcaggcaagtgtgtggggagccgcgttccatgcggcgaaggaccctcgaattgccttgaggcttccggatttgtcctctcgggacgggtgtgcagttcgttctggggtgaggggcgggagcaggtagcaagttagaggcgacacctcttcgcgggaatcccctgagccgagactcggctcccagcgagggcctctccaggcggcagaggcgcgagcccgggactacctggctgggctcagctgagcggcctcagcgcgcccgacgcagggctcagcctacaagctccgcatctcctgggagcacggtcctcctggcgccagttgctggcagataagggaaccaaatgctctgctcaagttttacatggaaaaaagggagggagggctagaagggtgcaaaaagggggtagaggacacgggtttggagcagtgccttgtttgctgtgcagcggatactctacaggtacatttcctttttggaaccaaaagggagggatttgacaatattgatggtagatcttttttctttagcaagaattaaggattttggtgggtggggggaggcttctgtggggaccaagacaatgtactgtcagtcaggatttaagtcgaactaccgcatcccttgccccagagaacagttgatcgtgttttaaaccgaaaggtgcggaatggagagagggaggcggtgcattgcagcttccgatagagctttttatttttggatatcaggaaccaattttgaagatttcttaagaaagtcat

SEQ ID NO: 6763 - DNA, 6000 bp, Homo sapiens
ctctctctctctctctctctccccctgcctccctccctccctccctctctctctttctttctttctttcttttttttttccagcttctttatcaggaagcctcaggacagaaaacctgagggcatggtgctgattccagtattctttcttggaggccttgtctccaggtcaggactcccagcaggaagtctatatgtccctgatccctgtccagccctacagagcagacctgccttggggcagagcagaagtgcaggactgtatctacactgagcaaaaagatgaagtggcatgtatgtatggataccacttgccaccacccccagccttctcagagggttttgagcacagggtcaacgatgtggccctctgagttagcagctgcctatatagcaggggtgtccaatcttttggcttccctgggccacactggaggaagaagaattgtcttgggccacacataaaatatactaacattaacaatagctgatgagctaaaaaaatcgcaaaaaaatctcataatgttttaagaaagtttacaagtttgtgttgggctgcattcaaagctgtcctgggctgcatgtggtctgtgggctgcgggttgaacaagcttgctgtagagcttggggccacagcaaggtcctgtcccagagagaaggaagtctgccttctggagacccagccagggcttgtcagggatggagagttcaaaggaaggaatcttgtataaaacatccctttcatcccaacagaaagttttaagatgatatgacctaaattggattccaaaggccaggagccttcctctccattgggtaatgcaggtttcattccatcatttcatcattcagtgtttactgagaacttactacaaatgagatgctatgctaggtgcattcattttctcatgtagtcttagcaataacttttgaggtgcatatcattaaacccattttacacacgaggaagatcgaggcatacacaggcagtaactgacagagaagtacttaattctccagcttttgtttttcagtttcatgctctattgtttacaacaggggttcccagacttttggaacttatagatcaataacatttcaaaaatgatttttcggaacaaacacagaacccagtgccaactttttatttagccaacgacattgaaaaaacagcatcttccagcaccatgatttcataaaagggcattttaacacagagaatgtagcaaggatataaccttagaataaagacagccttctaagaaaggacagttggcaaccttaacctaaaatatcctacattgttctgtgtgtgtgtgtgtgtgtgtgtgtgtgtgtgtgtgtgtgtgtgtgtgtgtgttttcatctcatttcaagcagaactggccaaaactttggcattgcaggctgtgggagccactgccctaccccagagctgcctctccaagcaagaacaatgccctctgcccataagcaaataagcttccagaatttcccatccccctctgcccatctaggtcccccacaaataaggtctgaggttgatttatacaatcagctacattctccacttctactcccagcaggtcttctaactttcactgatattcagtgtccgttccagggaaggaaacccatcctccccagtccccttctctcttagactcagatgttttctacatttgcattccaggaatatccaggcccgctgcagcactgcagcagcccatttgtctccaaagtcccctagtcccccacccatggtgagagcagcaggtcttctccatatatttcagtcctgagacagggccttccccttgctggggtccccagggcctggctaccatgttatcaaaggaaccagagcagaccccaggccttctaggcagtgctggaaaggagagggtgtgagacccaggtggagcaatggggagattacagaatgtgggagtcctatttattctctccccattctttaccttctctctccttctccttcctccatctgtgcctgccccctaccccacctgcatgagcagatgggcagtagagcacagcctgccctgtggagcccttgaattctagcttcaccattttcttgctatggggcatttggcaagcctcttgacctctctgtgctttagttctcttgcctgcaaatgggagtaagaatgtcaggttgactcacgtgaaattgccaaaatttgacaatattgggctcacaaaaatcaaaatttcatgtggtttaacaacaaaaaggtgtaaactgtaaagtgttagatatatgtctctcatcaagtctggccccctcctccaggaaaccctccctagctactccaaggccagcaatagctccctctgaaatctctcatggttggggacatgatttaatatacatttctttcctgtcttcagttttcctgctctattttcatgccctattcctgagaatgagtctagcttcctcacaacttgaagcccatcaagggcaagacctggggctgctcctcctctgtcccctggactgttggcacaccaccagtgtcctccattagggtttccacataaaggaggcaggagaagccagatctcatcagggtttatcaagggcctgatttatctaatagtcattgctgcacctaaagttggtcctagatggtcgtgaatgggtgccactaatgaaattgagggcgagtgaggtgctggtagggtggaattaagagatcctgacccctggccggcctgtggcagcagtatcccaggaagcagaattttggtcttatcctccatctcctccaagcatcccctccaatgccattagctaacttctagggtccctcactcatttgtagagttgaaacttattaatctgctttctgtccacccttgtgttggtggagaggtccctgagataaggtggacctgctccaccctcagggcacagactgcactgtgtaatcagtgctcagggtcacaggagctaatgggccatgggaaccaaaggcagggacatgaccaaggttttggtgattaggaaagggttcccagaggaggagatgtctctaccataggtcatggggaagcctatatgggctgacttcctgagcggggttaaggcagactaactcccagctagacaaagaagctcaaagaagtgtgttaaatggaggtcttccctcctgtggctggtagaccagggcaggctgggctcacagctctttaagaacacttcttctcaaggagacccaaggacactcagggattaggcttccagcatctgtgcagagaactgtcagctcagagctgctcaaaagtaaaaatgccagctaccagtgatgtcatcaccctagtcattcctctcactgtgggaggtcctgtggtccagtgggtagagcagaagagcccctgctaggctgcccgccccgcatcctgctctccaaattcctactctggatggaggaggcgaaagtggtcacattgggctaagaatgagagtaaaaaaatcatttgaagaaaaacttgatgttattcctcagagagatggcagagccaggggacctttttgcctccctcctgtgagactttgctgtgtgtccgctccagcattaacctcggctccagccttctctggacaactcccctccccttaatgcccaatctgtccccctatccatttctgagctaatctggggtatcaggctgtccatggtgttggagggggtagggctataccttaggctgagctagtgaaatctgtccataagcccggacactgtacactgggagagactgggagagaggacacacagttggatccttggcgggggttggggggaagggggctgggctgcagactggaagggagtgggggctgtgcagctgcttgggggtgcaggtaggggactgggtggaacaggaactcacccagcgtgggtccacatagtaggtgtcataatgtggatgggaacacagggagaaggggctccaaagccagttccagagtgctggggcgtccgaggaaccggcccaaccgctccccgctgcagccggcttgtccctttctcggaactaccgagggagaggcgcgtgcggaggtcggcgttcggatctcgcatccgtcactgttgccggcgcatttcctcgaagtcttacctcgaagggctgggtcccacccgcgcgccctgtgcgtgtctccctgtttccccacgccctccttgcctggctgctgcgaggctttgcaggggaaagactggcgcggggttcgcaccctgcccatgtcacaggaaaaccgtgggagcctccccgacgcggcgcatttccggaagccccctctccaggagggttgcgggaaggccgggactctgcatccagacgaacccggtcgcctcccaagaggaaagtcggagacccagctgaggggcaaaaatgccagggaaaggcgagcccagagcttggtgatggagaaattgggaagccaccccccacccttcaatcttaggatggggaattcgcaactgaagccggagcttcagacttggggcgcactcccagcttagcccaggaaagagatttaagggcgcagcagtgtggatacctctcaccccggccccgaaggtctagcgagggtctaacctgggccccttgccaggcccgccccccgcccctttccagcccccggcccgtgcgccgctgcccctttaagaagcccaggtaggcaggcccggctgctggagccgctcctatggcaacccgcgagctgcggcggcttcatgaatattccggggcgcgggagcccgagcgctgccggagggcgcttcgggggaggcggccgctgatgtaagcccggcgggtcgctgggctccgctcggttgcggcgggagccccgggacgggccggacgggccggggcagaggaggcgaggcgagctcgcgggtggccagccacaaagcccgggcggcgagacagacggacagccagccctcccgcgggacgcacgcccgggacccgcgcgggccgtgcgctctgcactccggagcggttccctgagcgccgcggccgcagagcctctccggccggcgcccattgttccccgcgggggcggggcgcctggagccgggcggcgcgccgcgcccctgaacgccagagggagggagggaggcaagaagggagcgcggggtccccgcgcccagccgggcccgggaggaggtgtagcgcggcgagcccggggactcggagcgggactaggatcctccccgcggcgcgcagcctgcccaagcatgggcgcctgaggctgcccccacgccggcggcaaaggacgcgtccccacgggcggactgaccggcgggcggacctggagcccgtccgcggcgccgcgctcctgcccccggcccggtccgaccccggcccctggcgccatggacaagctgccgccgtccatgcgcaagcggctctacagcctcccgcagcaggtgggggccaaggcgtggatcatggacgaggaagaggacgccgaggaggagggggccgggggccgccaagaccccagccgcaggagcatccggctgcggccactgccctcgccctccccctcggcggccgcgggtggcacggagtcccggagctcggccctcggggcagcggacagcgaagggccggcccgcggcgcgggcaagtccagcacgaacggcgactgcaggcgcttccgcgggagcctggcctcgctgggcagccggggcggcggcagcggcggcacggggagcggcagcagtcacggacacctgcatgactccgcggaggagcggcggctcatcgccgagggcgacgcgtcccccggcgaggacaggacgcccccaggcctggcggccgagcccgagcgccccggcgcctcggcgcagcccgcagcctcgccgccgccgccccagcagccaccgcagccggcctccgcctcctgcgagcagccctcggtggacaccgctatcaaagtggagggaggcgcggctgc

SEQ ID NO: 6764 - DNA, 6000 bp, Homo sapiens
ggtgggagccacctagttctttctttagctagaaccagctcaggcagtgagtttggggtaaaaatgagaagttggggctttgagatcctcaggccctatctcctatgtataaccagattttgttttcaaatcataatatgtagtattaacaagccctcacattcctagcttttctgtacagcccaagttcccagtgcccctccaacgctgtgggggacaggcaggggtggaggtggagaacagccagagaggctcagagctgcccagctgggaggccagcctgggactcagaacttgcccccctagtatgcagttccacgcctgtggcctgtggagtccctggccagagagtaagggcctgactcggggaaaggagggaccccagtacttggcacctgtgaccaactcctctgtctgcctgcaggtcgttgaggactggaagtacgtggctatggtggtggaccggctgttcctgtgggtgttcatgtttgtgtgcgtcctgggcactgtggggctcttcctaccgcccctcttccagacccatgcagcttctgaggggccctacgctgcccagcgtgactgagggccccctgggttgtggggtgagaggatgtgagtggccgggtgggcactttgctgcttctttctgggttgtggctgatgaggccctaagtaaatatgtgagcattggccatcaaccccatcaaaccagccacagccgtggaacaggcaaggatgggggcctgggctgtcctctctgaatgccttggagggatcccaggaagccccagtaggagggagcttcagacagttcaattctggcctgtcttccttccctgcaccgggcaatggggataaagatgacttcgtagcagcacctactatgcttcaggcatggtgccggcctgcctctccatcaccatctctctccacttccccttgtccagttcctcacacacttctagattcttcccagctcagaggcttggcatttgccatatcatcatctttttttttttcttttaaacggagtcttgctatatcgcccaggctcaagtgattctcctgcctcaacctcccaagtagctgggattacagaaagccgccaccgtgcccagctaatttttgtatttttgttggccaggctgatttcgaactcctgacctcaaatgacccacctgcctcggcctcccaaagtgctaggattacaagtgtgagccactatgcctggccttccctatcttctacctgaaccttcttcctcttcccccagggcttcccaagctctttccacagccacatcagtcagggcatggctccaatccattctttgctccaatgtcacctcctctgagaggccttccctaaccacccaatcattctaaagcagcctccctacagtcacgttaccctgcctccttcctcgagcactcctgtgtacctgtcgctcttatctggtggcatgtatgtcatccacagctcacccactagagtgtgagctccatgagaacagggacctgctccttcacattcgtggtagtatccccagggcctaggacagagcttggcacacagtaggtgctcaataaatgtttgttgaatgaatgaatggctcctacccctccttcaagtccagatgcccctcctctgagcagccatccctagttcccccatctgaaaggcatgacctgctcctccatgactgcggtgctggtcactttccacttctctctcatggctgggttcaggtctgtctcccacacggatgctctgattcactcctcgcacatactgccttttgcacagtgcctggcatgtagtaggcactcaaaatatttgtggaatggaggaggatgttctaaaaaattctgttttaaaaattattatacaataaaattgacttttaaatatatagttctaggaattttaacacatgtatagattggtataaccaccatcacaatcaggacccaggaaagatctgtcacgcaaaacaactccgtcctgctattcctttagagtcctgactccctgcactcctagcccctggcaaccacatatcttttctccttcactacagtcgggtcttttcaagaatgccatttaaatggaatcatacagtagtgacctttggagactggcttctttaattcagcatagtgccttcgagattcaatcaagttgggtttttttcgtattgctgaggagtgttcagtggtatgatgttgacgcacatttaggctgtttccagtttttggcaattatgaatagagctaatataaagattcacatataggattgtgtatgaataaaagttttcatttatttaaacactcaggagggtgattgctaggttatatggtaagtgtatatttaactttatatgaaactgttgaggccgggcatggtggctcacacctgtaaccccaacactttgggaggccaaggcggcagatcacctaaggtcaggagttcaagaccagcttggccaatatggtaaaaccctgtctctactaaaaatacaaaaattagccaggtgtggtagtgtgtacctgtaatcccagctactcgggaggttgaggcaggagaattgcttgaacctgggaggcagaggttgcagtgagccgagatcgtgccactgcactccagcctgggtgacagagcgagactctgtcaaaaaaaaaaaagaacaaaagaaagagaaagaaactgtcaaactgttttctggagtggctataccattttgcaatcccaccaaagtatgagagatccagttgttcagcaactggattccaccctggttttaatttgcgtgtccctgatggctagtgatttgaacatcttccacgtgcttttttttttttttttgtcttctgtatacctctttggtgaagagtctgtttaactcttttgctcatttaaaaaattgttcgttttcttaccattgagactttctttagaaaacaactttattgaggtataatttacataccataaaatccacccatttgaagtacaattcaaagagttgtcgtaagcttaccaccagaatccagttttagaacatctgcatcaccccagtaagacccctcatatgcatctacacttagtgttgagttttgagagttccttatacattctggatacaagtcctttgttggatatataacttacagtattgtcccaatgggggacatttgccaagagttgagaatgctgtaattggaggcctgagaggtgggtcccaattcttacattttccattccacaaactgtctccttttgtttggttttaatatgggtaaacagcacattctggaaatgataaaggtgactctccatttgctgaatgccaggaggagagtttatgacagaacttcctcctgcaataaaaggatgtcaaagaagccaacatcaaggtgccccccatccctggtgggtggtcagagagggcaggaggctccagggcaccctgcctggccaatcagtgcacattcttggggttgcagatggtggcggggaaggggacaggttctgcaggggactagggtgggaaccccattgccctctcagattgctccatcagaagagcagatgaggctgcacacagtggctcacgcctgtaatcccagcactttgggatgggaggtgaactaccgtcacagctgtagttcatttgcttgatacaccgcttcctttcaacccccacatcctcaccacctgtttctttgatcaccaataaatagcgtgggctcccacagctgggggccttcgtagcctccatacgttggccgcctggtcccgctttctctcttgtcttttctcattcttttgactccgcctgactttgtcacccccatggcctggggttgggtctgatcaccccaaaaaatttttcattaaggaacaatccaaacgtattccaaagttaagagaacagtataacaaacctccaggtaccatcatcctgcctcgacaattatcaactcatagccaatattgtttcaactaacttccacccacccctaagctataaggacttaaaaaaaaaataccagtactatatctaagtttttttgttttgttttgttttgttttgagatgaagtctcactctgtcacccaggctggagtgcagtggcgcaatctcggctcactgcaggctctgcctcccgggttcacgccattctcctgcctcagcctcccgagtagctgggactacaggtgcctgccaccacgccgggctaatttgtagagtatttttagtagagacgaggtttcaccatgttagccaggatggtctctgacctcgtgatccgcccgccttggcctcccaaagtgctggctgggattacaggcgtgagccactgctcccggctaaaatatttaacaattatttaatagcatgagatacacaaggcgtccttcccagggtgtgttagcgtctctcctacggcgcccgcctagcccggtggtcccaaccccctgcgggagctgcacacgccccggaaacctgggacagaaactgagtccctctccttcctggtggtggtgacagcacctgctcagatctggtcggacgccgccggccggagcacccagcccggcggagaaggagctcgcccggcgctggggactgggacctggagccccttcccctaccgcacgtacgccccgccccgcgcacgcccgcccgcccgcccgcgcctggcgcagcttcactccggatggttcctgtcctcccgcgggtccgagggcgctggaaacccagcggcggcgaagcggagaggagccccgcgcgtctccgcccgcacggctccaggtctggggtctgcgctggagccgcgcggggagaggccgtctctgcgaccgccgcgcccgctcccgaccgtccgggtccgcggccagcccggccaccagccatgggctctggcccgctctcgctgcccctggcgctgtcgccgccgcggctgctgctgctgctgctgctgtctctgctgccaggtacgcgcacaggcgttagggctccggagggacgggcgcccgagaaggggcgcggggtccggaggggctgccggcgagaacaccgcgcgggcgagcggagagggctggcgccgtcgccggggactcggaacccgcgcagactggctccagcccggcggcgacttgggtggggtggctttttccctttcggctcacctcccacccctagccaccaccaaacctgggagtcactgagcgggcgctggtacgcgccgggtgatggggaggtcgagaccgggtccttcgtcttgggcgcaggagttggggattcgcgtccccgcgctgcccgtcgccctgccccgcgcactggctcccaaactggcgcgcccaagcctcccgctccaccgtctgcatcccgcccacctcctcatttgacggagatggctgaagacttggccaaggccacctcgggaagaggggagtcgcttcgggactggggctggagctggagcgccagcctctcctccggttgtagcctcctagcgctcctggctgcgtcgctgagggaccctccaccgggagagcgcctcctgtcttcctcccgctctccagaggagcctgctgggggaagccggccctggcccgccgctgggaggctcttgggtgcctgggagggctggtgggtagcgagagtcggggaccgggcaaggctgcagggaattcctggagggcccaggccggcggtctgtcgtgcggctgtgagctcagagcgctttccgccctcggtgccgaggcctgcactactcagaacgccatacgctctcaaccgacctcctgcctgggacccttctttcatcctggggaaggagagtggggagcaggaaaaatcctatttcaagacctgaggaagttggattcaacttcctagaggattctcctcccgcttccccaagctgcccccagatctgtacgtgggaatcagaagacagctgacccggtatgcctcacttgtgctggg

SEQ ID NO: 6765 - DNA, 6000 bp, Homo sapiens
tggatcttttgctgggctcccgttctcttccagtggtcaatttgtacatccccctcaacatttaactgtcctgattcctatgacattatcgtatgtacacaaatcttaaaccttccattactcactgacctctatgtcattcattttttttttttttttgagacggtctcactctgtcgcccaggctggagtgcagtggcacaatcttggctcactgcaatctctgcctcccaggttcaagtgattctcctgcctcagcctcccaagtagctgggactacaggtgtgcgccaccatacccagctaatttttttatatttttagtagagaaagggtttcaccatgttggccaggatagtttcaatctcttgacctcattatccacccgccccagcctcccaaagtgctgggattacaggggtaagccaccgtgcccggcctatgtcattcttattctttaaaaatatattcatttgggttctgcttgaaggagagcctgagtcaaggatttgggtgcatgcatttttttagaagatgattccaggaagcaaggtaagagggtgagaagtgagatagggaagggaagaaagtcaatagatggtacattaatgagcaggttgccacaaaaggtaactggggctcaatctcactgggcccttcagttattccagctgaggggtggtgaagctgtggtatttatccaccaactccctttcttcatggctgttttaaaatgcactcaagattttcattagatatggcaagacacacagatatggaaatgactgtcctgaagtagagttttttatactcagaggtccctagaaacaagagacatggcatgccaggcagggatacatggggaggcaccagggttggtcaataagtaaagggagctggggggaaatgtgggcaagagctttatttgtggcatccaagagaaaggcaagtcaagccagggtaagcaggcacaggattagctattaatagtttaaataatttcacttggctccagagcatagggctgtccctggttgtctggttcatggccctgggatgactagggtagacggacaatggcccagtataacagtctgatgaaggaggtggctgggggtgtgggcttcggattggctggtttgcgtatggaaggtgcatttgcaggtgagtcccttactgtctcggggaattggctagccctgggaggaacagtctctccaggatcagcaaggcctcagctgtcaaaacatcaggaaattcaggaaatgaaaaggcatgatgaatacactgagggtgctcttaaaagcatcagctccctggcatatatgtggttggcaatgccaaggggtatggagagggcaccagcggtgtctgcacactgttcttggcccctcaattactacatgaattttagaatcagcctgtcaagttcacaaaaaaatctattgggatttgtttgagaattgcttgaatttatagattaatttggtgagaagtaatatgtttatagtattgagtcctcccattcataatatatatggtctatatttcaatttagtcagctcttcctgagtatttttgtatttgtcttaggccttttgtagtgctataacaaaataccagagactgggtaatttacaaacaacagaagtttattttctcagttctggaggttgggaagtccaagatcaaggcaccagcaggtacagtgtctagtgagggcctggtatctgcttccaagatggtgccttgaatgctggctcctctggaggggacaaatgctatgttctcatgcagcagaaggaacagataaaccccccacacaagcccttttataagacactaatgtcatctatgaggacttgccattatgacttaatcactccttaaaggccctacctcttaatattatcttggcaattaaattttaacaaatgtgttttggaagacagattcagaccatagcaacactcttcatgaaaggccttacgtatattttgctagatatattctaaggtttttgttactattgtgaatagaatcttttttttttttgagacagagtctcgctctgtcacccaggctggagtgcagtggtgcaatctccgctcactgcaagctctgcctcctgggttcacaccattctcctgcctcagcctcccaagtagctggaactacaggtacccgccaccatgcccagctaattttttttttttttttttttgtatttttagtagagacgaggtttcaccgtgttagccaggatggtctcgatctcctgacatcgtgatccgcccgcctcagcctcccaaaggcctgggattataggcgtgagccaccgtgcccggcctagaatctctttttctatttcattttctaatttgttattactgatgtataggaatgctaataggttttttcttttttaaagatgatcttgaattcaaccttgctaactcttactagtcttaacaatttatctgtatattcttttggattttctgcatagacaatcatacctgcctgcaaatacaggtagttttttctttccaattttaaaattttatttccttcatttctattataggttgaatcacatacatttctgatgttgggcatctcataatcttaaaaaaatggcaatttcatatgtattaacctaacacattgcctaggacctccagtgccatgttcaaaagaaacagtgatagaaagcacccttgtttacgtcctaactttgatggaaattgcttctaaagttttaccattaattatgataattgctacacattaagaaagatagggccaggcatggtgttgcatgcctgtaatcccagcactttggaaggctgagatgggaagatcgcttgggcctgggaggtgaaggttgcagtgagccaagatcccaccactccactcaggcctgggcaacagtgaaaccctgtctcaaaaaaaaaacctaacttgctaatagtgaattatctgatgttgactctgcccttacgttattgtaatgaaacctaattcatcatgatgcattgtttgtgtgtgtgtacattgctgtattcaacttggtattatttaaaattttggaatccatgttcataaaagttaatagctaacatttatttggttttctaggttctgggtattgttaagttactttacatgaattatttcattttatcctaaaaggcttattgtgaaggttattttccccctttatatatgaggaagttaaggcacactgaaggcaaatcattttgcctaaggtcacagagaagattagtggcaccagaatacaaatccggatgcctggctccagaagcaatgcactggccactgctctgtgctgtctctctgtgacaaagacccataattcagattgttctataatgtgttttccttgtacatccttgttctagttttgtaccaagattatattattctcaatagataattagctcttctttttatttaaagaaaatacatgtcaaagctctataaaaacctatttcatcgtatcccctttgctagcctaacttttacagctctgcagtggcctccaggttttatgtcctttccaagctcctgtcctgggtatattggggatgtacacatccgataaagccagggatacagaccacggatcagcagcaggcctcccgctcccagcatcctttcaagtactggcatacacccaagctcccagcttctagccaagagtcttttggtccccgcttatcccaaaggacctgccactgtctttggtttccaaagcccaacaggctccaggctcttcagcctccaaccactttgcatttcttttctggttttggttcatggagatgattatcctattttccagccttgccatgtctttatttactttacatatcttacctattactgctgcagtttggagaagagaggatgccctcaatcctaacttctccaaagcatcccaaaggggaagtccgcttcacttcaacagtgttgttgttgttgcttttaaagaccatatgtcaacatgtcagattatagcaaaatgacgtggggggagcaatatgaaagcaagactgagagtcctggagataaggtggcaaagctgcctttttacaggcggttcccttagaccccgcccttcctgtcttgttcctccagttgtcagatttgcctgttagggcccacacaagggagcaggtatgaggaccggactgagagagttggagaagctgccagaggcccttctagatccagaattgaggctgcagttcccgaggtgggggctgtccccccacccgcaagggaatggtactgattccaaaaacgcgtcaaggacaccctggctagtagagggatgtgcttgaatcacctgagcggcctctgttcagcccagattggaaggcccatgggggaggacgaggccagcccactccagccccattcccttttaactctgctccttccccagcccccaagctgggtgaggggccctgagctattcaccctcccagattccactcacttttcctaagtgtcctccctgcaaagtctgcagagagcagcgctccctcgcgtcggctcacccagcagtgtcctttctttcagcaaaccccatgcgaatgaacctgagatgactcatttgcctaaaagcgtcttcgaggtgagggaaggcaaagcccaaggacctccccgctcaagcacatgctctttccccaacagtagagggatcctgcgctagcgtccgccgccctcgagggctcagtctccccagctgtaccaagggtgcccgcactgtcctgcctgccttccttgggggaaggttgcgaggcccgaagagatagggaagccaggcggcaggtggggtccagaccacccagggggcgtcggggcggagcagcgggcccagtacatccctgagtgggcggggctcggcggggctctccgcggggtcctagtgagcgccgccccgccagcaaacctcgggggccaggaccggcgctcactcgaccgcgcggctcacgggtgccctgtgaccccacagcggagctcgcggcggctgccacccggccccgccggccatgaggcgcgcgccttccctggtccttttcttcctggtcgccctttgcgggcgcggtgagttcttttcggggaaggagggaggggcgcctgggttgggctgaaaggggctggactggccacaggtgggagggaagggagggtgccctgcgcccgggggagtggcccgagattgtcccggccagatgggggcgtgggcagggctgagcccactcgctgaggcagcgggggcgggcctgcgtgggtgggtctgccaggtttggagtgggggccgcctcttctcggagccgctgccagggccagggccaccctccagggcgagtgtctgtgggctgggcagtgggctggatgacaccggctttgcaggcaccgcgggtcatccccagcagtctgggaggctgggagtataccgactcccgctcccaacagggccgaggctccttccttgcctaagaggtgactttcttgaagcgtgggtgcagaggagccggccacctgggcggtgtaggcgcttgggagcgaatctgctgctcagccttagagagaagtcccctcccacacagcggtggtagagatggggacactgggccgagaaggaagggggcttgcccaaatcagcagccctggaatgttttgtgctttgggggtggatctcccagcaaacacattttatggcaccgctgcctctggtcacccacccgaggtgtgccgggcctggacagccagcttgactgagggccaggctggtgaagttgggcctgccactcaggaaggagacccagcccttctccaggtagaatgcaaatgtgaggactgccttctcagggcctcagtttccccacctgaattccaagggcccttctagctcctacagtcacccaggcttttcctccaagccccagtcagcctagaggaccag

SEQ ID NO: 6766 - DNA, 6000 bp, Homo sapiens
aaaattaaaggcgcaataagataccactttactcctgcaggaatagcccttattaaaaagtcagcaaacaacagatgttggcaagaatgtgatgaaaagggagtccttatacactgttggtaggaatgtgaattagtacaagctctacagaaaacaggacaaaggtttctccaagaactaaaagtagatctaccattcgatccagcaactccatactgtgtatctatctaaaggaaaagaagtcactaaatcaaaaagacctgtatatatatgtttatcacagcacaattcacaattgcaaacatatggaatcaacttaagtgcccatcaactgagtggataaagaaaatttggtgcatatatataccatggaatactgcttatccataaaaaaggataaaataacatcacttgcagcagcttggatggaactggggggccattatcctaagtaagtaactcagaaacagataaccaaatactgcatgttctcactgataagtgggagcgaagctgtgggtatgcagggacatccagagtaatgaatgctggagacttagaagggagaaggatgggagggaggtgaaagattacctactggatgaaaagttacctactgggcacaatgtacactatttgggtgatagatgcactagaagcctcgacttcaccactgtccaattcatctatgtaaccaaaaacaacttgtgtccttaaatctactgaatgtttttttaaaaagaaaggacatgtcaacaagagttggcaccttcatattctacattcacaaactaaaaaccaaaaaaaaaagaaattgattgttaaagtaaaatataagtcactgaatgcagaagtcatatgtgtgataacaggagtgaataggacaggaagaaaaaaagaagtatattattgtaagttgcatgcactacactgtacatgaaatggtattatgttaattaaagttagactgtaggccgggcatggtggctcgcgcctgtaatcccaacactttgggaggccgaggtgggaggatcccttgaacccaggagttcaagacaagcctgggcaacatagtgagacttggtctctactaaaaattcaaaaattagctgggtgtgatggtgcatgcccatagttccaactagttgagaggttaagatgggaggatcacttgagaacaggagttcgaggttgcagtgagctgagattttaccactacattccaatctgggcaagagagcaagactctgtcgcaaaaaaaaaaaaaaaaaaaaagaaaagaaaagagaaaaaagataggttatgatgagttaaagatgcctgctgtaaaccctagagccatcacaaaataaaatgaaatatggcaaaatagagatatgataaataaaacactaaagaagataaaatagatacaatgaaattagaaaaaaatttagtatcattttaaaagccccatatgcctctattttcctagttacataaaggaggcaaagtgtgaaaaagaatagaccatgttcttctaaggacccatgtcaggtgtcagtagaatggaggtgatgcaggagggtgggaacggatgccccatgtttttaaagctgtggggtgtcttctctttttatttttttaaatccagaaatgtagatctgttcattcatccattcattgatgtaaaatctggtttctgaggtgttcagcttgatgactgatacatgtatacttcaccaccacaatcacatgcactcacatttccatcacctcgcagagctgccctcttttgtgtgtgtgatgagaacccataagatctaccctcttagcaagtgtgaagtatatatcgcagtgttgttagctgtagtcacaatgttgtatagtagatccccagaacttattcatcttgcataactgaaattttgtaccctttgacccacatctccccgtctctccttctcccagcccgtggcaaccactatatacccagtaaccccctttctggggatatagtcaaaggaaataaaatcagtatctgaaagagagatctgaactgtcatgttcattttggcattttttacaatagccaaataatggaacaacctaagcatctgccaatggataaatgaataaagaaactgtgagatacgtacacacacacacgcacacacacacacacacacacgtatatgtataacatacatatacgacagtatattatttagccctaacaaagaaggaaatcctgccatttttgaccacatggatgaacctggagaacatgcttggtgaaataagccaagcacagaaagacaaatagcacatgatctcacttataccatggcactgtgttcatgtctcagccacatttaccacacccaaccacgcaaacacagccactgtctcagttcctgcccctgaccggggtacagggtgggtgctctgtgaacacgtgttctactcatggcccagcttccccaccttcagctattttaggctctgacactggaaatgaaattcttatgaagcccgggccaaggctgaggttgtgtggaactagggtgccctctactgtcttccacaacgatcacgacattgcttaatttcattcaatgaagagaaaatgctaatgaaacaaatgggaattcaacggatagcctattatttctcagcacaaatacagaattctatagtaaaacaaaaatcattgaaatggtagtaagcactcttctagcaatgtgagtttctgtaaggttctgatgggccttacgatttcactgtcccctcagggcagtccatctaaagtgaggctatgttatgttacataaacactaggaggagagagagtggcataccgtttcattacagggaagagaaaagaatttaagcaacatgctgaaatacaatgttaaagaatgactctaacttaaaatgatttttatatattcaataatatgtgttgtgtggacataaagctgatagaaagtgtaccaaaaaaagtggaagttttaaacataatccatcaaaagaacatatttccttacagctgacatttcttttattattaagaattaatgtctataaccctcgctaatacaaaaatcatcccttgtttatatacatttatttttgcaaactcacaccgaatgactttgtgtgacaagctgtgaagtttaaaatttaccaattcttccaactctttgatttgcattatgctgtttaatcctgagagaagagcagctgtcgctggtattaggtgttagaattccaacacctaataggtgaaaattatattaggctgatcataaaaccatgttgttaactttttaaaatttaatgtctcccaaggaatttcaccctagtggtacatcttttgggaaattagaaaatgaagaaatgcatacgttcagtgatccattttagaattagaaaattcaaattagcatcttatttcattcatatttcctgaagaaccactggaaacagttatttaatagtgtggctaaatgtatattcagagaaacacttcctgtatatttgcacatttatgtatatttatgtcctattcctggaatagatttacaagttttgtttttcagaaaatttcagaatttctggaatgtgcagaagtattaacaggtaacttagatttggaatacactgtattagagataactggaaaaatgagaggcttcctacactggaaggtcaaagatctttcctggaggggagttaggaatttgcctttacttaccattattctgttaaaagagattatgaataatgcagtttcacaaaaggaatgggacaatggtgtaagtaaacctccccatcacgttttcagtggctttcctttgagtcttgaacgttttccactgggtgttatagtcgagagtcccccacctcctgaggaagcaagacctggcaaacccaagacgatgcgctcttacttgtgttgtttgaaggggccctgctgccgcgcagttgtcattaatgccaccctcacctcccaggaactgcaccactaggacggacgacacaccgacgtaatgaccatagtaagaccccatgtacgtggctaatgaggcagtgacccgacgtggctcggaagccctgctggggagatcccgccccgtcaccccagaggcgctctccgacctgcagcccccagggctcctggccctttcccgtttgccactgcggcttgttgtcaagaaatggaacttcagaaaacccccagatatacactgcgttaggtaaggatttcattctaatcgagtccaatgtgaccctggctttccctcccgtagttatgcattcctgtctatgagtgagatgaaaagaatgtccacaggccagcttctttcagaagcgcctaagagatgcgcatgtaaggggtgccatggagcacccgggaaggacccaggcctgggcagggaggcgttggggccggctctagggagcaaagctgtcggagtccaggcctctatcacccgactgctgacactgccctcccatccctgctctacaagcgggcggtggtgactacacgaggcgccgaagatgctgttgagggccctggagaaacttcagcagaacagggcctctccccttgcaggccgagccgggggccctgcgccctccccctccgcccagctcggccaagggcgcatttgctgagcgtctggcggcctctaccggagcacctctgcagagggccgatcctccagcccagagacgacatgtggcgctcgggcgaggtgagagcgggcgcgagtgcgccgggggcgctggggggctctgcggcgggcggcgcgcggcccggggcgcggcgcggagcggagctgcagggcggcggcgggagcgcggggcgcaagagccgctccgccgggagtgccggggaagttcgcgctggcagcatggggcggtgacgccgcaccggccttccgcgcctgccagccgggcgagagcaggcggaggagaaggaggatgcatcctcaccgacggctcgcctcccggggccggcgcgcagggtgagccctgggcgcgctgggccggggcagtggggtaagaggacgcgagcggggaagaggaccggccgccccggctcggtccgcacccttctcctcggggcgcctgagcggcaggctgcgtggccggggaggagaggtgcagagcaggcggggcgcgcagccaggccagagcgcaaactttaccctggcgactgcggggctgaagccgggcgcgggagagagcggggtccgggcggctcatccctgccggacggggcaccagggcgcggtgaccggttgggggtgggggacacccgttgccaccatcacgggagccggaggggtgagatcgcccacctggaaagccagcgtcagccccggggctctgaggcgcgcggcgtcccggcgctgctcgcggggtggactcggaccccgcgggggtgtcgcgcgcgtgtcgcgcgggctgctcgaggccaggggacttggagtcgctgctgcaccgcgcgctcccagcccaggaggaaggcgctgcctggcggagcgcttggctcgtacccggggcaggagcaggggaagtctgcgaaagccgggagcgagccggggagggccggggagctggagaccctcggcgtgccgctgcggaccgcgcgggtggcgaccgcgggtgccagggcgacccaggctgcggctccgcagtgcagcccccgcgcccacctgccctggcgcgccggccctggtgagcctctgtgggggtccggagggtcgtgggagcgcagcctctcctgggggtccctggctcggggctgaggggcggcgggaggcgccgcccgggtttcccgcatgcagcgccgcgtgctcgccgcctggctctggcccgggccccgcgacgagccccccggacgcgcccaggcgaccaccgcatggcaccctgcccttcttggcaggagtcgcagaaggccttcgcttccgaggtggaagtacctgttgtgtctcccaattccgg

SEQ ID NO: 6767 - DNA, 6000 bp, Homo sapiens
catgcctgtaatcccagcactttgggagggccgaggtggtggatcacggaggtcaagagatcaagaccatcctggccaatatgatgaaaccccgtctctattaaaaatacaaaaaaattagctgggtgtggtgatgtgcgcctgtagtcacagctactcgggaggctgaggcaggaggattgctcgaacccgggaggcagaggttgcagtgagccgggatcgcgccactgcactccagcctggtgacagagcgagactccgtctaatagaaaaaaaaaaaaaagaaatatcagaatggtgacaaaaataatggcaaggccacatttcatcaagggtatacaccagaactcatatattgccaatgcgtgatgaatataactgctttagaaatctctgtagtaatatttataatcatgaaacacatgccttccttgtgatctggacattctattttcagtcagataaccaagagaaatgaacacatatgtccatcaaaagacaagaatattcatgttagctttattcataacatcccaaagtttcaaacccaaaaatccattggcataggaacaaataaataacgtgtggtgtattcacacaatgaactatcatgcacagcagtaaaaagtaatgaatgactggtaatgtagcaataagggtacatctcacagacactgcactgagtgagagaagccggaggctaagtggataatactgcatgaccacatgtatgcgaggtgcaagactgggcaaaaccaggcttctgtggccaaagcctgaatagttggttacccagtgtcggcactgacttgaagatggcccagccactgggaattacataattatatatttgttatatataataatccagatgctatacatatgctattcatatacatatggtatacacatgcgaaatagttcactgagccatacttttaagatcggtgcatttttgttgtgtgtgcattatcccttgatagtaccgttttgattgacaagggaaaggcgctttttcaaaatataaaaccacgaaacatcatgtaacccagaagtacagttttgggagtgggagagatgtttctcaaagcagaacctggggcaaccacggagcagcggatgcgcgctgaagggcgcgtgggcagcggggtggttccgcggcctgcggggcgcagcgcgccaccgcgggatctgaaaggcgcttcctggcaacgctgctagggtcccgccgcccccgccgaggtgaagtccaacccgcagctgcgcgggcagcccaggtcttccccagaacctccggagccgaggacccagcgccaagccaggagcaaagcagcgcgccaggctggagctgttccgtcattaccgccacgtctgcgcttcggttgtgagaaccgattcgttaccctaacctcttaggactaagagccagtcttctggtggcgctcgctttcacttactttttatttccctttctattcccgcgagctagggggagaaagtgtaaatcccgcccgcttctccagggctgaaaatggagaggctgaggcggcttggagagtgcgcactgcgcatgctccgcagagcatccccgcaggtcaaccggggcaagggagagacatgaaagcctgtggcttctcctttgaagattctttttttttttttttttttttttttgagacggagtctcgctctgtcgcccaggctggactgcggactgcagtggcgcaatctcggctcactgcaagctccgcttcccgggttcacgccattctcctgcctcagcctcccgagtagctgggactacaggcgcccgccaccgcgcccggctaattttttgtatttttagtagagacggggtttcaccttgttagccaggatggtctcgatctcctgacctcatgatccacccgcctcggcctcccaaagtgctgggattacaggcgtgagccaccgcgcccggcccctttgaagattcttaaccttgcattttgctttcacacttaacgcctagaaagcttgctttgatttttccccaacctttcagctcatttagctttaaaaaacaaaatctcgttccaggaagaggggaggggctttccaagagaaaatgttcagacgtatcaagttgacctactcaatctaataaatgaagcgaagcattccaaaggccagaggggatcatcttgcattcattcataatagcacgttgaaatatgcaagaaaggaaaagaataaagaacacagggatgtaaaaacagtattgcgttttcttgttcactgattgaattgtaaaaaaaataataacaacaaacaaatctcaggacacttcttgtttactgatattttacaaaatcactcaagtaacagtctatttctattataaacaacttgtgagtattttaactcatgctcaaaaaataaataatatggtaagaagtccaaaactttcatcaactagcccaacaacaaatgtcagctgagcacctactcaggcagacagtatggtatagtgattaggaatgaaacattggagccagctgcctggcttttaacccccagtcctcacctactagctgtgtgatcctggggtaagcgacttaacttctctgtgctttttctctatatgcgaaacggaaataatgttgtgagagttaaaatgagttaatcaatgtaaagccttcctgtcggccctggcccctgttatgtgatcaatgtcagatggttatttttacttatgttcctattactgtgttaagaagggaaacacaaaagaattgtttctacttgcagcattcttgcagcacactcaggcgtggtggctcatgcctgtaatctcagcactttgggaggccgaggcgagcagattacttgaagtcaggagttgcagaagagcctggccaacatggtgaaaccccatctttactaaaaatacaaaaattagccaggcgtggtggtgggtgcctgtaatcccagctactcaggaggatgaggcacgagaatcacttgaacccgggaggtggagattgcagtgagtccagatgacactactgcactccagcctgggcgatagagtgagactcaagtctcttatgtggagacgacataagcaatgaaggaacaataaatcatcatctaactgatttttaaagtgctcagattttggtacagaaaattagagattagggcagagtatgataaaggctcatattcccctgaagcctaaaggagtggtacaggtgttggaagtggaagaatgcaggagcgtcagagtcttcatcaaagaggggaccttatagggcatgtgcacctaagtaggagggatgtgctgggcagaggaggatgagaatgccagaaagagtcctggaaaggcggggagctgggtgagttcagcacctcacagagacagaaaggtgatgccagggagatgacagctccattgttgaaaaacaatattgtcattaacaactgcactcccctccacttcatgcctatccagaaacaagggggaacacaccagaggaatacaggcccatgccaccatgcccagctaattctttactattttttgtagagacagggtttttgcacattgcctaggctggtctcgaactcctggggtcaagtgatccgcctgcctcggactcccaaagtgccggggttaccggcttgggccactgtgcctggccgaacaaagctatttgacaatattaaagaaacagttatcacacccttacataattctatgaatagcagttataaaacattttctaagaactttttgggggtgatagaaatgtaaaattcctagtggatttactacactgttgcgattgcaatacttacatggtgcaagactaactttctgaatgattatgacaaatgaaagcgtaaatgccattttcggtttttggaatatgaaaatacatggaatgaggcgcacctcatgcttccaccaaacggaacgtctttggcttcttgccttaggatctttctagctcctacctttaacatgcctttccacctctactgtttattgctatgtgttagtctctcttttctgtaagaaaggcataaatctggggtgcttttttcccaaatattcccgcagaaagccacctttccaagcacagaatcttatcagtgcctaggagttcagccgacttagcacgaagagtgcgatggaagggctgcttttggcaaaccgtctcaaccccgggcgacggcgggcacgggaggtcagggagcgctggaggaaacctgcactggggtagaaatggctggaggaaggcggaccgcgggctcgctctcatggtgccaaccccggggacctttcttcaggctccctgcgggatccccagcctcccctccccctcggagctccgcccccttcctggcctcaaactccgagtccattcaaacctcgccttcctcgccctgcgcgttgtcaggcgtgtaattggggaaactcctccccgccgggaccgcctcggaggcgctgccaggggacagccgcccagctgcccccacctcccagcacagcgcacacagccccggcctgggcacccgcgcccgctcgcggctccaggcggggtgggcggcgccgcgccagggggtccccggcgcccattgctcccgccgcccggttgcgcggaccggcgctagtgcgcgggtgggggcggcgcgccgcggtggcccggcgtcccgtgtgcgtccagtgtgcgccccgcgggggcgcggccagcgccagagtagatacctgtcccgcccgccgcggccagcagcctcggaggaagccagggcaaagagggccggcggagaccaggtccgcgccggaggaagccgcgcccggccgaggccccggaccctgcgccccgagctccacggcaccatggccccgaagctgctgctcctcctctgcctgttctcgggcttgcacgcgcggtaagtggcgcgggggccgcatccccggaggccccgagctgggcgacagggcggcggggggcgctgtctgctggagtccctggcgcgccagccgtcggctgggctgcggcacggcgggccgggaggggactgggaagtcggtctgcacctcacctgtcccagctcccttggacacggtcatctgctttttcctctgcagccgggagtgtggggactcagattaatgggctcgtctcctgacgcttttaggatctggtggttttaaggggttttgagaaccaggttcagggggcaggggccatttctggctccttaccgacccctaattcccacctcagctgtttcaggggctcacacacacacacactttggctgacattctctgtcatttccatcactctgaaatttccaagaacccgggaaccgtggttctaactgcctagtttagaccgggctggaaagagctaatgcattggaggcaggcgcggggggattggaaccaggtgggcagaagaaagccctgcttgtctgggaggactcccctcccaggtcctgcaaacacacacacacaccttccacatcagccactttcacacagaggaacacacgcactcccacccccataaagcacgcatgtcgaaatggataataaggcttctgcctggtaatgtaagaaatcatctcaccataaattccgcaaccttcctcccagtacaccaaccggctaatgggagcttagaatcactctagaagagatgaagagggcgcatgaggatacaaggacagtgggacccaaagggttaaatcctgttgctgtaaacacaactggagattctgggtttagtttctttaattctgtctctctggctggatttctggctagagcttgcagactgtcctgttatttgaaaattggagcagtgtctggcctttacctctttccccaccctaggaagctcagcgtgcccctatcccccaaaccctcttgttttgacgcttctccatttcctgggtctgggagctagagaatcagagggcatccttgcgtgcacaagcctg

SEQ ID NO: 6768 - DNA, 6000 bp, Homo sapiens
tgaatccctattcctaccatacttcatagcatacacaaaatttaattctagatgggtgacaaatatcaacatgaaaggtaagaccataaaactctaggaagacataggatgttaccttcacgaccttggggtagacaaagagatctaaagcacaacacaaaaaatgcaaactgtgattggaagcgttgataaattggactacactgagattaagaatatctattcaccaaaagataccattaagaaagttaaatgaagccagagttctaaaaattatgttcaatatcaatgtctgacaaaggactccttctgaatgaagaattaattcctacaaataaataagaaaaaggcagacaacacaatagaaaaatggacaaaaaaccctgaaaaatcagttcacaaaggatatccaaaataacaataaacacatgaaaagctgctccacttctttagtcatcagggaaatgcaaattaaaagccacattgagatcaaattacccataagccaaaaaaatctgaaattaagtcaaagacaagtggatgaattatgtgaggcaactagatcactcatacattgtgctgggagtgtaattagaacaaatattttgagagactgacaatatctaagaatagtatatatctagaaaaaactgtgctgttttggaaacagaaaagcacaatttgaagtaaatcatcggtcaaagaagaaatcacaaagaagttagaaaatattttgaactggaggttatgaatatagaacatatcaaaattaggaggaggcaactaaagtagtgtttagatggaaatttgcatatttaaatgcttacatttgaaatgaatctaaaatcagcaacctcagtttacacttcaagaagtttgtaaaaaatgagcaaattaaaccccaaataagtagaaggtaataagaaacacaagaatagaaatcactgaaatttcaaaaaaaaaattgagaaaaagcaaaaagttgtaccatgaaaagattagtaatatcgttaaaccttagtaagtgtaatcaagaacaaacaggagaaaacacaaattccttgaaacagtaatgaagaggaggtatcaccacatagcctatatatatacataaggtaataaaggcacataataaacaactttatgtcaataaatgcaataacttaaatgaaataaacacatttgtaaaaaaaaatacaatttagtaagcttttcccaagaagaaatagaaactgaattgtactacatatctattaaaaattgggttaacgttaagaaaataatctttccacaaaaactccagacacagatagttccactagttagtttcatcaaacatttaagaaacaaattatatcttgcacaaactatttcagaaagtagaggaggaggaagcataagatcttctaccaaaattagatgataaaattacaagaaatgaaaatgatggagcaatatccttcatggatatacatagaaaattcttttaaaatctactaacaaattaaattcagcagtaatcaaatccatgaccaagtgaatttgtggtttgatgtcttttgtaaatattgaaaagttctcagaatttattctttgaatagtgcttttgtcttacattgactctccatttaatgaaaggatcttttatatctgaaagacctggggaggaaggtagccacccagcaaagtcatctgaactttttgattgtggtgtgagggagaaagaaactttcattgtggtaagccaatgagaattgaggattatcactgcaatggacatcacccactatgataactagctttaccattttaaacgtacaaattttatttatttttattatttttatttatttatttattttgagatggagtctcgctctgttgccctgctagtgtgcaatggcatgatctgggctcaccacaacctctgcctcccgggttcaagcgattctcctgcctcagcctcccgagtagctgggattacaagtgcctgccaccatgcccgattaatatttgtattttcagtagagacggggtttggccacgttggccaggttggtctcgaactcgtgacctcaggtgatccacctgcctcagcctcccaaagtggtgggattacaggtgtgagccactgcacccggccacaaattttatagtttatttttcagtgtcctattatctcaaattgtgaggcacacattttcctgtttactctgcctactgactttccctaattgacgatggcctaggatgatgtagagtttgtttccttgaatggtttatattttttattttgaactgattttcatggatattgcgatttgggggcattttttggagtcccatgtgtgtaaagttactaaatcttcctccggaggaattcttgaattctaaaccatataatacacatttggactccacacctaagcctaatgcactttttggtttttaaatgtgtaattatctttttccccctatccggagcccaagcagaaaacatgcttccttccacttccctggctaatggttgaggtttcctggtcttttttacactggaaaggagattacaccaatttctggatttatgtgaatatctcagttccagttccccacctctcataggccccaagcccaaggtcaccttacctcctgagagtgtgttaaaatttccctcttacccatagaatctatatttttggtatgcccaggcatgtattcacatcctgctatgttttatttgctgttttttttttgtttttttttgttttttttttttttgctttgggaacgggagtgagtgtagaacctatacagtcccgtcagctctattccaagaatgttctgctcttttcttcgtttcacaaatgaaaaacctgagtcccatagatgggagtcaatacagccaaactcacagacctacctatggcacaggggagactgaagtttattttccaacttccagcagtcctacattgtaagctgagtgagtggactgcgcttgcaggtcctccaggtgcctagcgagaacagaggacaaataaatatttacgaattgcttgtctcacctgaaaatggtttatttctaggtttctgatattatggggtgcaatggcggtaaagaagcagttctggtttcaggaatgtgatcctgatagccatactccagaaaaaatcaataaattcccttggccccatgggctcatgctcttctagaagggaagacagggctcttaggtactttcagcgctcgtagaagagtgttgttacagtcccatgaccagtgcaggggatgtgccactgagaatcttttcactgatgcttcatgggctttctctattctgctactgggttttatttcccttcttctaattctccctttaccaacaactaatcccctgtagataattaattcatcaagtgcctgctctgtgatgtccggactgctagaagtggtagggggactcaagagccagatgaagctaagggcacgcctgtctgctctccagggacccctggcgtccctttctcctggcagaatgactgctatcctttgaggtgaatccagttcagctgtcacctcttctattaaccactctccaaaaacagctaatccttcttctaggctcttaccgcagttatgaaagcctatgctgaccctttgtttaaacatgtgtacattaacagtaatacatttaagacacttcatggcaagggcaatatactgcgttattcttccaaatcaaatagttgggctcagtcccccattcctgctactggggtacagtcaagctcagtcaccttttggtgagcctttccctagttcttggagtcttaaaagaatcccgtggttttcggcagttcagaaacccaggcattgccgctgcgtggtccacgggagttgctctggtggagctcggatgcccgggggctgcaggaaagaaggtggcagcgccccctacgcggacgcagggcgctgctgtgctcagcagaagggagcaaatgggatggagcttcagccaccctggaagccgccccttggcgccttcctccctcccttcctctttccaaaatcaagccccctcttcaacatcaagaactctccgcactccctggacctctcagagcctctcctcatttactctttccaatgcgctggctcaaaagagcctagataagaacaccaagttctggctgtccttccagcaaagagttaggagttaacttttcaatcttttttaatctcctttaaaaaagaatgagccatacattagggtaaccactgggaatcccatcacacacattggcggcatctctcctccccgacagggtgcctccagcacttcagatcccagccgagagtctggctgctggcgcccagcaaacggtgcggaaagcaaaccggggctcgcggaaagcgggaggaggggggcttcctcgggtctgttttgtctggttggcaagacttccgaagcctggttccctatagctgccacccggtcgctggcgtggaggagggagtccgggaagactggaccccagaattgtcccggctttctcccgagtgcccagcgcagcttctggctgagagcgggagcgggctgagtggggacaaagaacgcaagggagaggtagagcctggccttgggcagcccctggcctggccagaggcgcgaggccgagagcccgctcggtggagactgggggtggaggtgcccggagcgtacccagcgccgggagtacctcccgctcacacctcgggctgcagttccctgggtggccgccgagacgctggcccgggctggagggatgggggggcggggacgggggcgggggcggggctcgtcacgtggagaggcgcgcgggggcgggcggggcgggggcgcgcgcccggctccttaaaggcgcgcgagccgagcggcgaggtgcctctgtggccgcaggcgcaggcccgggcgacagccgagacgtggagcgcgccggctcgctgcagctccgggactcaacatgcgctgctcgccgggaggcgtctggctggcgctggccgcgtcgctcctgcacggtaaagccactgcctccccgccctccactcctccgtgggatcccgggcacatcccgggcgcctctgtgcgccccgcgcctgggccaggtttgggatctccccgccgccggggaggggcagcgggggcgctgcgggggctgcttgtctgggctgcaccgggtgggcggcgggggacgccggcaggagggagtcgggggtacccccgccggcctgccctgagccccctgcccgggtcttctctccttaagtgtccctgcaaggcgagttccagaggaagctttacaaggagctggtcaagaactacaatcccttggagaggcccgtggccaatgactcgcaaccactcaccgtctacttctccctgagcctcctgcagatcatggacgtggtgagtcccgcctggctacagggctgccctctccccttcctgggctccgaggggctttttagacagcgtcgggcggccaggcggtggagctcggctggggcactctagttggccccaagctaggcagggccatgctctgagtctgtccccagcctgccctctcctgagtgtctcatttctcggtttcccctccagccaaggagggacctggtaaagcttattccatcaccctggccacctgtgcatggttacttgggtcccacctttctctcaggttagaaactcaagcatcctgagctgggactcagtagcaagaacaggtgaagttcactttttaatctcccttatggtgtaagtgttgacttgcattccagcattgtcaatttagccacttctagacttttctgccgcctatggtatgtaacttctttggtgggggcctggccctgagctttgcagctggcgaatctatccaggcagagggcaagagggccagctgtgaactttcactgtgaccccatcttaggaatgggcatgctttgccttcctggtg

SEQ ID NO: 6769 - DNA, 6000 bp, Homo sapiens; identical to SEQ ID NO: 717

SEQ ID NO: 6770 - DNA, 6000 bp, Homo sapiens
attgccatttccttattaacatgcgtttttctattggtaattgaacctgtgacattgtgtgatatatacgctattattaaattctattgagaaggcttagttttatatatggcttatatttttgtgatatttgattttatgcattactatttagttattacaatctaataaaaatgtggcaaattaattttcttctttaaaactctccacattaaaatatgtctgtacttttacattttgattgtggtcactgaaatagcccttgaaagagacctttacttcttatatcatttcttatgaaggattgaattttaatatcccatcaaaacttgcttttttcttttaatctgtgaaaatgaatttaatttcagcagtaaaattgacagcatccatttttatctttaattaacttttcagtttggctttcatcttaaaggctcacggcagaatttattaccaagccataatagaagtgctgaatggaagattcagagaagctgcctagctctgaatttagctcagttgaccccattataaaaaagaaaagtgaacaacattgatataaaagacaactcattaggccataccactcacagatgacaatgtttatttttgatgtctgctatttacttggcctcctaattccctttccatgcactctctttttaactccaaagcaccaactgccctttacttaagggttttgtaaggatgaaagtacgtcagagaataattgctacataaataataatagctaccatctattgaacactcaagcactgtgctaaggactttatgaactttacattctgtgaggcaggttttatggcactgtttaaaaagttagtaatagggcttaaagagattaactttagtttagtgaatggttaagtccttgaagtcaggtcacctggattcgaatccctgcccactattttctagctcgctagctctcagatctttggattcatttattcagtgaaagtaatgagcagagggagtacagggcccaacttagagagattgctttcatacaagaagtgacgatcagcccagtgctgaaggaggagtaggagttaggcaaggcagaggaggaggaggggtggagagagattagtccaggcagagggaacagcatgtgtgaaggccctagggtgggactgggcttggtggttcctggactgaaggggcccatgtggctggaatttagcatgcaaaggggaggggtgtgatgtggagtttgtgagcgtagcgggggcccctctaagaatcatgacaaggacttgggattttgtttctgtttgaagacaatcactcaggctgccatctggagagtgtgttggaggatgcagggaaggagacccagtgagaggctggggcaggagtctaagatagagatgcatttgaataaactaggagtggaaaggagatacaagagatggattcaaaataaattcaaggctggccaggcacggtggctcacacctgtaatcccagcaccttgggatgctgaggcaggtggatcacctggagttcgagaccagcctgaccaacatggtgaaacactatctctactaaaaatacaaaattagctgggcctggtggcgcatgcttgtaatctcagctacttgggaggctgaggcaggagaatcacttgaacctgggaggcagaggttgcagtgagttgacatcgcaccattgcactccagcctgggcaacaagagtgaaactccttcttaaaaataaatacataaaaataaataaataaataaataaattccaggtaaatagcacttagagttgaattagactcggtgggtgaagcagagggaggaactcaggatgacttccagttttctagcttgagtaattagtcagatggtggtatcattgattgagatgggaaggctaagaggataacatggtttggaacatcttaagtgacataactaagtgattatgatgtaaagtacatagtcaaatacactggagctcagaggtgagatcagcacctatctgagtatgaatctggtcatcatcaatatatggatggtatttacagccagggaagtgaataagatcactgaggggggaagtttacagagacagaataggtcccagatttgagcctctggaatttccaacatgcaaagcctgggtagaagaggaggaacctgccaagagaactgagaaggtgttggccaaaacaaggataataaaagtaccactcctgtaatattgatactaaatgaactagcatattaaaacgtgtttaaattcttacagtccccattacttagcagtgttaagataattgttaaattctactttctatggcaaggtactgactggcaagtaggtattataaaggtgaacaagacatagccccgctgggtatggtggttcacactcctaatcccagcattctgggaggccgaggtgggaggatctcttgagcccaggagtttgagacaagcctagacagcatagttagaccttgtctctaccaaaaaaaaaaaaaaaagaaagaaacaaacaaaaaaatcaaaactaaaaaaattagctggttgtaggggtgcacccctgtaatcccagctacttgataggcaggggagggaggatcgcttgagtttgagccctggaggttgaggccacagtgagctatcatcacactgctacacactccagcctgggcaagagtaaagccctgtctctactaggaaaaaaaaaaaaaaaaaaaaaaaaaaaagacatagcctctaggctgagaaatccactatctagtagagaacataattatggagaaatagataaagagaaggcaggtggcatttgaaatgagccttgaagaaagcgtgggtttggatattcagaagaggggagaaggaaggataaatgaagacaggaaagtgtaataaaaattccacaatcttcagaggaaaaggtggtgtctgggatgcaagaactgtgtaatagtccctttggctaagtctcagaaagttggtagatagatgccactttaggggaactttgtaggtggtggctgcagcaacagcagcaattttcattgtcatttggtcagctaatgtctcctagcagtgtgaagatgcctgttatcagagtcaggtgtagcaccatatccagcaaccatgagtaattggcgtatccccctggaaaaaccatgtaagatgtagacattatattctgattatttgtttggattttaaaatgcccaacaaatgtcacgctttgcctttcacttaatagcaacaattaatagtgtttttcatagattatgtaaataaccatcattctcatgattattgatataacatctaggagttccaattatacttgcagtggctgcactgacaaccatttcattctagttttgccactgacaggtactgtgaccttcagcagttattcaactcctctgtttcaaatcagttagctgtaaaagcagaataacattttaaagtcatccaaacactgttaggatgaattgcataagtgcctgtaagtcccataaattcttcagagtaaaatgtaaatttgcagtgaaaggatgataggtactgtctttcatttctgtgcagaagtgcaattaattactaatctggttaacatcttgtgcatcccttttctgtggcccctttgtttaagtcctgtttaaacagattggctccattggatgtaatttacatttttccagctgtatttggacctaagaagagcatcttcactgaattttgctgtttagattctttgcaaccaggtttagtttttcacagatttactagtctggagggtggagtgaaatttttgctcacaatgagtcttagaggtgtcacctccataaagcgttctgtgaagagtcagcggctccctctgccactgaagtttaaagataattcgcctgaatcccttcagccaaatgaagctttctaattatggacagagaggatgaaatatagggtctggagggatttgagacgggtttccagcagtcggcaccaatctccaccagaggtgctaagtgtctgtagcagatagtcactaatatttacaaatgttaattgatgacaacacggagggcgatgcccacgtttgaggcgactgcatatcatttccggggatggcttgagtgagtgtcagagctgtaccttcccgagtcctctagtttatctgcctcggttcctcgcttccagacgaggaaacaggcccagagaggaaagtgacttgcccagggttgtctcgctggtccacaacacaggtctcctggtggggaccccttggctgacacgacagccccaggaggcagtcaagctgcgactggtacttcctggtgagaaagacttgagtgggcagcggggcccatggagagcgctgcagcctggagcaagtcccccaccactgtgattctgccccagcctccagcttgtttctttctgatcacaactcggaattactttatttacattttctatcagctgggagcaatctgtccctctgcttccccttttggtgctgagcacagagcagacatcaatgaatagctgttatcttaaggtgtgcagtgactaggccaaggacatccggtggttagagaaggacgcgcctgcgatgccagcctcaagtctttgccttcctggaactctgctccagggtcgcacctgcccaaaggaaggcctggaggcgggggccagggcgatggggctgggccaggcgtggaaaaagaggagctaggagcagacagggttggaccagaggcggggcggggtggggaaagggttggtggggatcggaggcggggctatgaatagaccggactgggccaaaaggaacaaggcgaggattgggcggggccagagggaaataggggcggggctaggcgccgggagcttccacatgcgtcccgagcccgccagaagctgctaggctgaggctgctgtcccggcgggagctgtggcgcggagcggcccctctgctgcgtctgccctcgttttgtctcacgactcacactcagtgctccattccccaagagttcgcgttccccgcgcggcggtcgagaggcggctgcccgcggtcccgcgcgggcgcggggcgatggcggcgcgggggtcagggccccgcgcgctccgcctgctgctcttggtccagctggtcgcggggcgctgcggtctagcgggcgcggcgggcggcgcgcagagaggtaagcccgggctgcagaggggcggggcgggagctggcccggactccacatcgcggtgcccaggaagccgccaggcgacggccgccggaaaacctggttgcgaggggaggtgggtttttttctcctgggggcttggagtgaggtttcagtttaaatgtccagatttgctcatttaaatgcagagaaagggctacttgggtgggttttctttgttgttccacgacctgcatcgctggagactacgaggctggcttagcgtatacttccacacaactttttcagtaaaagatgccactcttgtccagcagggctttcctgtcctggtggcagccaagcttcccattttgttgcccatttacgggatatagagactctggggttcattctaggggttgggacttatcttccacctcctgcccgccgcctcttcctccatccctgtcccctacccaccgcagcatttgaaaacctttcctttcgccggagatgaaaggtgtgtgttgtagcaggctaggcggccaacttccctggcttcggggctaatcgtttgcatccagagttcctcactagctccttagagcacagcttttttcagcctgctgtttttcaagaggttttggacaggaatggaaacaacaaaagaaatcgcgtagtcctacatgtttcaagtgcttgggaaagttttagagtcagttctctcaataccttgaagaaaaacacgtttgtggagcagctatggtgtgatctaaacgtagaaaagctaagcatccgttaagcaagatatg

SEQ ID NO: 6771 - DNA, 6000 bp, Homo sapiens
aatacaaattaaaactcccatcaggcttctttatagaaattgaaaagatcattctaaaatatttatgaaaatgcaaagacatcacatagttaaaataattttggagaacaaaattggatggaatatgctacattatttcaatattaactttatagctacattaatcaaaacagtatggattagtataaagatatatagatacattaatggaaaagggtaaatagagtaaaaaaaaacagccacacatataagatcaattgattctcaacaaaaatataaaggtaaccagattgaaggaaagaatatttccaacaaatcgtggttcatgatatggtttgaatctatgtccctgcctaaatctcatgttaaattataatccccagtgttggaggtggggcctggtgggaggtgattggatcatggaggaggtttctcctggtttaacaccatcccccttggtggtgttgtgacaatagtgagtgagttatcgtgagatctgattgtttaaaagtgtgtagcacctcccctcctctctctcttcctcctgctctggccatgtgacatgtctgcttcccctttgccttccgccgtgattatgtttcctgaggcctccccagaaacagaagccgctatgctttccacacagtccgcagaactgtgaaccaattaaccattttttctttacaaattacccagtctcaggtatttctttatagcagtgtgagaactaatacacttcatttggaagaaccttgatccttacatcatccacaaaaattaacaagtaacaagtctaaatattaatgctaacttttagataacatgcagaaaatcttaacttttaattaggcaatgatttctaaagtagaatatcaaaagtgtgaaccttaaaagaaaaaaatggataaattgcatttcatctaaattaaattcttcttttctttgaaagatactagtaaagaaataaaacagcaaggccgcagactgggagaaaacattacattacatatatctgacaaaggattcatatccagaatatataaagaactctagctgggcatggtggctcacgcctgtaatcccagcactttgggaggccaaggcaggcggatcacaagttcaggagttcaagaccagcctggccagcatagtgaaaccccgtctctactaaaaatatgaaaaattagccaggcttggtggtgggtgcctgtaatcctagctacttgggaggctgaggcaggagaatcacttgaacccaggaggtggaagttgcagggagctgagatcgagccactgctccccacccagggtgacagtgtgagactccatctcaaaaaaaaacaaacaaacaaaaaaaaaaccctctcaaatcgccataaaaaagatggagaatgcaattaaaatgggcagaaatcttgtatcttcgcaaagaaaatgtgagtggccaatatgtaaatgaaataggcttacttacatatcaccaggcaaatgcaaattaagaccacaatgcgttgccactatacacccaacaagatgaaccgagaggatgtggagcagctgcatttctcttgcattgcgggtgagatgcaaaatcctccaagtgctttggaatattttggcagttccttataaaactaaacatacactcatcacatgatttagccattttactcctaggtatttgtccaagagaaatgaaacctcatgtccatataaagacctgtatatgaatctttattcataatcactaaaattagaaagacccatcaacaggtgaatggaatactatttggcaatacaaaggaacaaactatggatctgcaacaacatgaatagatctcagaaacattacacccagtgaaagacgccagacatgaaacaacgtatagtacatcattctacttttatagaatgcctagaacaggcaagaaaaaaaaagtaacaagtgtaatgacacaatctatgtgggtcagagcttgtctggaaccctcagttgcagatgggtcaaagggtcacaagagaactttgggaatgatgaaaatgtgctgggcgcggtggctcacgcctgtaatcccagcactttgggaggccgaggcgggcggatcacgaggtcaggagatcgagaccatcccggctaaaacggtgaaaccccgtctctactaaaaatacaaaaaattagccgggcgtagtggcgggcgcctgtagtcccagctactcgggaggctgaggcaggagaatggcgtgaacccgggaggcggagcttgcagtgagccgagatcccgccactgcactccagcctgggcgacagagcgagactccgtctcaaaaaaaaaaaaaaaaaaaagaaaatgtacactagtttatacatttgttgagactcagtatctatacatgcaacattttatttcatgtgctatgagttgtttttttgaagagcattaaaatgtagtgccagaaaattttgatactgtttaaaaaaacaagttttctaaaagaagagtgactgaacaaaatagttcgggtaaaaggcatttgggtcaatgaaaatgcacaaacatggataaggtaacgtgatcacctgatgcctcccagctatctgcttcccttccttctttttaccttgagagtctccaaatattcttctagaccatttaaaaccaccttcctatgaacaaaatgccattcatctccttttccttctgccatgaaaaattaccctctgtgggactcctggagcctttttttcttccagtctaaaatgaatgcaagtaagaactgaattaataattttctgctgatttggctaatacataattactatctaagcaagagagcgcaaggatgtgggtgctggtgttcagtgcttctccacccctcccagatggctgcctatgttggagggagctgagaaaggaggaagggcggcaggctgcatgtccaccctttgttgcggatgtaggtgcaagtcgggcagcgactgtgatgtgcagtagtgtgtgggtgtgtaaggaccttatagcccatgcatcctgatcacacctttgcagtctttctctctgattttgccttttgaaagagactgtgtttttaggtgacacttctagtgacttgccgactaatttacaactcagcctaggttccccagaaaacatatcctgaggcaaaatttaggtggtgatatgttactaggatgtttgattccaatgaaaacaggagcaaaggaaaagggaattgtggcatggaaagagagggagcagataggagggttcattaccaggcagaccacccactgctgagtatgaagtacaaaagatggatccatctcacaggatcatctttgagaggccaacagcgactgcatctcaggacatttcttaggaggcaataaagggagactctttgatccatggatatgtgtccattagacaaaagtctgcctcatagacttctaacttgcctgaaatttcagattgcatatatgtgagtactgagcaaatcccgtggcatctcagaccttgcggatatgaggtgatcatatcccatgtgggcttgttcccatgtaaagctgatcagacctcttgcagaactgggtgctgaggcagcagctggggtgataaagccaaaagctccagagaaggtgaagccaagaaggtctgatgtgatgcacggttggataataatgtttgtaatgtggctttgcaagtcttagaacatataaactggtagtaagggggctaattcttgctatgttgttggttttattaaaacaacttcttttcattgtttactttttatagccacgatccccagcagggcatttctccaaaagaactgcatgcaaataggagaaataaactgaaatatgaatgtgtgtgtgatgcaacagatataattttccagataattccattgtgcattaacagaacattgaatgcaaagcagtggtgaatagacttttccagaaaataattaggatgctatatttatctctgaatctttcaggtactgcggtcacattttctgttccaaaaataaaatagctgattttttaaaaaggcagtatatttaaaattaatgcacagaaacatgccaacgtgagatttaggatctagatttaggtatttactaatataaagtctcaacgatgttaaaagcttaagcttcatgggaaaaaaaatgagtcaatacaggaaagtagttatctattattaaccattcattaagtcctggaataatctgaagaagtctacagaacacaaaaacgagcttgatgtgtagattttgttagttggctacaagtaggattgtgtaaccatcttcttcaatattagaagtccgaggtacagataaactttattggggatcactcactaaaatataaaacctgtggccgtaggtgagtggcccctcaggtgtgcggtggtggtccagagggtggggtgcatccggtgtgcactggtacaccagggtccttgcaccagtgcgccagtagccttctaatgacagccgaaggaggcctgctgcagggaagcaaggacccttgccttatattaaggaccacggatagctctgggcggcaccaaaaaaggcacgtattttacctggaatgacaatccagtctccaagtctggctgggattccagtttgctgataacaaaacacatattcagtcctcacttaaccatccattacatttgtatatatgtgagcagaaagggctcagtgctcccaagaaatgttcaggagtgagggtaagaggtgcagtttaaggagcagctgttaaaaaaaaaaggtccaattgtataaatgaaaaatagggccgccacggcaggggctggaagacgggtcaggcgggaaagcctgggggtgggggtgggggtaggggcggggatccctgcgtcgccgtttggctgctcggagagtaggggggagagcggatcccagcaggttaggccggaggaacagcgccatgtgctccgggctcctggagctcctgctgcccatctggctctcctggaccctggggacccgaggctctgagccccgcaggtgaggcgggggcttcccggcgttctgcaggcaccgtcgggaggcggcggcccgcagtccggcgggcagaggcgcggcacccgggggctctcgggctgcgctgcagcgggcggtggtcgtcgtgcggggccaacttcggcggccggggtaggcgggcagcgtttccgccgccgcttatgccggcgccgaggctgccgacagtccccgcactcgcccggccgccgagagcccagaggagccggctcaggggacgaccccccgcccctcccgactccgcgcagccgcggctccgctcgcagcgtccggcccaggtcgcccccgcactccgcggtcccagaggtccgagtcccgtgcggcggccgccgaggcgggaggggagcgcccagggccccggcctcgggccgaggcgagcgtgggggagggcagggtgcgcggcgcggcggctccgcctccgactctccggcctcctcccccgccccgcgcccgcgcgcgctcctccctccccgctcctccttcctctcccagcgcccgctcctccccctcctcccctccccctccgccctcctccgctccgggccagcgcggcggcggcggcggcggcggcagcagcaggagcagccccggctgcgggtcgcgacggcggcggggcgccccctcccccgtgccggggcgcggcggagggatgtggggccttgcgggaggaaggcttttcggcatcttctcggccccggtgctggtggctgtggtgtgctgcgcccagaggtagggtcgcgggtgggccggcgggcggcgggcagggcgcggggtgcgcggggcgctggcggctgagccgcccctgaccccgctctttgtgctccccgtccctcccccagtgtgaacgatcccgggaacatgtcctttgtgaaggagacggtggacaagctgttgaaaggctacgacattcgcctaaga

SEQ ID NO: 6772 - DNA, 6000 bp, Homo sapiens
tgatttaaacaactttttttttgagatggagcaagactccatctcaaaaaaaaaaaaaaaaaaagcagtatttattgagccagtaaagccttcagggctttccaaacacataaataatagaaaaatattaagggaaaatgtagagatttaagtacctaaaaaacatagtcaaaagaaatttgaaatacaaattgaaatctgacaaaatagtgagcatatagataaccttgttgtataaatagctcatacaaagcaataagaaagttaccaagatccccaaaaggaaatagttcccccaccattaatgttatcagtgtgtcaagatacatgtaagataatagcttctttgggggtgaggtgaattcataatgattgcgttttttctccacagttttgtatatttttccaacttttttgtgaggttttttgttttcttttgtttttgtttttttcttgagacggagtctcgttctgccagcaggctggagtgcagtggcttgatcttggctcactgcaccctacgcctcccgggttcaagtgattctcctgcctcagcctcctgagtagctgggactacaggcatgcgccaccacaaccagctgattttgtatttttagtagagatggggtttcaccatgttggccaagatggtctcgatctcttgacatcatgatccgcccgcctcgacctcccaaagtgctgggattacaggtgtgagtcaccatgcccagtctgagtttttattattataaaaaattcatttggatggatttatgaacagtaggaaaataaggtgttttggtgcagcttttgaaattggcattgaagaaaataaccataatctataatacacccattggtgtccaggtagaataaagcatattgagctaaatagatcaagggactctaatactacttagagtaatgggttgaaatttagttcaattattttcaaattatatgtctgcacaatatttgcagaataacaatacttctgaaaacactttgaaacgagtgagttctcttgctggatttactgactgtcacagaacttccattcctgttcattcaaaacaaggtgagtattttgaccatatgaatagtgtcagaaaacatactcatttacactttaaatgtattttatgtttgtcaaacacatgagcagtgaatggtgcaggagtcagaagacgaaaattctgatctgccatagtgactgtaaccttgaataagtcgtaatcctagcattcattagaatgttttattagaatatgttttacaaattgtttattctgtaaagatggaatagaaaaactttttgtaaatctgctgcttttagcttttgcaaatgtatctgttcatctgtatcatgttttaatctgtatcatcacttattcaacatatttttctagtttaacttttaaaaatcatacatttttggttcaaaattaaaatacacacactctgaaaattttctctctcactctgttcccacatttaccactatttgtctaccctttagagtttcatgcttatacagtcatgtatgacagtacaatcttatacctctcattttttacacaaaaggtcacagacaatacatgttgccttgtaccattaatttctcatttactatattgtggtgatgtttccatatcataattttttataagtcaagattatatatgcacatcgttgaaaagttgaataattataaaggttccttaagaaaaatagtactacattgtccatctcaccatcactttcattttcctttggcatactgaattcagcaatgcatattatgaccaaattgggtttattccaggaataaaagttgtcttaacattcaaaaatataattgtgataatgcatgatagtagcagattaaaggagaaaaatcatgagatcatcttaacagctgatttggttaacattcagtattcattcttaatctcaaaaaggatatcaacaaaaaattatcacaaagcatcaaacttcatagtgaactattgaaagcccaagatggggagcaagacaaggattttgactgttactgtttctgttttacattctagccagagcagtaaagcaagtaaaataaatggtagagtgggccaggtggcttacgcctgtaatcctagcactttgggaggccgaggcaggtggatcacctgaggtcaggagttcaagaccatcctggttaacaaggtgaaaccccgtctctactaaaaatacaaaaaattagccgggcgcggtggcgggcgcctgtagtcccagctactcgggaggctgaggcaggagaatggcgtgaacccgggaagcggagcttgcagtgagccgagattgcgccactgcagtctgcagtccggcctgggcgacagagcgagactccgtctcaaaaaaaaaaaaaaaaaaaaaatacaaaaattagctagatgtggtggcgcacgtctgtaatcccagctactcgggaggctgaggaagaagaatcgcttgaacccaggagatggaggttgcagtgagccaagatagcgcgactgcactccagcctgtgcaatgggaatgggagcgagactccatctcaaacaaaaaagaaaaagagaaagaaatggtagaaggattaggagggaagaaaaagaattctcagtatttaagttaacatagatgttattcctaagttagtatgcttatatggattgaacatcccaaaatctaaaatgctcctaaatccaaaatttttgagtactgactgaaaggaaatgctcattggagcgtttcagatttcagattttcagatgctcacctgggtgagtataatgcaaatattccaaaatttaaaaaaaaaaaaaaaaacagaaatctgaaacacttctgatcccaagcatttctagtaagtgatcactagaaatactcaaacctacctgtattgcagcatcctcatatttcagttttaggccgtatctgttgaccttccactaaagaagacaagaattgaactctcttttctcactctgtattcccagaacgaacatacacacacacacctgttcacccttttccaccaagtatagttacagttttggttaaatcaacactctaggttctctggtatttaaccagatttcttcatgatattcagaatataatgtattctgtcagtttcatcatattgaaaacattttgcccagagtcttctaatatatctcagtctggtctttttgtcctctacacctggaatacaaattttgttctgagattttcctttcttcattctgaggttatcctttgttgtactgtaaaattgtaagctttctctaagttgatttgtaacttaatgacctgactttttttggaagtaggcttaattctaaagttcatttcggataaataagatatgacaacaaaggtattatcataaattggggaaaaggattattcattgcggcactgtttatcataggaagagattggaaacagatcaaatttccatcagtaggagtttgtttaaatacattaatgtgtatccaatatgaaataaagagagcatcgaaagataattgggaaatcttctctgttctgtagaaaatctctaagctggctaggcgcagtggctcacacctgtaatcccagtactttgggaggttgaggcgggtggatcacctgaggtcaggagtttgagaccagcctgaacaacaaggagaaacccagtctctactgaaaacaaaattagccgggcatggtggcacatgcctgtaatgccagctactagggaggctgaggcaggagaatcgcttgaactcaggaggcagaggttgtggtgagctgagattgtgccactgctctccagcctgggcaacaagagtgaaactctgtctcaaaaaaaaaaaaacaaaactctaagcttaaagtttaaaataacaaaaccctccagacatatatgtttctctaccatttatgttaaatattggcgggggtatgtgtatacacatacaaatatcccaggaagaatatgcaagaaatgaattacctttactgtccccagtcagggtgattgggaacaggagggggagaaatttttttttacttcatactctcatttattgttgccttttcacaataaattgaatagtttactcaaaataaattgaataatttatgggcctcatgtaactcttgtgttcagcgtgttgaggaaaggttgagttatcttatgaaggttatactgtgcctagaatactttgtgtttggttagttggtattcataaaacttcagttgtgtagcttttttatattttttaattttcttttagcagaaaaaatcagtagaaggccatctaccgaagacactcatgaagtagattccaaagcagctttaataccggtttgtagatttcaactaaacagatatatattattaaatacattaaacttttttagataagatctacaaagtggtgatatttgggactatatcaaaaattcaaaaaaatttttcttaagaaaactgactttagcatagtagcagttacagaaaagtttcttacagtgaatagtcaggaattttaaagaaaaatttatgcagaataaaggcaggaatctctttttgtttgaattgaagctaattatatgaactcatttccagctaactgcgataatgattgattttgcaaattccctttaaaagcacacactgacaagacaaaaagctcaggaaaaggcagaaaaattactcctttataatcaagtattatatataagtcagtgctcataattttgctcaagaaaatattgacttacattcaaaatatatctgttctggcatagagagattatgttgttaaaatcatgttattgaaaaaagttatttcagtggggaaagaggttagttaacaaagagattcacagtaacaaatcctcctttctggagggactcttcctgaccctgagctgcacaactttgcaacaaattaaagcctaaccgaagatgacctcacaatggcaatttagaactcatgggagtcaacttacataaacggtatttgatttctgataagatagtggaattattggttatagatgacaaaataagtatgtttaaagtgatgatggacataaaaaagttttaaatataaaacatgagaaaagaaggagatactattcaaaaagactggcaaatttgaaaaactagaaataaaaaaaaaactcggtgggggctgtgtgcagtggctcatgcctgtaatcccagcattttgggaggccgaagcgggtggatcacttgagatcaggagttcaagcagcctggccaacctgacaaaaccctgtctctactaaaaatcaaaacttatctgggtgtggtggcacatgcctgtaattcagctactcgggaggctgaagcaggagagtctcctgaaccagggaggtggaggttgcagtgagccgagattgcgccactgcactccagcctgggcttcagagtgaaactccatctcaaaaaaaccccactcagtgggagttaattaacagattaggcacatctgaagggaaaattactaaactggatcagaatgcaacagattaaagtaaaaaaaaaaagataaactacatagtcagatggaaaatatattaaaggtaaagagacatggaagacatatctaactggccttgagagagtagacaaaatttgaagagattagaaatggtttagaattttacaaaatgataaaatatgtgaagattcaaattcgggcagaatgagtctcaaactggggaagtaaaaataaacccacacctaggaacattatacaactgcagaataaaaaccatatgcacatatacacaacaaaggctgcagtgaaatatgcctaaatgtcatgagcattcacagcttacatgattttaatttttctgtttgtattttgatgtttatatgtatatgtatatatacatatatatatttattattttttttttcgagatggagtctcgctctgtcgcctaggc

SEQ ID NO: 6773 - DNA, 6000 bp, Homo sapiens
ctggatgaaaagttacctactgggcacaatgtacactatttgggtgatagatgcactagaagcctcgacttcaccactgtccaattcatctatgtaaccaaaaacaacttgtgtccttaaatctactgaatgtttttttaaaaagaaaggacatgtcaacaagagttggcaccttcatattctacattcacaaactaaaaaccaaaaaaaaaagaaattgattgttaaagtaaaatataagtcactgaatgcagaagtcatatgtgtgataacaggagtgaataggacaggaagaaaaaaagaagtatattattgtaagttgcatgcactacactgtacatgaaatggtattatgttaattaaagttagactgtaggccgggcatggtggctcgcgcctgtaatcccaacactttgggaggccgaggtgggaggatcccttgaacccaggagttcaagacaagcctgggcaacatagtgagacttggtctctactaaaaattcaaaaattagctgggtgtgatggtgcatgcccatagttccaactagttgagaggttaagatgggaggatcacttgagaacaggagttcgaggttgcagtgagctgagattttaccactacattccaatctgggcaagagagcaagactctgtcgcaaaaaaaaaaaaaaaaaaaaagaaaagaaaagagaaaaaagataggttatgatgagttaaagatgcctgctgtaaaccctagagccatcacaaaataaaatgaaatatggcaaaatagagatatgataaataaaacactaaagaagataaaatagatacaatgaaattagaaaaaaatttagtatcattttaaaagccccatatgcctctattttcctagttacataaaggaggcaaagtgtgaaaaagaatagaccatgttcttctaaggacccatgtcaggtgtcagtagaatggaggtgatgcaggagggtgggaacggatgccccatgtttttaaagctgtggggtgtcttctctttttatttttttaaatccagaaatgtagatctgttcattcatccattcattgatgtaaaatctggtttctgaggtgttcagcttgatgactgatacatgtatacttcaccaccacaatcacatgcactcacatttccatcacctcgcagagctgccctcttttgtgtgtgtgatgagaacccataagatctaccctcttagcaagtgtgaagtatatatcgcagtgttgttagctgtagtcacaatgttgtatagtagatccccagaacttattcatcttgcataactgaaattttgtaccctttgacccacatctccccgtctctccttctcccagcccgtggcaaccactatatacccagtaaccccctttctggggatatagtcaaaggaaataaaatcagtatctgaaagagagatctgaactgtcatgttcattttggcattttttacaatagccaaataatggaacaacctaagcatctgccaatggataaatgaataaagaaactgtgagatacgtacacacacacacgcacacacacacacacacacacgtatatgtataacatacatatacgacagtatattatttagccctaacaaagaaggaaatcctgccatttttgaccacatggatgaacctggagaacatgcttggtgaaataagccaagcacagaaagacaaatagcacatgatctcacttataccatggcactgtgttcatgtctcagccacatttaccacacccaaccacgcaaacacagccactgtctcagttcctgcccctgaccggggtacagggtgggtgctctgtgaacacgtgttctactcatggcccagcttccccaccttcagctattttaggctctgacactggaaatgaaattcttatgaagcccgggccaaggctgaggttgtgtggaactagggtgccctctactgtcttccacaacgatcacgacattgcttaatttcattcaatgaagagaaaatgctaatgaaacaaatgggaattcaacggatagcctattatttctcagcacaaatacagaattctatagtaaaacaaaaatcattgaaatggtagtaagcactcttctagcaatgtgagtttctgtaaggttctgatgggccttacgatttcactgtcccctcagggcagtccatctaaagtgaggctatgttatgttacataaacactaggaggagagagagtggcataccgtttcattacagggaagagaaaagaatttaagcaacatgctgaaatacaatgttaaagaatgactctaacttaaaatgatttttatatattcaataatatgtgttgtgtggacataaagctgatagaaagtgtaccaaaaaaagtggaagttttaaacataatccatcaaaagaacatatttccttacagctgacatttcttttattattaagaattaatgtctataaccctcgctaatacaaaaatcatcccttgtttatatacatttatttttgcaaactcacaccgaatgactttgtgtgacaagctgtgaagtttaaaatttaccaattcttccaactctttgatttgcattatgctgtttaatcctgagagaagagcagctgtcgctggtattaggtgttagaattccaacacctaataggtgaaaattatattaggctgatcataaaaccatgttgttaactttttaaaatttaatgtctcccaaggaatttcaccctagtggtacatcttttgggaaattagaaaatgaagaaatgcatacgttcagtgatccattttagaattagaaaattcaaattagcatcttatttcattcatatttcctgaagaaccactggaaacagttatttaatagtgtggctaaatgtatattcagagaaacacttcctgtatatttgcacatttatgtatatttatgtcctattcctggaatagatttacaagttttgtttttcagaaaatttcagaatttctggaatgtgcagaagtattaacaggtaacttagatttggaatacactgtattagagataactggaaaaatgagaggcttcctacactggaaggtcaaagatctttcctggaggggagttaggaatttgcctttacttaccattattctgttaaaagagattatgaataatgcagtttcacaaaaggaatgggacaatggtgtaagtaaacctccccatcacgttttcagtggctttcctttgagtcttgaacgttttccactgggtgttatagtcgagagtcccccacctcctgaggaagcaagacctggcaaacccaagacgatgcgctcttacttgtgttgtttgaaggggccctgctgccgcgcagttgtcattaatgccaccctcacctcccaggaactgcaccactaggacggacgacacaccgacgtaatgaccatagtaagaccccatgtacgtggctaatgaggcagtgacccgacgtggctcggaagccctgctggggagatcccgccccgtcaccccagaggcgctctccgacctgcagcccccagggctcctggccctttcccgtttgccactgcggcttgttgtcaagaaatggaacttcagaaaacccccagatatacactgcgttaggtaaggatttcattctaatcgagtccaatgtgaccctggctttccctcccgtagttatgcattcctgtctatgagtgagatgaaaagaatgtccacaggccagcttctttcagaagcgcctaagagatgcgcatgtaaggggtgccatggagcacccgggaaggacccaggcctgggcagggaggcgttggggccggctctagggagcaaagctgtcggagtccaggcctctatcacccgactgctgacactgccctcccatccctgctctacaagcgggcggtggtgactacacgaggcgccgaagatgctgttgagggccctggagaaacttcagcagaacagggcctctccccttgcaggccgagccgggggccctgcgccctccccctccgcccagctcggccaagggcgcatttgctgagcgtctggcggcctctaccggagcacctctgcagagggccgatcctccagcccagagacgacatgtggcgctcgggcgaggtgagagcgggcgcgagtgcgccgggggcgctggggggctctgcggcgggcggcgcgcggcccggggcgcggcgcggagcggagctgcagggcggcggcgggagcgcggggcgcaagagccgctccgccgggagtgccggggaagttcgcgctggcagcatggggcggtgacgccgcaccggccttccgcgcctgccagccgggcgagagcaggcggaggagaaggaggatgcatcctcaccgacggctcgcctcccggggccggcgcgcagggtgagccctgggcgcgctgggccggggcagtggggtaagaggacgcgagcggggaagaggaccggccgccccggctcggtccgcacccttctcctcggggcgcctgagcggcaggctgcgtggccggggaggagaggtgcagagcaggcggggcgcgcagccaggccagagcgcaaactttaccctggcgactgcggggctgaagccgggcgcgggagagagcggggtccgggcggctcatccctgccggacggggcaccagggcgcggtgaccggttgggggtgggggacacccgttgccaccatcacgggagccggaggggtgagatcgcccacctggaaagccagcgtcagccccggggctctgaggcgcgcggcgtcccggcgctgctcgcggggtggactcggaccccgcgggggtgtcgcgcgcgtgtcgcgcgggctgctcgaggccaggggacttggagtcgctgctgcaccgcgcgctcccagcccaggaggaaggcgctgcctggcggagcgcttggctcgtacccggggcaggagcaggggaagtctgcgaaagccgggagcgagccggggagggccggggagctggagaccctcggcgtgccgctgcggaccgcgcgggtggcgaccgcgggtgccagggcgacccaggctgcggctccgcagtgcagcccccgcgcccacctgccctggcgcgccggccctggtgagcctctgtgggggtccggagggtcgtgggagcgcagcctctcctgggggtccctggctcggggctgaggggcggcgggaggcgccgcccgggtttcccgcatgcagcgccgcgtgctcgccgcctggctctggcccgggccccgcgacgagccccccggacgcgcccaggcgaccaccgcatggcaccctgcccttcttggcaggagtcgcagaaggccttcgcttccgaggtggaagtacctgttgtgtctcccaattccggagtttgcgggggatgggggttgggggggcttcttgggaaaatgcttcttttcgaagcatactgttcggatgcctgtgagcacctatttgcgttatgcgcatactgagaaatgcgtgttttcaggaaggttagtcgttgagcccagggacaatgtctgcctggatctcaaatacattaattagggtccagcattgagtggagagacttccacagatgcagtgcttaagttatgtagtcacggggaccgaatgccgggaaagtagccacactcttttataggcagttgtcacagtattgtgatcctgcagaaaacctgtttcttaaatgtgcttttccccacttctttccacgtactttctcagtgccttgcagagagaggagtagcttgctggctttgaacgcgtggcgtggcagatatttcagaaaggtaaaattactacacttgtggatttgacggatacaaaatacagtcgctcagataactacagcgtttattttaataattggactaatggtttatttgataacatgctaaaaaacaaaacagagtatttgagtggaaaacaacgaattagggtgattctgcaccctgagtag

SEQ ID NO: 6774 - DNA, 6000 bp, Homo sapiens; identical to SEQ ID NO: 718

SEQ ID NO: 6775 - DNA, 6000 bp, Homo sapiens
tggataaaaaatataagaaaatgccctcctcacctccccacatcacgtgtctccatgaagggccttcttccagcacaggtggtgtgatctcggtccattcccatctccaagcactcagcctggctgtcctccattctaaggagaccactccgtctagtggaggacagatgaggtcactatctgacaacttctaaaccaatgctgcctgtaaactataaggaagaccccgcggtgacactcttcatcctataactgtaggatgtagcattggtttagaagcactggcaccacctggactcatggcacacttgctgcagtgtggacgctcctgctaggagctcacaggggacaggagtgcatgggccggggtgggattggagtgctgagtgactttccactacttccccagcccctgagctgcggagattcagcactgggcaggcgaaggcccagcgttgctgctgtgggcatgccgtgtgtgtctcgaggcttaaggaaaacctcaagatatgttgcagtggccgagggagcagttattcacgggcttcaggcatttccattccagactccactaaaggaaacagaaaccattgcagggcgctctccctggggcccctctctgcactctcttctcaaattcaatttcttatagcttgagttgcacttcagaagtctatgactttctacctagaaagtactcttcttcctgtttcctaaagagttaaattgaaattctttcacatgacatacaaaaaacaaaaacctcactggcctaaatctaatctgtgcttccacccagcactaggtgtactttcctactatgataagaggatacgaaagtgataatgacagtgatgatgacagtgacctcatctgtctcaggcttagtatgtgctgggaacggtgtttgcctttctcaaaatatttcaggtgctcttcaagcctttgcttttgatgtttttgctgcattttgtctgaaaaatttctactcgttctttgaggcacaatgcaaatgtatcttccctctcacctcctatagtagttttgattgccactgtaacagattaccacaaatttagtagcttcaaataagaccgtgttttatctcatgattctgttaggccacacgtgcaggtacagtgagacttggctgggtccttcccttagggtgtcaggaggctgaaattaaagtattggcaatctgtgctcctttcctttctgcaggctctggggttaactgtgcttccagaatcattcaggtgcttggtcaaatacagctccctgtcgtaaactgagatccccattgccttggctggatcttatggtagttctgtttttagttatttgagaaacctccatactgttttccataatggctgtactaatttatattcccaccaatggtgtttaagagatcctatttcttggctgtcttgccagcacctgttatttttgtctttttgatagtagccattctaactgcggtgagatgatatctcatgtggctttgatttgcattttcctgatgagtgatattgagcatttttttcaagtgcctgttggccttttgtatgtcttcctttaagacatgtctattcagatcctttgtccactttctaatgggattatttgattttgggctgtcagctggagcccatctttgctcctatcagctgccttgtttcttcttatgttttccctacagcctttccatcaagggtgactcaagtcctcagtttttgagttcctctgcttttatctctctgactttttctcctgcttcctgttggagaaagttctctacttttgaaggtgtgatgagatcgaacccacctggacaatccagggtcatcttcctatcttagggtatgtgcccttaatgacatgcacaaagtcacttttgcatagggttacatactcacagaatctggtgagtatggtgagcttggtactgagcaatgaatgggctcactgcctgatgtgctggaaaccaatacgatggcaccagattttgagtaaataaaagttttattgcaagtcaactggcaaggagataggaggaaatgctcaaatctctttcctggaactggggtttggggcaggttttataggcagagggtaatgaggcgtgttctgattggatcttgcaatgaggtgatgctgggaggtatggtctgactgcatcctgccatgggctcaatctgattggatgctggatcctgccatgtggtggttgcttcttaactcttcagtctgagcacttaggttccactcatggttgtatgcttggttcatctgggcatgcttaggttacatgaccttcaacctaggggttcatggcaactgaaaataactcaccatgttattacacaaggttgaaccagactgggttgatcctgtggttacaacctccctgggggccattaccctgatgaccacctcactttccccaagcataatgaagtgacccagaatggtgttaccaaacctgtagacatctgagagtcctctttggtgcctttccaccacagtctgagtggtccctggatgtgtgcagcccttcctgtgtcacagcccccttgaagtctgaggccatcccaccggcggtcttatccctacttggaactccatacaggcccggcgccttctcaggcaggactcctctcaccacctcacctcctgcttatctagctggatgccattgatgaaattaaagtgtatgcagaaggcgggaagacacaaattaatacggcaataaattattcctacacaaaataactgtgttttgtgaaagattcatggaggaagccacagacacttaatctattacaggaacacggggtaggctttccacagcctaaaacaggacaaagaaaatggccctccaggcaaagaaagggaagagagatagggaagtgtggggcttgctggagtgaaagcccaggggactgtggaatggtccttggggctgtggcagggatgggtacagctcagaaagcagatgctactagttcatttaagaaaggactctactggggcccccagccccaggatgttctgtgaaaggttgaaagttccagtgcagaccaacccacaaacagaatggacctttggcatcatcatgaaatgtctgaagttaaatttggcacagaataaaatgctatcattgtaaagtttggctccattgtgggaagggaatttcgtctattttatatatagcccttcaaaaagaagtctcctgccagaaccagtattgggcaaggagagcctacctgagttggggttggggggtgtctgtatctactccacggaagtcatcaggaatgatcttcgatcacaggactattcatgtgtttctctgtagtaatttgggtgtgttatatcatcagaaaagggaacaagatgacttccaaagacaaatgggagaatatagtttttattcaaagtatagttgtgaaaatggttagagcacctaagttaacatcttgaaaatcatttgtactttaatcttttcagtaaggatttgtatccataatgtgaaattgcaatttgaaaaagcccctcccccttatttcatctaatctcttacatgagcatttttagatcaaggaaataaaaatctctcaactgcaattaacctccaaaatgacattttccaataaaacggagtgctggatttgacagatgtacagtttctcgtaaaacatgcaacatgtgatggcatgacatcattctgtccgggatctgcatagggaaattatgctgctggctgtctaaccatgtgcattttccgtccaattaggtggatgctcatggaaatattctgttgacatcgctggaagttcacaatgaaatgaatgaggtctcaggcggcattggcgataccaggaattcagcaatatcctttgacaactcaggaatccagtacaggaaacagagcatgcctcgagaagggcatgggcgattcctgggggacagaagcctcccgcacaagaagacccatctacggaggaggtcttcacagctcaaaattaaaatacctgatctaaccgatgtgaatgccatagacagatggtccaggatcgtgtttccattcactttttctcttttcaacttagtttactggctgtactatgttaactgagtgactgtacttgatttttcaaagacttcatttaacactgagtgaaatattactctgcctgtcaagtttttatacctgtacacacacagacacacaagcagacacacacatatatacatacgcaattgtatatatatgtgaactttctcagcatatatataaaatacacgtgtatatgaggatgtatgtgtatatgtttatacacacaggagtcagtgcccatgtgtatggaagacaaatacacatacatatatacattttgcagctatggacaatttaccacaggatgcatattaaagaaagtcatagtttttttcttttttaattgaaagggacaagtatcatctaaatattatgccttgagaatgagggcgtgaaacacaatatcatccccaaatgtgtcttgtattatcataagttagatgttttagtttaaaaatcagaaagacattcttagttaatctttgaaaactcatacagtggtattgctagtttaaaatgagtcacttacttcatatcctctcgttcagtttagtaagcaaaggcttcttggcttctctggtgatggggtttgttttcatcgggcatacgttttctgcaatggtttagtggctggggtgagccactggcagtgtgcttacctgttgtctgaaacatagatagatcccacgttgatgtctgaacgaccgtcttttgaaaactcatcgggagtgaatggcatctcgttgtaagtactctaatatacagtgtgtagtttgtttctgttgttcacttggagtggatccagcttcactgtcatgtgcgaacacagtgacacgtttggccagtgacatttcaatcactgaaaatgtgctctacatctcgtatggatttctaggcctgatatccaacagaaagcatagacgtctcaggttattcgttactctaaggtaaaaccatctaggatgattttcccccttgcagttatgttatcattcttataacattgtatgttaatagaaaatatatttgcataatatgcatatatatgtatatttaccaagattttgtttcttacgcttgctatcatggcagcatgcgatgtcatattttcctttatgtgatgtaactactttctgttatctagaaattaagattgaagctaaaacacttctactgttcaatttcagaaactaagaatcatcctcatgcctttatttctgtatctgacatatttcataagcacatccaactactcctagactgactaggattctgcaggaacatgacccgtacacaccacgcgtcacccaacgacccatgaccgttctctgaggcaaaggagggcaacctgacagcaaacacagtcactgttggttccttctgatccacagcctcatcagtatttggactttttaaagctcgtagaaacaagacaaggtgcaccggtttcatagacgcaaccttaacttactatttagatgagatctttctaaagaaaaaaaaaagagatgatatattttttgtaaacaatatttctatcacaggcatccataaactgaaatgactacagttgtgcaaacaggtgtcacagtgaagttgagcatttggagaaaaaaataaaaagcaaaatttgcaggaagaactgctaaattaatactttatcccaaaatgccacgtatgcctcaccctctctgttctatccaaaaccaaggaccagagtgctccaatggtaggccccagttgtctcgatgtaggtagaggcaccaccctccccgaggatgcgtgtggtgtggactatccccatgagctgaccactacttgatttttctttggtggccgtaacaacctttaatttgtgggcatctgcaacagtt

SEQ ID NO: 6776 - DNA, 6000 bp, Homo sapiens
ggctacagtaggtcaccaacttacaactaaaggaggctgcaaagggaatgcttattgaaaatgttccttatatggaggagtcactttgttgtacctgactgagcgagttagagaaaacgccacactttgaaacgaattaagagtccgtttatttagccggcggccaagagacggctaacgctcaaagttctttcagccctgaagaaggggctagattttcttttatactttggtttagaaaggggaagggggtctagttaaaacaattttacagaaataaagtaggcaaaaaagttagaaggataaatggtaacaggaaagtaaacagttccaggtgcacgggctttaagactattacaaggtgatagacgtggggctttgggtgttatcaatcagacgaattcctgggaactgcggatattgctcgccacagtatcttatcagttaattgcattcttggatgtgctgggagtcagcttgcacaagttaagtccttgaggaaggggctgccggtgaaagaaccaagatggagtctctctggctgtcttagctaagggagagtcaattcaggtggaaacaaggctaggtgattaaaggaaagaggagagtctaaaaacaaggttcgtaataacaggttgggcattacacttgactataggatggggttttctaaaggtacagggaagagagagtgggtgggaggtgagccctggagcactggaagggtggctgtcagggtcagctgcagtaggatggctggtggtggtttcattttgattagcactgtagctcttttataaatttgtgtttaattttaatttataatttcaaagtaattcacagcagaaaaaatgttttatgaaaaaaagctagtgacctgatacatttcaggaaacaagcttgtattgcatttggatattgagtagacgatgaaacttgggatttgagagcaaagggtgaagcctgctccagataattttgggaattctacaccattgggctgggatttcttcacctgcatctcaggaaaacacagcacattttcatttgtggtttggtgtatactcgctgtagaatagtgggggctgggggcagctaataaagagggtcctttttcattcagttctggagggtcttctttcaggggtgactggccctgctcttgagacaagagaaagtacaattttccaaatgcctgttatgaatccagcactgtgttaagcattgttagatcaattaatggctacagcacttttgcaaaaggagcatttttagtttcatttttacacaagaggttgctaaggctcagaataattagataactttcccaagtaaggcacatggcaagggtgtcacccagcgagtctgacacattttgctccagcacactcaacaccgacggcaaacaagcacctgcatgaacagtttatttagtgaagggcatctctcttacatttccctggttctcattggcttaggttgaattctccagatttcttctcacagtacaatgtatttgtcctctgaatgtaggtcagtgcaatcattttgcttttcaaacttactcgactccagaaaagtatctttttagacttataaagaaaaacattttcaaaataattcctatcctatgccagcttttcagatagctttaggggcctgggagacttatatctcttttcaccagccctttcagatttcatacagaggtgactacttcatcttctgactacatttagcatttagatggatgaataaatgcacactctgcctttcggcaggtataaaggctgaaaagcctcagtaactggactcctctcctgccagccctaggctgagtgagaggacccttacatatatacttctttcgcattgctgtacacttaactcagcacaccatgtcctccccatgctaaggacttcagaatgcgtggcaggcagtcttcacagatccagtgacaggcataagacagtgaggtcgcctgtcacttgctgggccagtaggaggccaacttgagacttcggcacgttcgcttccaaagctgcttctcctaatcactctaattgtacttggatccatctttctttctccccactagattgtgagctttttaaaggtaccaattctgtcttccttatctctggatccctaacactaagtatggttcttggcctatggtagataatcaatgcttaaagcaagatggagggaggcagagaaggaagctgttttattattaaacatcaaatagagtcaacaaatggaaagctagataccatcgaagtctgttgtgggaggagagttggttgtgatgttagatatttagtttttggtcattaaacggaatagattggaatttccaaaataaattttgttaataaaagtgccgattccctcagcctaaccttccttgtaggaatgactacaaaggaagtcaccaccacctagggcttatgtaagcttctcaaaacaattttccatcttccctgacctgagaacaacttacctgcaaggttttgtatcataaacttgctgaaccagatgcaaatgcaggtgtcctgtggttttcacagctgcagttaaatatttaaatttggtttagaaattgcatttctttctcagggatggtaaattttttcttcatttcctgtgctaaggaatgtagtcaattacttaattgcagaataatgagcaatatttccgctttcaaatgtgtattcttgtcattttaatgtcataaacgccaagagatttgcaaaagcaggaagaaactttgttgtttatatgtcttactgcaattcatctgagctgcctgaattatacacctaaagatgagctgaggtttcattttgttttgttgttgctgctgcttgtatatactcaggagattttgaaagggcagtcactatgtataaatgcttcacttgtgggtggctcatattccagaatgcctgctcccggcactcagggcttcctctacagcttctaggtccagcaatactttccttgcctcccagcggcactgtggctccaaaacagggagcctgggctagtcctcgtgtctcaccaggaaccgtggcttcttaccttcacatgaaattgtttgataatctggagtgaaacctaacaaccctttttgtcatagttttttctataggaaaacactgcagacatcctaagcaaatgatgtacaaatttgtggaactccacccactagtattgaaagcaatttgagcttgtaaaacacgcatcccatgaacttcagggttttgtgctaactgattgatacacacaccaatactgagagagattgtattttctgtggagagggcccccgatttcattagattatcaaagggctttatgatccccaaaataagccaagatgaataaatggctttttaattcaagtgattttgtttgcaaagtttttaagcaagaccctttttttaaagaaaggttctgtttttaagaaagaccctttgttttgaatgcaactcttactcgaatatttcttcatgctgattctaagttcttcagaaggcttttatgagagaaaggtattgattcaagacatcttatctaatgattttgataaactgtaatagttcaaaccactataattcagcaaaacaactcacatgctccagagagcatactccagagagttccagttcccagtagactggagaattcccttgtgttttcctcctcactgcctgagcactctccattaaatcccatatcccagggctgcaatgtccacaggaacctgtcacggtataaccagaggtgctggcagctttcccttctgtggacagctgtttcaggtacagagggactgggtagagcaggggcccagaaggtctctgcaggtgccctgggctcctgcccacccagaggaaagagcctcacctccgggagcctggccgaggaatgcaggagtccaaggataattgctccacaagggcttccccagcggccttccctggtgagggtttggggttgaaccgctgagtaaatggggtggcagaggtcgtggagggttgcggggtgccaggacctctcattgcctttacctacagccttctaagtactgtatccatccagggccagccccatctcaggattggcgctgcaccttaaccagaagccaaacgttctcagggtgcccagggctatggagacacgtgctaacaaaatacgttcgagtcagtattggtgaacacacattcagtgtgtcagttaattaatttacaggagggatattttataaatgcttgaatggctataaatctcaactcccactaagactgtagttttctaaagtcaggttacatctaattacaaccagaaggggctcggtgaactcagaagctgcaccagggctgaagagtttggtgatgtgagaagtggagtgttaccaccttcggtttgtggggctcacccacagccaaggacgaggacacttctgcatcccctggacacggggctgtgtctccgcagccccactggaagctgctatttttgcaagctctgacctctccaccaataccccctcctcctcctgccaacacattcggtctagatgtgctgataaggctggttgtgccacagccaagagccagtgccaggagacagcctgtctcttcccggtgtgtgctaatctaatcaggcccaccctcccagggcgaggttctccacgccgcacagcgccgcgcacagggaggagcttgcccgccaggctcctgagctgggccacgccttttccgctacgggccacgcccctcgagccacagaccacgcctcctccctctcggggccaagcttccgcgctgccctcctttccaggccccgcccctgattgccgccgcttcgcaaagccctccgtctcccgggagctgcttctccccacactccgcccctgcgcctccccgagcttcagcctctcctgtaaagagcagagatggagaggaagcgacagtcacaacttccggttagcgtggcggaggctctcggagtctttgggacctcagcaccgggataccgggagactccctcgtgtccccatgtgggccacctaccagacagaagaggtaaaagtcggggacgcgggctctcggcagtcacaaggagtggaggcgctcttgcacctgactcccccacacctcccagctcggatttccaaggcctgagagcctccgtttgaggactgccgtttcaggcctctgctggccccctttcgtctctctagggctccctcagctaccctgggggggtcaccaacctaggtagaatgtgaggtccaccctgtggagccatctcctctgcctagccctgtggcgctggttggttttttgttttgttttgttttgtttttttgtttttttgttttttttgcgaaaatagctgtgtagggtcagttgataacaggagctgcttcgaccagatgtccatacccaagactggccctccaggggcagccgcccttcccttcacatagctgaatcttttacttctaggtttagatcagatggttgtttttccaagaattcacctgtagtcatccttcccagaagtggcttctttttctgattgccatatcccttcgtgtttagtatagcacttaacctagattgcttttgaattcttggaacctgcaattattgtctctgccacatgggcagcccctgagggctcacagtgcctcaggttcatcttcgcctcccccaagttgcctagcaggcggtaagcactcaataaacatttgctgaataactgagtaaatacaggcacaccctcagagatactgcaggttctgttccagaccattgctgtaaagcaaatatcatgaagtgagtcacaaattttttggtttcccaagatatataaaagttatgtttatactacattgtagtctattaattgtccaataacattatgtctataaaatatacataccttaattgaaaatactgtattgctgaaagtgctaacaa

SEQ ID NO: 6777 - DNA, 6000 bp, Homo sapiens
atgaacaggaacacattggttgaacccccctcccaggccctctccacaacaacattcccagtgtgagccaggcagctcattctctccacccacttctttcctttgtggcacaaggtacggtagaagatgctggaaggagataaagaccagtggacaagcttctgtcctggagaatcttgctgtgaatcgttcttcttgcaaagaccagctgggctgcccagtcaagccctcctccctgcagcatccagggcaggttcaggttaccccttcttagggatagtgaatgactactcttgggcaggaagatgtggccctagcactcccacagctagccctaggtggcctgcacaagggacatgctactgccatgggcacctgtttcagccacacctgaatttaactgttgggcttctcctgccatatcctcttggtacaatgagaaactctgtctcccaaaccaaggaatgcttccattgtctcaaagacatgcagacacactttgtcatttaaagagttttgctgctaatcatcccgtggaaagaaaacagaaaggacagatgcataacagaaggctgggtgtggtggctcacacttgtaatcccagcactttgggaggccgaggcgggaggatcacctgaggtcgggagtttgagaccagcctgaccaacatggagaaaccccatctctactaaaaatacaaaattagctgggtgtggtggcacatgcctgtaatcccagctacttgggaggctgaggcaaggagaatcgcttgaacccaggaggaggaggttgcggtgagctgagattgtgccactgcactcctgcctgggcaacaagagtgaaactctatctcaaaaaaaaaaaaaaagtcaaaatttcaccaaggtctgacattccaggtgcttttgagatacaagctccattagaattttccttctgctggataaaaaatataagaaaatgccctcctcacctccccacatcacgtgtctccatgaagggccttcttccagcacaggtggtgtgatctcggtccattcccatctccaagcactcagcctggctgtcctccattctaaggagaccactccgtctagtggaggacagatgaggtcactatctgacaacttctaaaccaatgctgcctgtaaactataaggaagaccccgcggtgacactcttcatcctataactgtaggatgtagcattggtttagaagcactggcaccacctggactcatggcacacttgctgcagtgtggacgctcctgctaggagctcacaggggacaggagtgcatgggccggggtgggattggagtgctgagtgactttccactacttccccagcccctgagctgcggagattcagcactgggcaggcgaaggcccagcgttgctgctgtgggcatgccgtgtgtgtctcgaggcttaaggaaaacctcaagatatgttgcagtggccgagggagcagttattcacgggcttcaggcatttccattccagactccactaaaggaaacagaaaccattgcagggcgctctccctggggcccctctctgcactctcttctcaaattcaatttcttatagcttgagttgcacttcagaagtctatgactttctacctagaaagtactcttcttcctgtttcctaaagagttaaattgaaattctttcacatgacatacaaaaaacaaaaacctcactggcctaaatctaatctgtgcttccacccagcactaggtgtactttcctactatgataagaggatacgaaagtgataatgacagtgatgatgacagtgacctcatctgtctcaggcttagtatgtgctgggaacggtgtttgcctttctcaaaatatttcaggtgctcttcaagcctttgcttttgatgtttttgctgcattttgtctgaaaaatttctactcgttctttgaggcacaatgcaaatgtatcttccctctcacctcctatagtagttttgattgccactgtaacagattaccacaaatttagtagcttcaaataagaccgtgttttatctcatgattctgttaggccacacgtgcaggtacagtgagacttggctgggtccttcccttagggtgtcaggaggctgaaattaaagtattggcaatctgtgctcctttcctttctgcaggctctggggttaactgtgcttccagaatcattcaggtgcttggtcaaatacagctccctgtcgtaaactgagatccccattgccttggctggatcttatggtagttctgtttttagttatttgagaaacctccatactgttttccataatggctgtactaatttatattcccaccaatggtgtttaagagatcctatttcttggctgtcttgccagcacctgttatttttgtctttttgatagtagccattctaactgcggtgagatgatatctcatgtggctttgatttgcattttcctgatgagtgatattgagcatttttttcaagtgcctgttggccttttgtatgtcttcctttaagacatgtctattcagatcctttgtccactttctaatgggattatttgattttgggctgtcagctggagcccatctttgctcctatcagctgccttgtttcttcttatgttttccctacagcctttccatcaagggtgactcaagtcctcagtttttgagttcctctgcttttatctctctgactttttctcctgcttcctgttggagaaagttctctacttttgaaggtgtgatgagatcgaacccacctggacaatccagggtcatcttcctatcttagggtatgtgcccttaatgacatgcacaaagtcacttttgcatagggttacatactcacagaatctggtgagtatggtgagcttggtactgagcaatgaatgggctcactgcctgatgtgctggaaaccaatacgatggcaccagattttgagtaaataaaagttttattgcaagtcaactggcaaggagataggaggaaatgctcaaatctctttcctggaactggggtttggggcaggttttataggcagagggtaatgaggcgtgttctgattggatcttgcaatgaggtgatgctgggaggtatggtctgactgcatcctgccatgggctcaatctgattggatgctggatcctgccatgtggtggttgcttcttaactcttcagtctgagcacttaggttccactcatggttgtatgcttggttcatctgggcatgcttaggttacatgaccttcaacctaggggttcatggcaactgaaaataactcaccatgttattacacaaggttgaaccagactgggttgatcctgtggttacaacctccctgggggccattaccctgatgaccacctcactttccccaagcataatgaagtgacccagaatggtgttaccaaacctgtagacatctgagagtcctctttggtgcctttccaccacagtctgagtggtccctggatgtgtgcagcccttcctgtgtcacagcccccttgaagtctgaggccatcccaccggcggtcttatccctacttggaactccatacaggcccggcgccttctcaggcaggactcctctcaccacctcacctcctgcttatctagctggatgccattgatgaaattaaagtgtatgcagaaggcgggaagacacaaattaatacggcaataaattattcctacacaaaataactgtgttttgtgaaagattcatggaggaagccacagacacttaatctattacaggaacacggggtaggctttccacagcctaaaacaggacaaagaaaatggccctccaggcaaagaaagggaagagagatagggaagtgtggggcttgctggagtgaaagcccaggggactgtggaatggtccttggggctgtggcagggatgggtacagctcagaaagcagatgctactagttcatttaagaaaggactctactggggcccccagccccaggatgttctgtgaaaggttgaaagttccagtgcagaccaacccacaaacagaatggacctttggcatcatcatgaaatgtctgaagttaaatttggcacagaataaaatgctatcattgtaaagtttggctccattgtgggaagggaatttcgtctattttatatatagcccttcaaaaagaagtctcctgccagaaccagtattgggcaaggagagcctacctgagttggggttggggggtgtctgtatctactccacggaagtcatcaggaatgatcttcgatcacaggactattcatgtgtttctctgtagtaatttgggtgtgttatatcatcagaaaagggaacaagatgacttccaaagacaaatgggagaatatagtttttattcaaagtatagttgtgaaaatggttagagcacctaagttaacatcttgaaaatcatttgtactttaatcttttcagtaaggatttgtatccataatgtgaaattgcaatttgaaaaagcccctcccccttatttcatctaatctcttacatgagcatttttagatcaaggaaataaaaatctctcaactgcaattaacctccaaaatgacattttccaataaaacggagtgctggatttgacagatgtacagtttctcgtaaaacatgcaacatgtgatggcatgacatcattctgtccgggatctgcatagggaaattatgctgctggctgtctaaccatgtgcattttccgtccaattaggtggatgctcatggaaatattctgttgacatcgctggaagttcacaatgaaatgaatgaggtctcaggcggcattggcgataccaggaattcagcaatatcctttgacaactcaggaatccagtacaggaaacagagcatgcctcgagaagggcatgggcgattcctgggggacagaagcctcccgcacaagaagacccatctacggaggaggtcttcacagctcaaaattaaaatacctgatctaaccgatgtgaatgccatagacagatggtccaggatcgtgtttccattcactttttctcttttcaacttagtttactggctgtactatgttaactgagtgactgtacttgatttttcaaagacttcatttaacactgagtgaaatattactctgcctgtcaagtttttatacctgtacacacacagacacacaagcagacacacacatatatacatacgcaattgtatatatatgtgaactttctcagcatatatataaaatacacgtgtatatgaggatgtatgtgtatatgtttatacacacaggagtcagtgcccatgtgtatggaagacaaatacacatacatatatacattttgcagctatggacaatttaccacaggatgcatattaaagaaagtcatagtttttttcttttttaattgaaagggacaagtatcatctaaatattatgccttgagaatgagggcgtgaaacacaatatcatccccaaatgtgtcttgtattatcataagttagatgttttagtttaaaaatcagaaagacattcttagttaatctttgaaaactcatacagtggtattgctagtttaaaatgagtcacttacttcatatcctctcgttcagtttagtaagcaaaggcttcttggcttctctggtgatggggtttgttttcatcgggcatacgttttctgcaatggtttagtggctggggtgagccactggcagtgtgcttacctgttgtctgaaacatagatagatcccacgttgatgtctgaacgaccgtcttttgaaaactcatcgggagtgaatggcatctcgttgtaagtactctaatatacagtgtgtagtttgtttctgttgttcacttggagtggatccagcttcactgtcatgtgcgaacacagtgacacgtttggccagtgacatttcaatcactgaaaatgtgctctacatctcgtatggatttctaggcctgatatccaacagaaagcatagacgtctcaggttat

SEQ ID NO: 6778 - DNA, 6000 bp, Homo sapiens
tgtgcttttgagatagaggtgctcatgggaggttcatgatgatggtcctctcttcctggtgcttggtctgggactgtggcctcaagctccctgggacattaaaacatattttggaaaaggctgacctttgctccagacacctgtgggagcaccattgtctgtgtgggagtggggaggtgcttctttaggacttaagggcaagcaggtcctgagacattcctaagaaaatttgagagtggccaaacacacgcagggttgaaagtatgagtatcactttccaatgcacaacacagctcacatgcactctggcacttactgttgggttaggtctttaatttaaataaatttaaaagacatagaatagtgcaaagtctactgtgacaagcaccaatattcctactgtgagagtcaacaactgccaaaattggaattttattttatttccattaagccattttgttactattaataataaagaaaatattacagatacggtcaaagcctactctaatccttacacaaagtctcattcccttcacactagcaagagtttggagtacatccattggtcaattgtttatagttttatatgttgtatgtgtgagtatatacgtataagcatccataaacaatgtgtaagcacatcttaagtaaagagtattatactgcatgtattaatgcacatacttatatttttagctctagcaaaaaatagatcaaactcataactgtagcaaagtatttcatcacatgaataaactacataatatcgatccttttttttactgatggacattgtaatcatttctacttctttgctgctgaaaataatgttgcactaaacatcttttatatgtctgtcttgatgtatctttttggcacacacacgtgccagtgtttacttagaagtgaatatcggtcctcctaaaagagaaatccctagctcataagagaggagcatgttcattttcactagcagctcctttattagtcctcacgagtccagacgtctgtgcacacttcctctagagcatgagagggccattttcttatagcctcaccaatgcctgatactgtcacactatatcatttttgccaatctgatgaaaaaattataccaacttattttaattaatttgtatttcttattgttatcatctctccctaagtcaactggccatttgcatttcctcttctgtgaaccgattgcctattcaacacctttgttcatttttctgtggacatcaaccatcatcgctgtgaaaaggagctcataaagctcctgacaaaagcatcacatgctagtcagttatccctttcccttccctgaactctagcccttgtctaagttgcagcaacagaaagctaaaaacgcactctgtcaaaaatgcctttgcataactgtggtttcaccacattgctttgtattttagtaacagtccatgggggtgtacatttctgcctttggtcaaactattattgaggacatgatccacagcattattaaaatctctcctaaaacacctacataacaaactcctctcaagtctcaaagatcagactgttatatccattaaagagtgaattccttttgataagagtagttcagtaaatatcttggtaacctcagattgcttcctttagtcactccttttgtctcagaattcatgagctccaggaaacttagagcaaagttttctgcacatctctaaaagactaacttccctagcctaaggtagtatcttccagctactctgtgtgtgtgttttccttctttttagggtttgcaggttgttgttttcttttatctttgcacgtttcacacttaacactacatatgctcataggatgtagtagacagcaaagcatatgagtaaacatttggcctttggaaatagaaatcgtatgtttgccacagctctgccacttcccagctatgtggccttggataccctacatgatcttcactttcttaacttgcaaaatgggagtagtagtctctatctcatggtgctgcggtattgttaagttaaatggcccaaaacaggtaaagtgcttaggatagtggctagcaagaagtaagtgctgagtaacgattagctattgctgagtaagcaataaacataccgacgtgcttacatttgtagattcacatagcacctgcccaagctaacttagtaaatatgcatgcaattcttcatcagtgtctaagtggaaagcagatactccactctattcagggccttgtaagactggagcatgtggacacttgggcccatcccctctatagtctgtctagtggtggtgttgagttagaagctactgggctacctgctcccatatacacctattaattgtattcacctgggactttgatgaagtctggtggacaactgggtgactcagagccctctcaggaccttgtgggaagggctctgatcagtggaatctccagagctcagtcattcctccatccccttcagctccaaactgcagcctcagacagactacaaaatagatttctgtcccaggcccctggcaaacactgtgtgggcagctctcaccttccctctgttccaatcatctgctcactctgccctgtgccggcctccggtgataaaataaatgagtgttctgcttgaaggctgccctgacctcaccaatctcctacttccagtttgtcacaggcctcggggacagtttgcttctccaaatattttgtatatccagacgttcccatttcctaggagcaaaatagtgctactatagtcctgcagggggtctactccatccccactttccaccatctgggctaggttattttgatggctacataatattccactaagtggatgttctataactttggttaatatactggtaaataggttacttccagttgcaagattaattttatgcatctttgtgcaggaagagtcactggatcaaagaacaagtagagtaaaattttaatatatgttgttattctgttcccaggaggttgcatacatttgtactctcatccgctgtgtaacaactatttctccataccctcaccaacacagggtataaacaaacttcatgtttgtccatcaataggttttaagaaaagcctctccttgctttaatttttaattccctaacaatgagtgaggttctgcatctttttatagctttgttagccatgtcaattaatttttccacaaagtatctttccatgtctaatgcattctttttgtttatggggttgtctgaaaattgcttaatgatttgtatgagcccttggttcgataagaaaacttatgtgttaaagtgtgtcccgatttttttctcatattatctaactttttatgaaattttgatgtgcttaattttttaatgggattaatttactagtcttttcttttatgggtcctaagagtatttacatgcgttacttccctctctcttcacaagggcatagggaacatttatttgtttgtttgtttatttttattactttttgagacaggatcttgctctgcagcccaggctggagtgcagtggcgcgatcacggttcactgctgcctctgcctcccgggttgaagcgatcctcccacctcagcccccccaagtagctgggattacagccccgcgccaccatgcccggctaatttttgaatttttagtagagacggagtctcgccatgctgctcaggctggtctcgaactcctaggttcaagtgatctcctgcctcagcctcccaaagtgctgggattacaggcgtgagccaccggaccccgccaggaacatttatgatgtatcccatttcaccttggagtaaactgaagctcaaagaataatgagtgaaactgggtttagatcttgagctccctaattccccatccaggtcttcttcacagcctggctgcccttcacatcttccaaaaaggtctttcaagttgtcaatttgtttacactactcttccaaacatttatatcgaaagtttaaaggaaacaataagtacataaaaaagaaagataagaaatagacctcagtattaaccttttcaaatatttagttggtgatagcgcagaagaggggaaaccgaggctgtccttgccattcacgctgtgaagatgcgaccctggctcactccccgcagctccagggcagctggaagcagagaactcccatatctctaataaagccgggcctctcgcagatgtcagcgcattgcattgactcctggacacctgcactaaaggcccttcaggcacctccaactaaatatgcccagaactgaactcaccctatctcttctccatctcaggtaagctgccaggtggccaaggctgggagtcatgatgctttctccttctgaacatccacaatcgggggcagagaccttcaccttccatctcctaaacactctacgatgggtcctcttctcttcacccccactccccgcacccctgccacacacctctcccaccattgcacgcgcccagtctccacgcgcatttcctctcccaccctgcagcagccgccctagcatattacctctaatgcaaatcgcaccactgtcccgcaggctgaaagcctcggtgcactcaggacaagagtccacgcttcttaaacaaacggtcgacgttgtccgcgacctggcccggcccaacgggtcagaccgtcattggccatctcacagtcccggcgctccagagcccctcccacagcgggacatgaaggaggcggatacggctggaccttacccggcccgcccaaggcgtccgggacccgcccaggcgctgacgctaactggagagcctggccccgcggtctccttgtcctgccaatctccgggaggcgggatccgtctgagggcctggaccaattcgggagcgggggcgcggaaagaggcggggctacgagctcctcccagagctccagcctccaggcacccgggatccagcgccgccgctcataacacccgcgaccccgcagctaagcgcagctcccgacgcaatggacccggcgctggcagcccagatgagcgaggctgtggccgagaagatgctccagtaccggcgggacacagcaggctggaagatttgccgggaaggcgtgagtgaggagctgggcgggaaggggtcgcggagacggcttcgtggagcccgggtccccagaagcccccaagcgcctcctctccccgttgttttctgctccccaatcccctggacccgattgagagggattccaatggggattgttttcttctttaaaaaaaagattgggcctgttatgctcacaatgacttcaggtggtaagtatctgttcctttcactcagtgacttgcccaaggtcacctggctgttgaatgctgtttaggactggatgtttctgtgacagtggtaaaagtaaataaattgcatttaaggggtaagcaggtgtttaaaaacaaaacaaaatgaaagaatgtggtcgcagctaaggaggtttttacatgttgtttaaatccagtaaagtctgatccagcatctgatgcatactaaggttttcttctgtgttcattacagcatgaacccctctctttgtcgttgccagagggtagcatgggagtagttttgcttgacccttctgacttttcattacagcatgaacccctctctttgtcgttgccagagggtaacatgggagtagttttgcttgacccttctgacttttcattacagcatgaacccctctctttgtcgttgccagagggtagcatgggagtagttttgcttgacccttctgacttttcattacagcatgaacccctctctttgtcgttgccagagggtagcatgggagtagttttgcttgacccttctgacttttcattaagtagccctgggttgctcaaggaaacagaatgcctggtggcttttaagataattttaaaaaccacccacggctcttggagtcagccagttaagatctttttcttcatcacattctgctgtggggacagctttg

SEQ ID NO: 6779 - DNA, 6000 bp, Homo sapiens
caatggttctcaaactttgtgtaaccaagaattacttggagatcttgcttaaaatgaaggttcactgggccttgaccctagtgttgattccattactcagtattcctgggatgggcccataagttgtcattgtctgagctccccagctgactcttattctcatgctcaattggattttgcagccactgatccagacccttgtgttttcctgccccttacattttttgctacaattatatcactgtggtcttattgttatctacctcctggacaccttcgtgatcccctcagtgaatttaaacattaaaaaaaattagctaccattaattatttcctgtggcctaggattgctgagggcttcacatgcattgcctcacttaatcagactagggaggtattattagtcccattatacaggtgaagaaaactaaagctcagtcacaatgtcttatccaagttcactcagctagtaagcacaagtgacagactaggaattcaagcctgtatctgtcggattcccaaggctggactctttttttttttttcttttagagatagggtctcactctgtcacccaggctggagtgcagtggtgtgatcatagctcactgcagcctccacctcctgggttcaagtaatatccctgcctcagcctcccaagtacctaggactacaggtgtgtgccaccataccaggctaattttttggtttttatgtttatatagatggggtcttgctatgttacccaagctagtcgcaaactcctggcctcaagtgatcctcctgcctcagcctcccaaagcactgggattacaagtgtgagccactgcccactgcacccagcctcaaagcatggacccttgaccactaagtatattgcccacaaaataggtcattataatttattgaccctctactatgaaccaggcacttggcttgacaccttacacacaaatctctaatattcatggcatacctcttttcctagaggtattaatttcagtccagagattctgatgtgcaataaatttctctattctctgtaacccatctaaattcctgactcttaacccctattttcaggccttctggatttcttctccccaccccacccccaaccccagtagttatgccatagttctggacaaatacaatagccaggcatggggtcaggggagtgtgacctagtcctctgtcatcagtccacattggtggccactgaggggcccatcctcccatcaacatgacctgctggccccagagactcactgctctcccaccctacatcaagccaggtatatcttttgcccatgtgccaacacagccatttcctccctgggttcttctcttccagcaggatttctgggaagcaaggtactgtcccctctgctctcagacccatagacaaacctcccccttccacaccacctgcaaagcccaagagaatgtctttctagtgatggcaaggtgaggggttccttctcccttcacatcccctcaagaaatgttagtcttttgcttttctttgttggctagaattcacctgcccacactttgggaggccaaggcaggaggatcacttgagcccaggagtttatggccagcctgggcaacataggaagaccctgtctctaaaataaataaaataaaataatataaaataaaataaaattcacttgccctaaggtcctatatttttggaagacaaaagatttgtagccttctctctactttgcccctcttaagtggaagggagacagtttgggagaaaaataagttgatatctcaaaatattatctcagatacatgttgtccccattttataggtgaggagattgaactcattaaggttatataatattatatacagcaagtagataggcctaggacccccccagttcaggaaatctcatactctgtgaagtcctcccctcttccctgccagtagcctccctggtcagcttcaagaaaacacaacagagcttgtgcattaaaaccaccactggaaggtcagacccggtgatggggcaggctggaagagcttaggtagaggtgaaagcagacaacaccctgaaaggggacaggtacccactcctccttgtcattttccaggagagccttatagaatttgagttggcatgagatgatgttagaggaatttggggtggtgcaagtaaaggaactacaagagctagaaacaatcttgaaggcttcttcccatgttgaaagtgttcttaccacgtagaaagtggtaagaaagtgtactctgcagaaatttggggggcgggtgggggcacacggttggtatttcagaggcacttggattcactggtgtcttttgatgagtttgtgtcccgaataaaatggggagtggcggtggttactggcagtacccagaggagaggagatgagggtgggcacaggggagaggagcccgagatgggtagccagctggtcttacgtgccagctttataggaaaaaaagtggaactttcagattctgcttaactgtgcaggagccagccaagtatccaaggcagaagtccttgctcagaaattgtatatctgatgggcacggtgactcacgcctgtaatcccagcactttgggaggccgaggtgggtggatcacaaggtcaggagttagagaccagcctgaccaacatggtaaaaccccgtctctactaaaaatacaaaaattagccaggcatggtggtgggcacctgtagtcccacctactctgaaggctgaagcactagaatcgcttgaacctgggaggtggaagttgcagtgaaccgagatcgcgccactgcactccagcctgggcgacagagcaagattccatctcaaaaaaaaaaaagaaaaagaaaaagaaattgtatatctgacgggatggtccgcaagcttcggggcttgggaggaaggtacagtcataggacagaacacagctttagactgggtcaagatcgtccaagtctggtggtggcttcagaaggccctttgaatgaggctcgtccaggcaataattaccatgttatctaattttgcccgcttaacgtttccacttggatgtctaagagccatctcaaagccccacgtggccaaggctgaatctctaatcttcccccaacagacctgcttcactcacagcttccccttctcagctgacagcaaccccattaatctgcttgttcaagccaaaaaacctggaagtcatccttaactcctctctttctcccacatctcacaactcagcagtcagaaaatcctgtgggctctaccttcaaaatatatccaccacccatccaccactccgcagttgccctttaccatgctgggccacgccaccatcacctctcactgggccactgtaatagccttctaacagatctccccactgcaccctggctcacttgcaaaccagagtgatattttaaaactataatacaaatcatatcacccttctgctcagagtcgccccccatgtgtcaatgcataaaagtcaaagtccttacaatgtctccccattcattggcctccttgctattcctggagcacaccaggcatactcctacctcagggcctttgcacagactgcccgaagctctcctccccaagacgtccacaggggcaactccttcacttccttcaaacctttgctgaaagtttaacttcccaatgcaattcactctaaccactctgcttaaaatccctaccttctccccaaccccctgcttttcttgtagtggttcccattacattctaccagtctacctaatttttttttttttttttttgagacggagtctctctgtgtcgcccaggctggagtacaatggcgcgatctcagttcactgcaacctccgcctcccaggttcaagcgattctcctgcctcagcttcctgagtagctgggattacaggcactcacctccacgcccagctaacttttgtatttttagtacagatggggtttcaccatgttggtcaggctggtctcgaactcctgacctcgtgatccgccctcctcgcctcccaaagtgctgtgattacaggagtgagccaccgctcctggccagaaatctcttctttattatgtctactgtccgttatccaactccagaaggtaagaacctccactgatacataaggacttgtataccccacgtgcctgcaacagtgcttggcacctagtaggcataccaaaatatataaatgttgaacaaatgaagaaagttaaagtaaaactagaggtccaaaaatatcacaaaagccatctatggtcgccttttccctacctgattttgctgagtggccttacttttcagtcctctacacagctggaacattaatgaacacagagggggaagaagtgtgtttactctaggatcacctctcaatgggtcacttggcaagggcatctttgcttcttcgtcagctccttttgacacgggggtgaagggttttctgcaccacactttgaccacaagcatcaccaatttcactgaacccaacagaaatttggaccctctgggggctctctgcgtggcagggcccttttctttttctttgggcttaggctgcaatttgaaacaccactttcctgagccagcatcccccttgcagcgctgtcacagggaggcttaggcagccacgtggaagccacctaccccgacctttggcagaatttccaaacacaacacagtagctttaagttgattaatttggaactctgaccttggccccaaaaggtaagaatacataacaaggtattttattctcaaaatgtgtcaggataagaagcacttctgtaaatcgacctttttaaaatagatataattagatttgcagttgggggcagtaaagaaagggtctgaacagtggataacatgttgagaggttaattattaatgggcagtcttccctaacaaagtatctaataggcattgtggtctctttggcttcagaaattaccaagaaagcctggaccccgggtgaaacggagaaatggacacaagtcccctgtgtttctccattctgttggttttatgcatctttatccaatcaagtgcccttggacaaagcctgaaaccaggtaagagcctgacttttctccagagatgggcatgaacttttctttttaaaacgtgtgtcacaaagaatccaggggtttctgactgtatgggacagagcttgcttcagagcgtgccaggtggttctatacacgacctcacaggttcacagggacacgtagccgtttgtaaacagaaatgaaattttagaaaatcatcctcggattaaaagtcttctaagagtgcctgcagctagcagtgaagtctcttgcgtatctgatatggaaacagtcatgctaaaagttattcagcggcaaatgatatgaaagcgattcagatcttcctgagagttaatgtggcatctaatttgcaaccggggagccaggcttgcaatgaaatgctctgtcgggttggggttgtctaattgcctgcctctctcagaagagaggggaatttatgagagttctatttccagtcaggtctaaagtagagatatcattgcacaatttctagactttgttttgctgccaaaattttagtctgaggctgaagaatccaacagccgtcctgcctgttttgtttgtaaattcacaaactagattgatggcgaaagacagatcaaatgccttatcaggaaggtagtagagtggagcccagcttccaggctaagcagtggaccaataaatgacggatcagttaattgaacaatttggccagactagacaggtgtttgggaatttgttttggtactggttactggtcaggagctagtaacgctaaggtagagtctgagatttttcttttctctaagactagccttggagagagctccgacaactttgagaattagaaattccctaacgggatgtacctaaaaatttcagaagcttttttcccctttaagaaaaaggctgttcctttgtatttgact

SEQ ID NO: 6780 - DNA, 6000 bp, Homo sapiens
gcacccttagaaatcatctagtataaatctcttattttatagatgaagaaattaaagtcaagagagtccctaattcaaagtgaatcatgtagttcatttggagtcaggattaaaatccaggtttctcaggctagagtgcagtggcacgatctaggctcactgcagccttgacctcctgggctccagtgatcctcccacctaagcctcccaagtagctgggactatagacacaagccactttgccagcctgattttttattttttgtagagacagggtttcaccatattgcccaggctggtctcaaactcctggcctcaagcgatctgcccaccttagccttccaaagcacaaggattacaagggtgaaccaccacaccaggcctggaaaatcttacactagttttcttttccttgcgaaacaaaatttgtgcaaaaactttaaaactttaattccaacttgaagctccatttccataaataacctattatttctaatgatcttctaatattttaaaaataacaagcaaagctttataggggagaccttcatctttctcctgaagaattctagcatgcatatagagcagctgccctcactgtattctgtggaacactgattctattggatgttaacgaatgtattaaggaaaaaaaaacaacaaaaaactggttccttactcaagtagattgggaaacaaaattaaaggagattctttaccaaaccatttcttgttgttttcatatgttatactaacggcactaagactctcttgagtgtgtgtgcagaatataatatgtagaatttctcaaatttatctaatcttggaaccatcctcagcctagtcctgatgtgttcattttttggaacggagtttcacaaataatactatgaggattcctaggataaagaaataaatgatccagagtactcccactgaggccaaagcaactttttattttttgtttatttattttttttgcgacagagccttgctctgtcccccaggctggagtacagtggcacaatcttggctcactgcaacctccacctcctgtgttcaagaaattctctgcctcagcctcctgagtagctgggattatagatgactgccatcacgcccagctaattttttgtacttttagtagggacggggtttcaccatcttggccaggctggtcttgaactcctgacctcgtgatccacctgccttggcctcccaaagtgctgggattacaggcgtgagccacagcacccagcccaaagcaactttaatttaggttatagtttacacatttttatagcaagtaggggagtatttaagtagaaagaatatatgattccaatgactaacttaatgttttcaaaagtgttcatttaaaacttattaaagcagggccaggtgtgggctcatgcctgtaatcccagcactttgggaggccaaggcgggaggactgcttaagctcaggagtttgagacaagcctgggcaacacagtgagaccctgtctcaaaaaaatagtaagtaaaaaaaaattattaaaatgtggctaggagcagtggctcacgtctgtaatcccagcactttgggaggctgaggcaggcagatcacgaggtcaggagttcgagatcagcctggccaatgtggtgacaccctgtctccactgaaaatacaaaaattagccaggcgtagtggcacacatctgtagtctcagctacttgggaggctgaggcagaagaattgcttgaacctgggaggcggaggttgcagtgagccgagattgcgccattgcactccagcctggcaacagagcaagactccatctcaaaaaaaaaaaaaaaaaaaaaagtattaaaatgtaataagaaggccaggtgtagtggcttatgcctgtaatcatcactttgcgtgggcgaggtgggtggatcacctgaggtcaggagtttgagactagcctggccaacacagtgaaaccccatttctactaaaaatacaaaaatgaacagggcgtggtggcgggcacctgtaatcccagctactcaggaggctgagacaggaaaattgcttgaacctgggaggcagaggatgcagtgagccaagatcgtgccactgcacttcagcctcggtgacagagtgagactctgtctcaaaaaaaaaaaagaaaagtgtaataagattatcttgaaaattagacaaaattgcgtgaaaattattgccccaatagaatgtatatccatttttatgttttattttgcacaagtgtagttatagtacattcacatcttggtgtttgtttactttcaatttaatttactcacattcgctaaacatttattcagtactttctatgttctaggcaacaggctcaaagataatatatagcttctgacctggggggatttagggttgcctatagaggggtagaaataagtgctcaggggactttaacaaacaaaatgcaatgtggtaagtgctattatgcagcatataatgcaacaaagaagaatgcccaatagggtcagaagcttgagataaatataaggttcatgagacagaacgtggtaaagacaaaaagtagaaaggagcagaaacacaatctatagttaggtcttcctacaatcagatagatacacattttaggatggattggagaggcaaaagacttccatttctgccttgtttaagtagtctgctatgaacacatatttttaaaatcagaaaataaagtggaggtggcaatcttcagcctctcttacatcatcatcatcttcaagagtcccaacttttttgttggccaaggaagcctttttcaaccttacctcccacagcatctccttccccctaactccagccatatcgaataacttggagtcaaagaaatacaaattaaaaaataatacagtaccatttcaaactattaaaaaaattatagactgtgaaatgtaaatggtgccatttttcctagtggacattttaattttttttgttgttgtttgcagaggcaaggtctcactatgttgcctaggctggtcttgaacttctgagctaaagcaatcctcctgcctcagcctcccaaagttctgggatgacaggtgtgagccaccacgcctggctcctgtgggcatttaaaatgaaaattctttaaaaatgtgcatactctttgatccagcaactccaatttcacttctaggactataactttaggaaataagaaaagacatacagatatgttcacagcaacactggttataaaaggaaggaaaacaggaaacaatttaaatgtccaataataggctatattatgaaaaaggtataccatacaaaacccaatcactttaaagaatgacatacattatttaatgacacgtcattaaaaacacatcaatggtgttatttggtaatgatgtgatacatcattaaaaacaccacataacctagcactttgggaggccgaggcaggcagatcacctgaggtcgggagttcgaaaccagcctgaccaacacggtgaaatcccatctctactaaaaatacaaaattagctggacgtggtggcgtgcgcctgtaatccctggtactcgggaggctgaggcaggagaattgcttgaacccgggagacggaggttgcagtgagccgagatagtgccattgcactccagcctgggcaacaaaagcaaaactccgtctcgaacaaaaacacaaacaaaccaaacaccagatatgtggtgggcactaatctcacaagccttgaaagtaggtagattatccaacttttacatgaagaggctgaaacaaattcaacttgcccaaggtcatacaattattaagtggtgaaaccaggattcaaaaggaggccatctgctgggtgcagtggcccatgcctttgtaatctcaacattttgggaggccaaggcaggagaatcacttgaacccaagagtttgagagcagcctgagcaacatagcgaaaccctgtcaaaacaaaacaaaacaaaacaaaacaagactggggcgtggtggcgcgccctgtggtcctagctcctcggaacgctcaggttggaaggaacgctcaggtgggaagatcgcttgagccggggaagtcgaggctgcagtgagccgtgatagcgccactgcactacagcctcggcaacggagtgaaaccctgtctcaaaaaacaaacccaaaacaaacaacaacaaacgcaggctaactgaataccgagcccatgtccccttccatgcccacaatgctgccttgcctttgtgcagaatgtggttagaactgtttacctcgcaaggttactgtgcaagtgaaatgaaataaacacatgacacagtggacattcaatactcagaaactactaagtaactcgctcaaggtcaagctaggatttaaacccaggatttgaatcttttgttccagggagcgcgtaggaggttaagaagcttttcttggcttccttttttttttttttgagacagagtttcgctcttgctgcccaggctggcgtgcaatcgctcggtctcagttcactgcaacctccggctcccggatccaagcgattctcctgcctcagcctcctaagtagctgggattacaggcgcccgccactaagcccggctaatattttgtatttttagtagagacggggtttcaccatgttagccaggctggtctcgaactcctgacttcaggtgatccgcccaccaattcttaacgctgagtcagtatgggctttccttcagccccataaagtgcacctcagaggtcagggaacacataacaaggacattcaaaaggggagcgcgcggaagtggctttaggaagcactaagtcttgcctggttttttttcctccctgcttttctaaatccaaacccggactcctcaacccacagcaccaccaatttccagggcggaaatgacgtcgtattcacgcgccggaagtgcatttgcagagtgagacaaagcggagaacgctggtgggcctgttgtggagtacgctttggactgagaagcatcgaggctataggacgcagctgttgccatgacggcccaggggggcctggtggctaaccgaggccggcgcttcaagtgggccattgagctaagcgggcctggaggaggcagcaggtgaggcacctgggcaagctgtacatcactgttcatcccagaactgcaccagagtaatgagacctgagccctcaggcataactctgaaaaagatgggtggcacacagacatcacctggggaggtagcggcttttctgccgtggaagtttctctgctcaaacaatgcttacatcagtcctcctgataagtcaaaggactgaggaacatacgagggggcttggtctaatctgagtaggtgcatctgaagatctttattcctatgattggtagatcaggaaatgtgggataagaagtatcggaggttgcagctttagtttcttggtttggttttttaggggtcgaagtgaccggggcagtggccagggagactcgctctacccagtcggttacttggacaagcaagtgcctgataccagcgtgcaagagacagaccggatcctggtggagaaggtacagaggtatagatgttaccgtagcccatgggccagtcctgagttacacactcatcctcttctcctaggtggagttaacgtagatagctcttatcctgaagatttggaaactaaactgcttgaggctggtatttcggtattttatatatcagctacaaaagtgcttaataatttgaaaaatagaagatgtttggaacataaggtataagaaagtaggttgaaaactatcttttggtggcaacatcttccagttgaagtgatcctttttctactctggttcccttacaccacatatccaactgtcaggatactctgttggctttacctactactttttcctgtgttcacctctcatcctaatccaagccaccatccttcatctagatttctgcagtagcccggctaatttttgtatttttagt

SEQ ID NO: 6781 - DNA, 6000 bp, Homo sapiens
gccctgcaattttattttgccctgggtcttgaaaattatgtggccaatcatggtcacccaaaagggcaagagaccagcaaagggatgctgacaaaatgataaaagtcttgcggttagtagagaagcaagtgaagagctagattagacatgctactgcccaggtcaaggctacagatcccagttacaccaagatactggttgggcaacctccaaaacatctataagagcaagtaagaactttaagtccccttccctctcctatgtagtaggtatatgttcatcatcatagcaagcttggtgggagggaagagcagatgtgctccatgtggaaagagataaataaacaaagcctccttcctcagttactgcttttctgcctatagtacacctcagctgccagagggttgaatactcaactctataccaagttcagagttttgactactgcatgatatcaggtttcttgattattgaactggaacattgatctgtgactggaagcaaccagaaaatgtcatgggatttccaagtttccatttggaggaagaattagtcccgtggaaaagataaataaatttaaagaacaatgggagaccaaacaatctatggacgagcacttgttcagccaatgattatatcatcaggtcaaagtcaggcagtcagaggtaaaaactctcactgacagtttgacagaccttgtgcgtgtagaaaaacactcagtattgcctttaaaaaccaaccagagtatcaataatataaagggggaaaacttccaatatactattttcaataggaaaaaatccatggtaaaaacttgtatacatgtatagaattattatgcgtcaattaaaaacaaaggaaaaaaaagaaaagataacaaacaaaaataaatttccaagtgtactctttttggttggaggaaggaaaaaaaacttgagcctccattataaatggaaataaatgtaatacatctcccctcagacatctaatctgaatgcatagcatagacaagcacggggataaggagaggactccttctttatatccatccttcactgcccctgagttatctttctcaaagacaatgattttaccactcttttcttagaagtctcaaatgcctcttcaggagctttcaaggtgaaacctaaagtctgcagcacacacacgtggtgctcctcagccaacatagctgtttcttccccaccatgccatgccacatacactcttagagctgtttcccagacttcagccactcacacaccaccttcacggtgttggctacattcacgttctcccagaattgctatcaacttaatatttttctataaatcaagcaatggttttacttaaaattatcctcatgctaagcaatgtcttttagtcaagttttaatgtgctactttcaattttactaaatatttgactattactcttgaaattaactttttaaaattaaaaagttgatctctgtgtcatgttataccactagttgttcatgtaacacacattggtatgcactgctctagacagaaacgacagtgacttctttattgtacactgagcatactgtgcctttgaacctgttggtttcctcctcttaccgtgccctttgcattatctggtaaagttattcccttcctttaggattaacttaacccaaagttgccttctcatggaagcttccccaaatcacttaaagcttgatgtttcttctctgtattccaaagcactttctacctttcttcagtatgacatttatcacattgtaaggccatactgtgtacatgtctgtctcccttatgaaactgagtagtcatccatgagttatcccattatctaggtcagtacataatagatgctcaataaaaatatttgttaaacaaaagaatgataggtatgtagccaaagctaagttaatgatgtcatttatagcatgactatctcagcacaatattactttggttaaacaaaagatgccccaaagtctcaatgtatggaagattctctacaattatcaaataagactaaaaaaaattaaatgattatgttttctatatatggcagaaagaacacagagctggaagacttgagaaaagagtataaagttacattggaagtcagtgtaaattttttataagactttgcatgtaagttcttccggttattcttttttaggaatcctccatttaattatcactaactaattgcaaattttaaagataaaagggaagcaaatttaaaataaagcaaagggtgattaaagcagcaaccaagcattggttacctctgatgaaatgacctcatcaaaaacaaatttaaaaaaagttactaatatgaagcatacataaataactgctccatagtagcatctccatgttataatcgagaaaattcccttttcctgttgcacttttccagccttccagaagaatgagtcagaaaatgttctgggtacagtcatacacatgggagattttttaatgttgccttttaatcccagcaagatagttattccctcttgtccttatttttcttatattttttattttgaatactgatttataaagggtcaaaatataagttttttatattttgcttatactgaaaatgataatgtttataagataaaatctttgaatgcttttatagggatgaggtctctcagcaactccacagaatggggcaaagcatggcaccgaaaagttaacaaggcaaaaacagctgctctaaagctgcgctgggtgttaatcaaaccatctcccaaatagcaggaaggcttatatcaaacaccttaatttgcccccaatgccctgtttttaccttgatttaacaattcccagtgatagcaatctgttgtcctcatcccacacaaggcctcaagcttggggttctgctgctcataccagcttgccttcggtagcctctcaaggagaaaagctccccaggaaggagatcgagctttatttttatcccagttaaagtccctgtccaatccattaacagcttcgataaccttggtccagggcatttcctgcagaagctataaccagctggggttaatgaactctccctaccattaattcctgggagaggccattggcctgaattgttacttaattactcttctgtgtacagcttcataaagcaatgaaatgccttctttcaggaagaagggagatggtaatgggggtcatcagaggccattaattttacaaatagtttattggaaactacagtatgttaagaagtcactctggctcacaaatcaactcaatgtggtccttactaagtagagatccaaaacttcccaagtttccgtgacttgcatacacaaaaagttacaatggtacagaatcttatcaaaggtatatagcttcaggtatgcagaactatattctttagattctgcaactgatcataccttcccctccagctcttgttcctaaagttggcagaaaagactcaataaagccagtttgagacatcataaaattttccaatttaaaattctctttcaggtaatttctcagtcttttaaggagattctccctctccagagtgctgctctttcctaagatggtggcaggtacaaggaagagctaggtacccaggaagcatcacaggaaaagctttgggttttcatgccttcccttcatgctcctagatctgctggactctgtgtccatctcagcacaactggagggcttctcttgtccaccaagcttcttaccacatctacaccccacttaacgggtctgagaatgctcagtcgcttcttctgcgccaccctaattatacttgcaacaacctcctcactcttacctccttcacctgtttatgtttcctcatggcagtgttaccaagcaaaagagtgtcactgcccaatgtgctggaagccaatactatgacacaaggtttgtgagaaaaaaaaggctttttactgtaggtctactaacaaggacacaggaatccaactcaaatctgtctctctgtgctggctctcaggcagtacttttattagaaaaggtttagggagtggattctggaattagcaaatgactggtagaagaaaaggggaggtctggaaagtcctcaggcatgcacgattatctcttcatgcctccttatgggtcccatgtgcaaattcaggggaaattagtataaaacatgcagtggaaattcaagctgtgacatcagtaagcttgttctgcacagactccagttggccttattggttccaaccaatttcagctaggttttttgttttgaaatctctcaaatagagggagtttcagcatttcagcaagttgtttattttcttatctgctattctgcaagctcaagaatttgttagtcactggtttctttaactctttggggtaaaatttcagcagtctcctcttttatcatatcaagtaaaaataattttatttattttattgattgtgttaccagtcccccctacacacacgcgcgcgcgcgcacacacacacacacacacacacacacacacacatcttagaatataaacttcatgaggtcaagggcttttggctgctttgttcattctttccctccagtgcttagaacagagcctagaagatacacatcgtgttcattcagtgtttcactgtttgttgaatgaatgagtagttagttggctacatgatgaaattagactgctggccaaaagacctagactttccattttagtcacactgaggcaggaagagagctttatctgccagagaaataaaagatagaggttgccccttcaaacagcccagaaatcaaatccattgaacctactgctatccagggaagacttggccatgaaatccacacacttatctaggctctggactctacacaaatgatgagaaaccattgccacccaccccactatgacatgttgccccgcccatcctatgtcatgacctctcagaatgttctgagattctattggatagttccagtggagaaagattagactcctcagaagctaattgactagggaaggatcaggaagacaagacacatcaaaaaggggaggtagagtttgtagaagaaataaaggggaaaaaaagaaactaaggggaagggagagacaaatgatttacatatacttggttttctgagccctctttaatactaaagatcttaatatctggaaattctggcataagcaaagatagagagcaaagattacttttcagggatattgtaaacctacatccatgcccatggggctttatggaaagcaactggcctagagcaaaaagagacttattgattatctctatttctttatattgtcttgtataaacttccacagggttttatgttgataaaccatctctgactatatctattaataggacgtatattccagcattatctctgtatcctgactgtatctttaatagggtataatcagaacacgggcagaagaatcaaaaggctgagttttgtcatggttaaaatgtggggattagagggagaaaatgagttaacttaatttgatttctactttttgggactcttccctagttactgtattcataaatgaacccatttctccaattcattagatacatctctgttggcattttagggaatctacaatggaaggacacaagaaagatcagctggattaagtagtcatgattatgcaaagccatatccagagaccaaggtgtaaagcaggttcgctattgaccccttgcctcatcttccagcctccttctccccttctactcctgttatgcaaccacctccgcaccctaccccaagcatgccataccttcctgaagtgattactgtaaatcccccatccaagcaagcccttccaagataggacttaactttccaatattatccttcattcctatctaaaacaaaagcctctgtgcctcactgtgctaatagtggttaatcaactgaaacacaaaccaatgaattaatttacattagtagaaaaagaaaaatatatcaaga

SEQ ID NO: 6782 - DNA, 6000 bp, Homo sapiens
cgatgaacatagacccttatcagtagttctgcttttgccctttgcattgtgatctttgttggacccttattagtagttctgctttttgccctttgaagcatgtgatctttgtacctactccctgtccttacactccctccccttttgaaacccttaataaaaaacttgccggtttgaagctcaggtgggcatcatggtcctcccgatatgtgatgtcacccccggtggcccagctgtaaaattcctctctttgtgctctttctctttatttctcagccagctgacacttatggaaaatagaaagaacctatgttgaaatatcgggggcgggttccccatactctaaggtttttgcaaatgcattttacatatgccacattccttgggttttaaattagatcatctcaatcatgtctcccaaatttggttttaaaatatccttccacatgttttctagtggtgtagtattagataaaaccaaaaccaaaattttattttattgatatgggtaatgctctccattcatacattacagccctggtccctcagtcactaggttccacattttggcactattaaaaaaaaaaacaaaacttttattttcttcccttgaatatccaatcaggtgccatgttctatagtttttatttttaaaattattgttatatctgattattcctttctaatctcaatgttgtattctcccatctttcttcttcaggtctttgtaattaccccactacctggattattgcaatctccttccaacaggattctctctcacacctatcctctggacagccagttctctatgccgttgccagatccatcttgccaaagcagaactctgttgtcttcactcttggcatttacaaaggccttcctcaatgtgcctcaagccaagggtctggtctaattaccattattcctcttggcatagcctagccaaactgaaacactcactgtccctgcaacatgccctgcattttctcatcttaatgctttggttcgtgttgttaggtcttagtgcaaagtgcttttacccaccccaacctcaatctctgccagtcaagaaatattacccatcctttatatgtggcctccataattaaacttttcttgattctttccaaagatgtactgtctcctagtttgttgttgcttttgttgttgttggtggtggtgtttgagacagtatcttgctctgtcactcagtctggagtgcagtggtccaatctcagctcactgcaacctccacctaatgggttcaagtgattctcctgcctcagcctcccgagtagctgggactacaagcacgtgccaccatgcctggctaatttttttgtatttttattagagacgggctttcaccgtgttagccaggatggtctggatctcctgacctggtgatctgcacgcctcagcctcccaaagtgctgggattacagacgtgagccaccgtgcccagcttctctctcctagttttaaccttccccctgccttttatatctggtcatctcttgtggcaaaaagcatattcttcatatattaaacttacttatgtatgtctctctcctacataagctcttaagataatgaactatagctctttgcctacttacctttatgtttctttatgttttctgattagatcaatgtattctattccaaaggtactccaaaatttaattgaaaattttaaattgaaaattcaatttaattgaaattggcataaatccaatactgacaacatgccccaaggaaaaaactcaaagggagttttttttaaagagcactacttgtgtaaaaatattcactcagccaggcgcagtggcttatgcctgtaatcccagcactttgggaggccaaggcgggtggatcacgaggtcaggagattgagaccatcctggctaacatggtgaaaacccgtctctactaaaaatacaaaaaattagccgggcatggtggcgggtgcctgtagtcccagctactcaggaggctgaggcaggagaatggcatgaacccgggaggtggagcttgcagtgagcagagatggcgccactgcactctggcctgggtggcagagcgagactctgtctcaaaaaaaaaaaaaaaaaaaaaaaaaacaacatatatatatatatatatatatacacacacacacacgtgtatacatttactcagaacaggcagaagcggataagatggcagcagcaagcagctgatcagggtgggagaaccagtggtagtggaggcagtagtggggctggcggtggttccaggtgcggcacaggcagtggccatagcagcttgttggataagtggaagacagatgataagcctgtaaaaattgacaagtgggatggattagctgtgaaaaactctttggatgattctgccaaaaagttacttctggaaaaatacaaatatgtggagaattttggtctcattgatggtcgccttaccatctgtacaatctcctgtttctttgccatagtggctttgatttgggattatatgcacccctttccatagtccaaacccattttggctttgtgcgtcatatcctattttatgatgatggggattttgaccatttatacctcatataaggagaggagcatctttcttgtggcccacaggaaagatcctataggaatggatcctgatgatatttggcaactgtcctccagtcttaaaaggtttgatgacaaatacacctctaagctgaccttcatcagtgggagaacaaagcagcagcgggaagccgaattcaccaagtccattgctaagttttttgaccacagtgggacactggtcatggatgcacatgagcctgaaatatccaagctccatgacagtctcgccgtagaaagaaaaataaggccgggtgcggtagttcacgcctataatcccagcactttgggaggccgaggcgggcagatcacaaggtcaggagatcaagaccatcctggctaacacggtgaaaccccgtctctactaaaaaatacaaaaaattatccaggtatggtggcacgtgcctatagtcccagctactggggaggctgaggcaggagaatggcctgaacctgggaggtggagcttgcagtgagtcgagatcgtgccactgcgctccagcctgggcgacagagcgagactccgtctcaaaaaaaaaaaaaaaaaaaaagaaaaataaaatagccaattctaaaagtagccctctttctgttggatcttgctgaattactggtttgtggggtgggggagataaaaagaatttaaaatggataaagtaaaaaaagtttaaaaatccctgttttgtcctgaaattttagtctgttctggataaataggattttctgagagagatatgagaagttgtagctctgatgtctagctgtagtctcctgggtctgctgattgcattattttaatttgcttttctgggaaagcagttttgctaaaagctgtacagactttcctttgtacctagtagtactttatatagtatagctttgggctatgtagcattttaagactcaattaataaaaaattaatctgttgctgactctgttaattcctatttccacatgtatttccttgaagaattcaggatacgacttcttgtgtatgacagttttccttcacacactatttttgtgggtgtgtatatatctgatttggggagaatttaaaaaacacatagctttttaatttgtttgaaacagaccttttgcctgttacattttgtgctcttaaccaattaaagaagccaatgacatgttagttttatattgtgttttccactagtatatccctgttgatttgtttgtgccttttattaactgccattttctaaaatttttttcaataaagggaagacgtgaaaaaaattactcagaacagcaatatataataaacaattaaaaaatcaacaataagggagttgttagataaattaaggtagggctgaatctaattctcctgggtctggcccataggaagtatttaatacttattaaatgaatggtatactaccgtgttgcaatattatttactcaggtgcatgtgaaatcagtttaagggaaaaataactttcacaaaacataggaattacatctatagaaaacctatgctgccgggcgcggtggctcagcctgtagtcccagcactttgggaggcggaggcgggaggatcgcttgaacctaggagttccgaggccagcccgggcaacacagacagatcccagtctctacaaaaactatatttaaaaaattagctgggcgtggtggtgcgagcctgtaattccagctacttaaggtcagggaggtcgaggctgcagtgagccatgatcgcgccactgcattcctgcctgggggatagagaccctgtctgagaagtgaaggaaaggggaatggtagagggaaggggaagagaaagaaaagaaaacctatggaggtacgttaataatcagaaggggccagaggaagccacctgacacatttgtgagacaatttaaaaggcgttctcatacattctcactttgatacaacaaccctgcaaagtgcgcacggaaggtgttattaactccgttttacaggtaaggagatcgacccactgaggtcaggagtgactgaccaaggcggagccaggactctagcccccgcctcccggccactggtcccggtctccttccccgccaccactcggccaccgtcattggtgttcagagtttcggttctcttttctgtgatcgtattacttatgcaaaacgagcccagtcacttgcgcggccagagaggggcaggtgctgggcggcggctgacgggcgcagcaccctaggcccagtgtctggctccagccccgcatccggcgccggccccgcatccagctctggccctgcgacaatagagtccggaagtgcaggcaaagcggctcccgggagcgccgcgcggtcctgcgcgggatcagcgagggccgcgccccggcgggcgggcggcatggctgcagtgctggctctcagggtggtcgcggggttggcggccgcagcgctggtggccatgctcttggagcactacggcctggcgggccagccctcgccgctgccgcgccccgcgccccccaggaggccgcaccctgcgccagggcccggagacagcaacatcttctggggcctgcaggtgacgcggcgggaagccgggccgggaggcaggtgcagatcgggcaccgtgcggtgggacccttgcgggtgttgggccccacgctccaggctggggacctcagtcagattgtaactcgaggctctgtctagtgctggccctgtccttacctggggggttcgttatgcattgcctctttgccttttccttctgcccgagagagccgctgagccgcccctccccatgctgcctcttcctggctcagatctctctgttcaatacctgttttcggcagatatccgacattcacctgagcaggtttcgagatccaggcagagcggtagacttagagaaattctgttctgaaactattgacatcattcaaccagctctcgtcctagcaacaggtagggaggcttgccgtgctgtggtggtggtctgtggtccgcatggtagaactctagccagggctgtggcttttcattttggggacgttgggagcagtatagccacagccccaggtgagctctgtgaggtggaagagattggacattctaacccctttgcctatggataactgaatgagtcaagatccaggcaaaatgatttgacgtagcaaggttttgtcaaagcagtagaagcaaggctcctggttctcatgtcagtctgttgtctgatatatttgtatctggtttttgttcttgttgttgttacagttctggttgtgagaattagggaaaagcctgtaaccacgaatcagaagttctcttcttttgctaacttttctattttctttacattattaatcttatattttcagttgtttgaggcttccggtga

SEQ ID NO: 6783 - DNA, 6000 bp, Homo sapiens
ccatgaaccctacttttctaagcttattactgaagcttgtggtcgagattggtgattccttgtaaaatttcagagagctgatgatagagcacctttgcttcaggatgttagggacataattgggaaggagggctaggggagtggtgtgaatgagggcaaattggggcaaaaaggagtatttattgaatatcttgtctgaaaaatgatttataagatttagggaaataatgcaactgcataattgagcaatgcatgtaaatgcaatcaaaatgcatccatgtgagtgtgtgttatatgtgctcgcatgcgcgcacgtgcacgtgcgcacacacacacacacacacacacacacacagaccacaaacctgtccaaaagcactaagacagaaatccaaaaaagcagaagaaactttttctcctgacttttgatccaggctaactgaagcatccctaaagaaatcaacccaaaccacacccagattccagggccttcagactggtatgcaactgcatggtaaatagccagagacataaaatatttgctgattgtcttccagcctctgctacgggacactgggtagcaaagaccccaaacaatgtctgcaagttgggaatttaatctaaatatgaagcctgtctacaagagaatcgcctggggaatgtgttctgttcagcaggcagattccaaagccctaccccagaattcctaaggcagacactttagggtggcgctggagactcacttggttgacaagctccccggtgacactgatgcatactaaagcttgaacaccgctgcatatcacaatcgtgagccaatggtatcaggaggcacagccttccagaaaggacgtgtgatatctccttaaatatacagtgaaggctaactggagccacagtctcaggatatattaataatgagtgacgtttccttagtcatttcatcaaggggagggtggccttggaactgtagatgtgttctcatagacactcctttgggtctttacttactaaacaatactggactgggcaaggctctgaggacataaagggaattatctggccagtggcactggaagacagaaaatgaaattctcactaagtctgaaggctggtcagaggccaggccggagcacaccacccacgcaggaccaggagggccttacctcctgccctccccacagcctcctggcattctctgaaaggttttccctgcacagcagtccctccattatgagccctgggactcaagaagctacaaagcgataaatcaattatgaaatggaaacctcgattacagcctgtctgcttaattgtttgacaagttaattaatctcccaagcaactgggctccattctccctgtaaattgtggggaaatcgcaatagcaggtccctgaggtcttggcagtacagtatcaatgaggctccgggaaaactatgaataataagcatttagtggggtcagtgcctcaccataggaatgaagaggtttgctccagctcctgcctggaggcagttttgtcactaattattttgctactaactaattacaatctgtacttgtctgtgtatttatttatttgttttcattttctttccaagagacacatttctttcctttcaaataatatcatgtgattccagcagccaacgcttccagattgttaaaaacaccaaggtggtgtcagtccctccctcccaggaggctggactattgtagctgccatgataaatgaggctgaaccttctgagtgatgaagatggatatgtgttatgggtctatctgtctggctgcatgaggtggctgctactgtctgagacttgtgatgatgtcatactctcctgtcatcagtgttcaagctttagaaattccaaatgatgaagagaaattgagaaaccaaagcatgtccatgtagtccaagagttctgtgcattagactcacttggagatcttgttaaaaactgaaaggacaagtccaaatagatagatagatctctctctctatatatatatgtgtgtgcatgtgtatatataggtctgtctctatagagatacctatctacagagagatatatatctgtagagatatctataaagacatatctatatataatctacatatagatatatatagatagcgctctctatagatagatatatagagagcaatatctaactacctacctacctacctctgagagacagagtgtgtgtaatacatcacaacgacatagagttcatctcaggaatgcaaggctaaatcagtattctaaaacccatcaatgtaatccaccatctgaatactttaaaaaatataagccacatgatcatatcatttgatgctgaaaaagcataacattgttgataaaattcaatgttcactcatgaaaaaatctctaaccaaattagcaatagaaggaaacttcctcaacccagtaaaatatatttacacaaaacttataactcttcatacttaacggtgaaagacaaaatactttctaagatttaggaaaagaaaagaatttctaaattcactgctcctattcaacacagtagtaacatttgtagccaatgcaatatggcaaaaataaaataaaataaaataaaataaaatgcatacagattggaaaggaatgaataaaactgtccctattttaatctgacatttgccaatgcagaaaattcaaagggatctcaaaaaaatctctcaaaactaataagtgagtttattaaggtcacaggttacagggtcagcaaacaaaaatcaatcatgatcctgtataccggcaatatagaattggaaaccaaaacttaaaaaaaaatagtttcagaaaataaaacgttttctacaatattccagaaaaaatgaaacaagacatatacaagatccatatcataaaaatgacaaaacactgctgagaaaaatcaaagaaaatctaaatgaatggagagttatgccatgttcactgactggaaaactcaaaatagtaaatatgctaattctttgcaaattaatctataggtttaatgcaatctctgtcaaaattctagcaaaatatctttgtggatatagagaagaaaatttacatggaaggcaaaaatctactatagctaaaacaattttgaaaaaaagaataaagttggagaaattatatcatccaattttaagacgtaatgtaaagctacagtaatcaagcgagtatggtatcggcaaagggataggcatccagaccaatggaatggaatagagaatataggaatatatctatgcaaatataactaatttatttttggcaaagatgcaaaaggatttcaatagagagataatagtttcttctttgttgatttgtttttcaacaaatgaactgcaacagttgcacactgtatgcaaaaaggtcttttttaaatgcccttcaacctaaacttcatgccttaaatagatcattcatcaaaaaacaaaacataaatgtataaaactttcagaggaaacacaagggaaaccttcatgacctgaggttaggcaaagagttcttagatatgacacaaaaagcacaatctgttaaagaaaaaatagttattatcaaaatttttcaaatcctgctctgtgaaagacagtgttaagataattagaagaaaaaccacagacttgcagcaaatatttgcaaattgtgtattggacaaagagcttgtaactagaatacataaagaactctgaaaactcagtgcacattttttaatgggtaaaagacaaacacggactgcttcaaagattacttaaggatgacataaggacataaaaatattttctacatctttaaccataaggaaaatgccaattaaaattacaagatgcccctgcatacctactagaattgttaatataaaaataaaatatcaagatctggggaggatatggagcaactagaattctcataccttgctgctgtgaatgaaaaatagtatagtcagtctgaaaatcagtttatctgtttcttataaagtaaaacacacaattaccatatgactctagagaaaagaaaaagcttgtattcatacacacaaaagaatcttgtgccagatatctatagaagctctattcataagcaccccaaattggaaaccatccaaatgcccttcagtgaatgaatggttaaacaaatgctatgcattcctgcaatggaatactacttagcaataaaagggaacaaatcattcatacttggatgaccctcaaagactgaatgtaaaaattcagtctcaaaagattatagacattgtgatcacatttatatgacatcctcgaacaaacacaactacagtgacggagaacataccagtggttgcctggggctgggtttgggggagtgtgcgagtacaaggggatagcacaaagaaatttttttgaggtgatggaactatattctgactgtggaggtggttacccaaatctatacatgtgttaaaatttttggaatatacactaaaaaagcccattttcctgtatagttatttacacaccaaattttttaatctatataggaaatagtagaaaaagaaaaagctaagtcagaaagaggaaagaaaactgcatgtgcaatgtcttgggttctttcttggcagcactggaaaattaataactcttcctcagttctcagcacctggcccggcacctggttgtggcaatctagcttctgttctggcttctcacattggagacacctggatcagagacttcagaccatctggacaaaggctttctattgggctccacccagtttcacctataatttgaatatgtgtcccctctaaaactcattctgaaatttaatcctcagtgtgtcagcatcaagaaatggagcctttaagaggtaattgtgtcaatgagggttctgctctcattaatagattcatagattaatgaattagtggttcatcatgagtgtgaggttggtgactttctaggaagaggaagagagatttgagtcaggccactcagctctctcaccatgcgattgccctgcaacaccttggaactctgcagagagtccccagcaggaaggtctcacctgaggtgaaccttcgaccttggacttctcagcctccagaatggtaagacataaatgttgttctttatatattgcccagttttagatactctgtaacagagtgttaggcaacagaaaatgaagacagctttttaccctcactgtccattagccttcaaggtttgctttgctgatcttcccatctataaactaaatcctaaatcaaagaccaatagtgatcagccctagtagaatattagaatgacaggtgatatttaaaaatatcagtaccttacggtttcatctctttgaatgagcccttggtgccctcattttttaagcctttcccaggaaagcctaacgtgaaaacgactatgaaacaatgaagatgatctaggttgcttctctgaggtttagtagaaaccctcagactatgacctccaaagtgctgatgggtgatgaacactaggcacaaagaaaggctgcagatctagttcagctctaagcccgcctgaggcaaggactgtggatccagggactggaggaggcagaggaggcaaggtttcacaaagtttcatgggtggtgcagggcatgctcctctctggtttcagaggtcatggggtgggggggaaataaagaacatatttgcaataactgaacaattctttatgatctgagactttccatgtgctctttctcactgaatccttacaacattcctgtagaagaatggcaaccatcaaatcaagaaattggcccaaagccctacagtctgcaaacgtaagtgataaaactaggattttagcagctaatagtcttaaccactcctcattctgaatccagtgaaagtaacacaggatttataattacatggatttggaatcaaattgtctttctagcacttactaggtagatgactgtgggcaattaaatctgatttctctgagcctc

SEQ ID NO: 6784 - DNA, 6000 bp, Homo sapiens
cttgttcagccaatgattatatcatcaggtcaaagtcaggcagtcagaggtaaaaactctcactgacagtttgacagaccttgtgcgtgtagaaaaacactcagtattgcctttaaaaaccaaccagagtatcaataatataaagggggaaaacttccaatatactattttcaataggaaaaaatccatggtaaaaacttgtatacatgtatagaattattatgcgtcaattaaaaacaaaggaaaaaaaagaaaagataacaaacaaaaataaatttccaagtgtactctttttggttggaggaaggaaaaaaaacttgagcctccattataaatggaaataaatgtaatacatctcccctcagacatctaatctgaatgcatagcatagacaagcacggggataaggagaggactccttctttatatccatccttcactgcccctgagttatctttctcaaagacaatgattttaccactcttttcttagaagtctcaaatgcctcttcaggagctttcaaggtgaaacctaaagtctgcagcacacacacgtggtgctcctcagccaacatagctgtttcttccccaccatgccatgccacatacactcttagagctgtttcccagacttcagccactcacacaccaccttcacggtgttggctacattcacgttctcccagaattgctatcaacttaatatttttctataaatcaagcaatggttttacttaaaattatcctcatgctaagcaatgtcttttagtcaagttttaatgtgctactttcaattttactaaatatttgactattactcttgaaattaactttttaaaattaaaaagttgatctctgtgtcatgttataccactagttgttcatgtaacacacattggtatgcactgctctagacagaaacgacagtgacttctttattgtacactgagcatactgtgcctttgaacctgttggtttcctcctcttaccgtgccctttgcattatctggtaaagttattcccttcctttaggattaacttaacccaaagttgccttctcatggaagcttccccaaatcacttaaagcttgatgtttcttctctgtattccaaagcactttctacctttcttcagtatgacatttatcacattgtaaggccatactgtgtacatgtctgtctcccttatgaaactgagtagtcatccatgagttatcccattatctaggtcagtacataatagatgctcaataaaaatatttgttaaacaaaagaatgataggtatgtagccaaagctaagttaatgatgtcatttatagcatgactatctcagcacaatattactttggttaaacaaaagatgccccaaagtctcaatgtatggaagattctctacaattatcaaataagactaaaaaaaattaaatgattatgttttctatatatggcagaaagaacacagagctggaagacttgagaaaagagtataaagttacattggaagtcagtgtaaattttttataagactttgcatgtaagttcttccggttattcttttttaggaatcctccatttaattatcactaactaattgcaaattttaaagataaaagggaagcaaatttaaaataaagcaaagggtgattaaagcagcaaccaagcattggttacctctgatgaaatgacctcatcaaaaacaaatttaaaaaaagttactaatatgaagcatacataaataactgctccatagtagcatctccatgttataatcgagaaaattcccttttcctgttgcacttttccagccttccagaagaatgagtcagaaaatgttctgggtacagtcatacacatgggagattttttaatgttgccttttaatcccagcaagatagttattccctcttgtccttatttttcttatattttttattttgaatactgatttataaagggtcaaaatataagttttttatattttgcttatactgaaaatgataatgtttataagataaaatctttgaatgcttttatagggatgaggtctctcagcaactccacagaatggggcaaagcatggcaccgaaaagttaacaaggcaaaaacagctgctctaaagctgcgctgggtgttaatcaaaccatctcccaaatagcaggaaggcttatatcaaacaccttaatttgcccccaatgccctgtttttaccttgatttaacaattcccagtgatagcaatctgttgtcctcatcccacacaaggcctcaagcttggggttctgctgctcataccagcttgccttcggtagcctctcaaggagaaaagctccccaggaaggagatcgagctttatttttatcccagttaaagtccctgtccaatccattaacagcttcgataaccttggtccagggcatttcctgcagaagctataaccagctggggttaatgaactctccctaccattaattcctgggagaggccattggcctgaattgttacttaattactcttctgtgtacagcttcataaagcaatgaaatgccttctttcaggaagaagggagatggtaatgggggtcatcagaggccattaattttacaaatagtttattggaaactacagtatgttaagaagtcactctggctcacaaatcaactcaatgtggtccttactaagtagagatccaaaacttcccaagtttccgtgacttgcatacacaaaaagttacaatggtacagaatcttatcaaaggtatatagcttcaggtatgcagaactatattctttagattctgcaactgatcataccttcccctccagctcttgttcctaaagttggcagaaaagactcaataaagccagtttgagacatcataaaattttccaatttaaaattctctttcaggtaatttctcagtcttttaaggagattctccctctccagagtgctgctctttcctaagatggtggcaggtacaaggaagagctaggtacccaggaagcatcacaggaaaagctttgggttttcatgccttcccttcatgctcctagatctgctggactctgtgtccatctcagcacaactggagggcttctcttgtccaccaagcttcttaccacatctacaccccacttaacgggtctgagaatgctcagtcgcttcttctgcgccaccctaattatacttgcaacaacctcctcactcttacctccttcacctgtttatgtttcctcatggcagtgttaccaagcaaaagagtgtcactgcccaatgtgctggaagccaatactatgacacaaggtttgtgagaaaaaaaaggctttttactgtaggtctactaacaaggacacaggaatccaactcaaatctgtctctctgtgctggctctcaggcagtacttttattagaaaaggtttagggagtggattctggaattagcaaatgactggtagaagaaaaggggaggtctggaaagtcctcaggcatgcacgattatctcttcatgcctccttatgggtcccatgtgcaaattcaggggaaattagtataaaacatgcagtggaaattcaagctgtgacatcagtaagcttgttctgcacagactccagttggccttattggttccaaccaatttcagctaggttttttgttttgaaatctctcaaatagagggagtttcagcatttcagcaagttgtttattttcttatctgctattctgcaagctcaagaatttgttagtcactggtttctttaactctttggggtaaaatttcagcagtctcctcttttatcatatcaagtaaaaataattttatttattttattgattgtgttaccagtcccccctacacacacgcgcgcgcgcgcacacacacacacacacacacacacacacacacatcttagaatataaacttcatgaggtcaagggcttttggctgctttgttcattctttccctccagtgcttagaacagagcctagaagatacacatcgtgttcattcagtgtttcactgtttgttgaatgaatgagtagttagttggctacatgatgaaattagactgctggccaaaagacctagactttccattttagtcacactgaggcaggaagagagctttatctgccagagaaataaaagatagaggttgccccttcaaacagcccagaaatcaaatccattgaacctactgctatccagggaagacttggccatgaaatccacacacttatctaggctctggactctacacaaatgatgagaaaccattgccacccaccccactatgacatgttgccccgcccatcctatgtcatgacctctcagaatgttctgagattctattggatagttccagtggagaaagattagactcctcagaagctaattgactagggaaggatcaggaagacaagacacatcaaaaaggggaggtagagtttgtagaagaaataaaggggaaaaaaagaaactaaggggaagggagagacaaatgatttacatatacttggttttctgagccctctttaatactaaagatcttaatatctggaaattctggcataagcaaagatagagagcaaagattacttttcagggatattgtaaacctacatccatgcccatggggctttatggaaagcaactggcctagagcaaaaagagacttattgattatctctatttctttatattgtcttgtataaacttccacagggttttatgttgataaaccatctctgactatatctattaataggacgtatattccagcattatctctgtatcctgactgtatctttaatagggtataatcagaacacgggcagaagaatcaaaaggctgagttttgtcatggttaaaatgtggggattagagggagaaaatgagttaacttaatttgatttctactttttgggactcttccctagttactgtattcataaatgaacccatttctccaattcattagatacatctctgttggcattttagggaatctacaatggaaggacacaagaaagatcagctggattaagtagtcatgattatgcaaagccatatccagagaccaaggtgtaaagcaggttcgctattgaccccttgcctcatcttccagcctccttctccccttctactcctgttatgcaaccacctccgcaccctaccccaagcatgccataccttcctgaagtgattactgtaaatcccccatccaagcaagcccttccaagataggacttaactttccaatattatccttcattcctatctaaaacaaaagcctctgtgcctcactgtgctaatagtggttaatcaactgaaacacaaaccaatgaattaatttacattagtagaaaaagaaaaatatatcaagagcctcccatgtacccttcccaaaatactctagagttaccattatttcatttaaatttacttcaaaaaagatatttgcatttttgaaagctatgcctagagcctatgtgggtgtgctcaatggaattactctcatggtaaaaatttcaaactttgtagcaggcaagtgagggagaggtgttgaggtgggagaaggaagggaaagattgaagccctatcatgctggtggaaaccccttgtggctctgcagaaagccaggcccaaccagaagtgatatgccaggtgcttagataaaagtgttcaataaatgtgtattgtatgagcaggttttgtgaatagtttatctaagaaaagattgccaagagaaacatttctccccagcgcaaggggttatttaaggaagcaaagcttctcaagaaaccagagtgaaggtgcactgttagattgagcactttggaggagaaagcctgggaaagacccttgctgactgagctgcgaattatcgaaacagttgtagagcatgatcaagaaatgtaatttttcaagaatgaaaatggtatgcccccagagagagtaaggttaataaactagatgtgttctaaataccctttttggcct

SEQ ID NO: 6785 - DNA, 6000 bp, Homo sapiens
tttttttttttttgagacagagtcgtctcgctctgtcgcccaagctggagtgcagtggtgcgatctcggctcactgcaagctccgcctcccaggttcacgccattctcctgcctcagcctcccgagtagctgggactacaggcgcgtgccaccacgcccagctaattttttgtatttctagtagagatggggtttcaccgtgttagccgggatggtctcgatctcctgaccttgtgatccactcgcctcggcctcccaaagtgctgggattacaggcgtgagccactgcgcccggcggcaggagaattgcttgaacccgggaggtggaggttgcggtgagccgagatagcaccattgcactccagcctgggcaacaagggcgaaactccatctcaaataaataaataaataagataaataaataaattagctgggtgtggtggcatgcacctgtagttccagctacttgagaggctgaggtggaaggatcacttgagcccaggtgattgaggctgcagtgagttgtgatcaaaccattgcactctagcctgagcaacagagtaagactccatctcaataaaaagagtaacaaactgtccaggttttatttttagattatatcttaatcctatcacatcccccgacatactttcatgcaaggtctgctcactggcttccacgcctccacacttggttgcctacattcagttgtctaccaagtagccagcgggagctcactaaagctggaatctgctatctcataactgtttaaaaaccctcatctgcagacaggcatggtggctcacacctgtaatcccagcactttgggaggccaaggtgggcggatcacctgaggtcaggaattcgagaccagcctggccaacatggtgaaaccccgtgtctactaaaaatataaaaattagccaggcatggtggcgcatgcctgtaatcccagctacttgggaggctgaggcaggattgcttgaacctgggagacggaggttggagtgagcagagatcgcaccactgcactccggcctgggcgacagagcaagatatgtctcaaaaacaaaaacaacccccacgcaccccccaaaaaaataaaccctcttcagcagtggaggtaaaatccaaactccccaccgtggcctgaggcccttacctgcccctgtgtcccagcagcctctgtgatcttacctccctccatttcccctctgggctggacaccttcctgctctcaaccttctcttttctaagtaaggattctcctgcccatgggcaaccagaagattttaaggggtacacagattccactttaatgacattgaataatagagtgagaaagtggttcttccctcttctgtcctctttgaatttttctgattacgtcaaagaaaaattctgttagtgtgactccttatcacttcaacacttgctaatctctgatttttacaaagtccccagacttacagctttctgcagacatccatatctatctagcaagattatattaggttggtgccattaattttaatggcaaaaactgcaattactttttttttttttttgagaagtagtttcactcttgttgcccaggctagagtgcaatggcgccatcttggctcaccacaacctctgcctcctgggttcaagcgattctcctgcctcagcctcctgagtacctgagattacaggcatgtgccaccacgcccggctaattttatatttttagtagagacggggtttctccatgttggtcaggctggtctcaaactcccgacctcaggtgatttgcccgcctcggcctcccaaagtgctgggattacaggcgtgagtcactgcgcccggccaaaaactgcaattacttttgcaccagcctataacattattttcacgtatttatttatttacttatttttgagatggagtttcgctcttgttgcccaggctggagtgcaatggcgcgatctcggctcactgcaaccaccgcttcctgggttcaagcaattctcttgcctcagcctcccgagtagctgggattacaggcatgcaccaccatgcccagctaattttgtatttttagtagagacagggtttctccatgttggtcaggctggtctcgaactcctgacctcaggtgatctgtctgcctcagcctcccaaagtgctaggattataggcatgagcaatgtatttattttatagataccttctaataaagtgggaagtgattgatgtaaggtaatgctatgatgttgccctttttttttttttttttgagacagagtcttgctctgacaccaggctggagtgcagtagcgcgatctcggctcactgcaacctccgcctcccaggttcaagtgattctcctgcctcagcctcccgagcagctgggactacaggcatgcgccaccatgcccagataatttttgtatttttagtagagatggggtttcaccatgttggccaggatggtctggatctcttgaccttgtgatctgcccgccttggcctcccaaagtgctaggattacaggcatgagccaccacacctggccaatgttgcccttttaaataaatgtagtcaggcttttttcttaaattaattgatttaaagacataaagcacagtgtgtgcatgtggccaacattctgaagctgagattccagaggtagccccttctgaaacacccactggctctaaatgaacccctgggccaggtgctctggtttttgtttgttttgagacagagtctccaggctgagtgcagtggcaggatcacagctcactgcagccatgacttcctgggctcaagtgatcctcccacctcagccttccaagtagttgggatcatgactcataccactacacctagctaattttttttttgtggagatgggtttttgtcatgttgcccaggctggtctcaaactcatgggctacttccaccttggcctctcaaagtggtgggattacaggcatgagccacagtgcctgacctggttttgttttgttttttcagtgatatgggaagttattcagctaggtgtgagtgaggaactagaacatttctcctggacctccaggcatgaatttgggaacttctttctcagtctcagtctattttcctaaaatgtttaaggtctttattcttttctatgcagcccgaccattagatgtgacctccgtggttgtaagggatggttgtttggacacaaaatacctaatatcctgggtgtcaaaattccctagtgaagtcaggccctggacttctcttttttgtcagtctcataaatcaggcagacatgagcttttatttgtggatgcaccaaataaataccctagtggacagctttgctcagcctggccactgaaagagccacctaaataaaatctcaggtccaggccgggtgcggtggctcacgcctttaatcccagcactttgggaggccgaggcgggcagatcatgaggtcaggagatcgagaccatcctggctaacacagtgaaaccccgtctctactaaaaatacaaaaaaattagccgggcatggtggcaggcgcctgtagtcccagctactcagtaggctgaggcaggagaatggcgtgaacccgggaggcggagcttgcagtgagcggagattgcgccactgcactccagagcctgggcgacagagcgagactccatctcaaaaaaataaaaaaaaatctcacgtccagaaaaattggccttccagggccccagaaccctttttaccagtctagtaatagcctttcatcagcctaatttcctattctttttagtctgaatgtatggtgtaatgtgcataaaatacacaagtccaaattttagcattccgtggacgcaaaatgtgccaaaggtggatactttgcttctgtcatacatcggtagtcaacttccctatacatcaaactttcagcaaattcaaacattttccttgaaagctgtgttactttggccaaattacttaacctctctgagcttcagtgtgtctacttcctcatgtcatgattaagagttaatatctactggcttaaaaaagaaaaaaaaggaaaaaaattaaatgagatgatgggtgtgaagcagggattggctgaatgtaagcattcaataaatattcagttttaaaattgtaatctcagccttcccgccctgcagaggctacaccctggcaggacttaatctcctaaatctctgccgcttaccctagtcttttgcaccaatttaatcattccttcacgcagggtctactgagcgccatcccttgtgctggactctggctacttaaataggaatcaagccaggtccctaccattgctcagcccgcagccgagtgggaaagaagctcgcaaaagcagcaaacaggcagtaatcgaggtatgtatctgcttttgttaagggcaagtgggggagcgaaggtctgtgtctgaaacttgggtgtgaggggttagttggagtaatccaggcaattggcactgcccgtttaagagcacgggcccaagaggggaaggggactccaggtgaagccctaaggcccgggaagatctgcgggaggcggcagggcccagggcgttgaatgcccggccacaagatcagcctcctcccattggcgaaaggagccccgaagagcttgtgttcaggagggaggcctcggcctggtcaagtcatctagcaggaagagtcccggacagtgcaaagcaaatgcaagaagaccccctccctagccgatgggaaatgccccagccgttgaaggcggaaataacggcctgtaggcaacggaactcccagcgttcgcaaaggagggaggagccggaaactcagggcgcgaggcctgtgggcccagcggtgaggcagcagctgggggcggggggagggcggacctagcttcccagggcaggtgattcgtcggccccggtggcggcggcgcgtgcgacggtcacctcggtttgggtgagtccctgggttcgagcccgggccccgccagctgccgagttgcctctcggtgccggactgtgactccctctggccggccctgcactctggcctcctgggacgtcatctggagggatagagccaggcctgggactccttttgggagagtttccgttcttctattccgtgctgtccggccaggacccctcagggacttctgtggggcaggggcgaatcatgcatggcctagatgaccccatgcctagaaaaaggcagtgcggggcggtggcggcgcgcacggccgagtgaagcagatagcgtccccggggctggagcccggtagcaggggtagggaaacgcggaggctgccaggatgcggacccaggggacgcgaggcgggggcgccggatggggagacgcgaaggagggggaaggggatgggggagggggctagacagggagggagggtggagcgtgggcggggcctggggcgggtcggactttagggagttggagcgggggttactggtgctaagaccacctggggctaaggtccgaacacttggaggcagcaccatccaaggaatgggttgaaacagcaggagcccggcggggcgcagtggctcacgcctgtaatcccagcactttgggaggccgaggtgggcggatcacctgaggtcaggagtttgagaccagcctgaccaacatggtgaaaccccatctgtactaaaaatacaaaaaaaattagccgggcgttgtggcgcgtgcctgtaatcccagctactcgggaggctgaggcaggagaatcgcttgaatccgggagatggaggttgcagtgagccgagatcatgccactgcactccagcctgggcaacaagagcgaaactctgtctcaaaaaaaaaacaacaacaacaaagaaaaaacaaaacgaaacagcaggaacccgccaagaacagccttgaaggaaggtaaaggaaccgccccagtatccaggacatcagtttttcttttttttttctttttgagacgaagtccaggctggagtgcag

SEQ ID NO: 6786 - DNA, 6000 bp, Homo sapiens
aagaaggtgaagacacttgggggtggggggcaggaattcggggggtgggcaggaatttgtgggggtgggtgactgtttaagaaataaatcctgggccaggcatggtgacagcactttgggaagctgaggcagaaggatcacttgagcccaggagttcgagaccagcctgggcaagacagggagaccccatctctatgaaaaactaaaaagttagccaggcatggtggtgtgcacctgtagtcccagctacttggaaggctgaggcgagaggatctcttgagcccaggagactgaggctgcagtgagctgtgatctcgccactgaactccagcttatgtgacagagcaagaccctgtctcaaaaagagaaagagagaaaaaaagaaaagaaggaaaaggaaggaaggaaagaaagaaaaaataaatcctggggccaggtgcagtggctcacgcctgtaatcctagcactttgggaggccgaggtgggtggatcacctgaggtcagaagttcaagaccagcctggccaagatggtgaaaccccatctctactaaaaatacaaaaattagccgggcatagtggcgggcgcctataatcccagcttctcgggacgctgaggcaggagaattgcttgaacccaggaggcagaggttgcagtgagccaagatcaccccactgcacttccagcctgggcgacagagcaagactccgtctcaaaaaaaataaaataaggaaaaaagagatcctggaagatttgttcccagcacccagtattgtggctgagacatgccccagacaagaagcccagagagccgctccccctagagaggctagaacaggggattccttgccagggccctgaggatgcagagggaggtcagtcctgctgcccctatcacgccttgttattccacccccaaccggcccagacctcctgggagtcagaggaagttgctgacctgtcccctgggggaataattgtattagtgataaggtggcctctggcagcttactcagcagattcagggctttgggctgagtaatcctttggcgtctgccccagcagctggtgatcacagatcggggagacccccccaacccccaggccctgctgggctttggcttccattcccccagcacagtgcatagggcacagctctggctggcctgacctgccaaagaacccagggccaggctcagaggggattttggctggcatccacgtgatggagtgacagaatacagtcaaaatcaacagcgtaaaaatgggccggtcaaacactgcagggggctttcatttagatgggactgggtttcttgtgtggcctggcttgttttgtttttgccattttaggtaatacatacccactacagaatacagggaaatacagacaaggttgaaaacagattctctgtccattaagtgccttgggatcctcatccccagctaacccgaaactctaagcctgttccctggaatcttccatctggatggaggagagaaagttgacctggagtgaggttcaatgtaaggacaagatctgcacccggagaagctctctctcggagagcacaggcggcctgaggagtcaaaacaggtggcctgtggagtcagcacaggcagcctggaggaggtgagccctggacaggcattcagggatgggaagggtctgggcagaaggagcaggagggccaaagccagccccgctcagcggcctcccctgcgtgtgctgcccctgagagaaggaagcgctctcctccagtagccctgcccccgcttcctcccttccatctgccctttccgcttcagttcacctcctttaatcccaccacaaccgcccaatgggacaccatcctactcattccagagagcatgaaactgagaggcagaataacttccccaagcccacacagccaggctctgagaggagcggtgctggcccaagcctgcccttaagcccgggctgcaggccggagcagccccttctctcctgccggctgccgccccctcaagcctgcaggtgtctctccggagatgctgggcatggggcagggtttgaggtacacccaccttccacctctcttcctggctctttctcctctgtagctcccattttaaaaggaactgcattcctaacatatttttctttaaatatctaaattcgttggggaaaaaaatctttccttaatgttaccctccctgccacccctcagccccgtctccttccctcacagccacgctccctccccacaactaggcctcctgaatcatgctccctcccagggcaccagctcctccggctgctgctgaaacccaatgaggcagctgcccctcctgggagggtgtcctggtgcaaagctgagtgcagtgccaagcacagtttgaaatcctcatctgcatccccagcctcctccaccactcactagctgtgtggcctgaagcaaattacttaacttctctgactctgtttttcctcacccatgagttgaggctagtaaggacagctcctttacaaggctgctgtgaggtttgaaggatctgtgtaagaacttggcatgcttcctttctgcatgacacggaaggaacacttgcatggtgacaccaccattgctgattcctccccgtccctggctcccgcgacagcgcagcgctgtcctgagtttccgtcttgtctctgatgtgcctttgtcatcagcttgtccttggctccagccaccagagtctgagacccttgagctcagccttaggcattttcaaacctgcacgcatttgctccaggcggccccccagtcctggggttactacctctgtgcagataaattgggggtggtttggtctggggcatgtggagctggactccacggtggaactgatatgaagtggccctggaagccgtgagtgtgtgtgaaactgcccgaggagagagcgggaagggctgctgggaccagtctctgggtacatggaggtgatgacaagttcaaggcaaagacccgtgttccagaagagatgggaaagagcggcttcgggaaggagggagtggccagtcaaatccatggaggatggcctcagcttcagtcttaggtggagctggagaccttgtcctgaggggctttttggcagaggaggcagggaggggtgaggacggaggagaggagaacaggtgagagcacccagcccggtggcctcgatcttctgaggccccagaaagcggattaccctgcaaagcccctcgagctgacttcccaaatccctaattgtgcttctctgtcacagggagggttaaccccacttacataagggccaggccccgccccctgtccccttaactccatgatccttctggaagcttcacgctccgcccgcttccccttggggtctaaggctggaccaaccccaccccagctcatcctgaggtgagctctggtctgctggggacaagtggtcccctccaggacaacatgggctttcagctctgtcccgggcagggagggggctggcaagtgggcctgggggtggaggagcaggcaagaaaaggctgctgagtgtgaccttctcagtaaccccaagaatataacaatatcagctgcacacaccatttattaggttcttactgagtaccaggctctgaaacacatttcctgaaccattgtctttagttccccaactacaccataggacaggtgctcttctcatcctgttttacaggtgaggaactgaagtttggacagattgagtcactttctcagggacacatggctggccggtgatggagaaggtacttgaacctgggtctgcctctgctctctccacactcccttgcgggggcccggggcttactataaggcaaggatgtaagacaagttcctccttccctctccttcccacaggagcagaggcatcgctgggctggaggtgggaaggatggacctgggagcagcgcagggggctggtgtggcaagaggcaggcggagctgtgaggccgagttcggggggaaggggaggactcctgagagcccgtggccaggctcaaggtggctgtgtcctcactggctctagtcctgcaggcctggctctccagaggagcctgccagctcctcttctgccccctcacaggcctgaaggagaccctccagatggggatccaggcctctttcctccaggccagcctcagaccctacgggggacggttctgggaacgtcctctgtgccaggtgtctggggactgctagccttctgggggggctggatcctcaaatcgtgagccccaagcagtccctttccaagggattggagtgagaacctcgtggggcagagccagatctacctaggacccaaggggagtgtctcaggcaggacccccacaggcaaagacacacacactggccacacacttgccttcggatgtgtgccaagcagctcaaaaggatttaaagtccagccaggtggggtggctcacacctgtaatcccagcactttgggaggctgaggtgggcagatcacttgaggtcatgagttcgagaccagcctggccaacatggcaaaaccccatctctactacaaatacaaaaaaaattagccgagcgtggtggcaggtgcctgtaatcccacctgattgggaggctgaggcaggataatcgcttgaacccaggaggcagaggctgcagtgagccgagaccatgctactgcactccagcctgggtggcacagcgagactccgtatcaaaacaaagaaaaagatttaaagtccttgggagaggtggagtccacacctctcttcaagatgtggcatgaaatggtgaacagctgagcacacagggcaggagggccccgggggaccttgggcagcccgggaaccagcatggggtagcaggactgaccggctcccggggcaccttggtaatgctgcaggtgtggccagttgatcccctgtggagacagtaaagattaagaggatcataaactgcgtccagcggctgccccgggagaaatctcctcaagccagagcctgtgctgtgaggggcttcgggaccttggggcagctcctgagttcagacagagttcaggaagggagacaggggcacagagagacagaggttcatggactgaggcaaaggctgggccaggctcagcaacccaggcctcccgcaggcaggcagaggctgccctgtaacccatggagaccagaccaacagctctgatgagctccacagtggctgcagctgcgcctgcagctggggctgcctccaggaaggagtctccaggcagatggggcctgggggaggatcccacaggtatggcttctcctggaggtagggttgggtctgggcccttggggagcagggtaagggccagaggttcgcagggaccatggaaggagccagaacaactcagacccagccccgccggctgtgggcaagggtggggtagcctgtgggtaaacccagaatcctagaaacacggtggggcggggatgggggttgggggcgggcaggctgcagagccaggacaggacagcctagccgatggggaaggaaagaacagagaagcgcccttagggcttaacagcacagaggtccctagtggcgttgacaagaatgtttctgtgggatgatggagcctgaagccacccacagagaagggatgggagctgggaaagtggagctagggctcggactcttgctgaaaattggccattgagggaggagagagggcaaggaatgggggtgggggctggggtgtggatgcacagtgagggagacacttctccagatggaagagtcacgcgtgggttcgttcaaatgcgggtgagcggggcctgaggactgggaaagggacccgagggaaggaggggagcgtgcagccctgccccggcccagccctgccctggcccagccctgccccctgcccctcaggcgtgagcccctcgctccagtgccgcgtgtgcggagacagcagcagcgggaagcactatggcatctatgcctgcaacggctgcagcggc

SEQ ID NO: 6787 - DNA, 6000 bp, Homo sapiens
aacaacgcactcttccttctaaggaatgagatgagagacaaggatcactccagacatctcctacctacggtttggggttttttttcttaaaggcgaggcttgcattcctcagcagctatgtacaaagctccctgaaaccttgtctctctaaagttagtgtgcagggttttccaaggctgagagagcctaatacatggggaagcacttccttgaggtggaagatctctcccttcacctttcctctttttccctgcaggctagtgcctactttttatcagtttgcacaatcgcttagataaacaccgaggaggagattctctttaattatcaaagacacatcttttcagggggccaacaaagcatttatttcacccgccaaactaaaggagagttattccagtttaggaggaagatgcaagcggtttgggaccttgaacaaggcaaatatggttttggtatgtttacttacagtattttttctctctctctttcctttctcacttttctgcttgtgctgtgtggggttggggatgacttggggcttttcaaaatatcggtttgctaacgtgtatgaaatgccgaggactgtggtttaaggggttcggggaaggggggatcagagtcaattcaatgcattgccatattttattacatgtgtgtggtaggagagatggtggagggggaggggggaaaatacaattgcaaagctgccaaaatatgattaaaccgaagcgttaagactgcggagcctcctatctcctcgtcctgtctcctcaaactcatttccttccacagagcaaactaaaaaccagtcctataaagcgtggttttgcaagcagcagatgactcggttttctagcaaaggagctgctaggctcgcactaagtatcagaatttactgttcgctttgcctctgcgcttcattttgcaaccttgtgcaactgacagccaggcaggcagggagggagaaaagcctagcccggcgccctcggccacggttcgggtaggcgagcgctcggttaagctaggaggagaatcgcgacgagaagggtactcaccatcgggcggggcggtggagctggcgtgcggatttcaggcaaacgtttacctttttgctgtctattgcaaccgcgccgggctgacttaagaagcaattctgtgctctgtccagaacattcaaggagcggttcctcatttttaaaaagccagcgagagagacgacagagacagagagaaagaaaaagagaggagggggtgagggggacgcacataaacccagttcaaaaaaaaaaaaaaatcacctcttcgccagtgactcgggaaacgcagaggtggcgagatccgagtacggtccaaccaagccagagccaattaattttaaatcctgaagaattattcagattaaaatgtacagaagtttcgttctcctatgcctacgtgagtccaaagtcgtttccctttaagagctccttttcttttaaagttgaattttaggcagcgaggactcttacactagggggcagacagatactgtacttgctctaatcttaagcaattttttccctcccagcatatgctctgatttagcactgtaaatttttcagaggacctaactctgacagcccctggtgattttcaaagtaccacaagccagtggttaaaaattgcattgacttggaagttcagagggacacaatggaagcccctttccctattcatggagctccagtgtggtggaagagaaaaacacacacggactagattgagggaaaggaggaattcaatgaatcctggaggacggaactggtttctactgagttcagagttaaactcggcatttgctggggtctgtattcatattgtgattcaatctgtaaagaaatacagcccatcaggccactttctgcaagaaaattatattcctgggtgttgagtttctttcttttcttttttagattagggcaaatgttgtcccaactttctctaggcaaattaaagcttgccattcttctcattataataaatttacatctgcaaaaaaagactgagttggatttttaaaaaacaacaataatatattgattttatcttctcagagctttttaaccttagacgcacagcaagtgagcatctctggagaagacatttaaaaatatttttgcccttttttcttctcagtctgtagtcttgtctcttcttctatgcattaaaattaagtataattcatacggtgattttttttctcccttgtaacagcatttcataactgaatgagtcctaaaatacagagtgaaacacccctgactttatggcagccctgtgatcatttgcctagcaggctccaatttgttaagatatggttgggaaattattccattttaatctaaggccatcacgcatacttcaaattccaaaaatctctaagtggactggggaagctcttcctcctcgatattgttccttcccatgtttgtaaaaggtaatctgctatggaagtctcattcaggaggtgagatgaagatttccctataatcaattattttcatcctctattgagatgggaatgcccattagatttcctatctcaaccccagtctcatcacatctcagctgagcttgtcccgaatctgctgacatttgtaacattagcaattcctgaatcatagaggttggaagggaaaacaacaacaactaccaaaaaccttctcctgtgtaatgatttcttttccatccttcttatcctctttaggagaaagttatattgtgtctctaattaacctgaaattctcagcttggcttcattctgtggcaatcttattacacaccaggtttatgatagttcagtgtccactataggtttgctgggcttttttttttttttttaacaactttcaaataaaccgagaacctgcagctttagtgaaatacgtgatttcatcggagaaagagtgagggctgaggtttcgggaatgaagcttaaagaagatttttcctttcctaaaaaccagcccctatctgcccagatctttagtccttacctcatattctgcctatgtgtgtaaagagaattgaatgtaaaatgtgatctatgcatgtcaattatatgtatggtttatttttaaaatatctttaccctgtcaatttttttttcagctaccaaggatgttttctgtggtcatcaatttactcttcatatgtgttcatttctttcctggagctcagcgtcttttgtgtaaaatattttaattgttcacaaacctggttggtttaccggcatgaggttttttcttggtgcaaagtgtgtacaaaggagacacaattttcttgtataaatgtggaataatgataattcactaactggtcataaacaacaagtttactgcgttggaatatagtgtgttctgagagcaattctacatgtttgatgtttaaaaccagacaccctggaattcaaagacacaactgtctcaattattttagcacatggagcagaatggcaataggctatgaagttgttctttttgcagtgacttcttgaggtagaatatggcttgggtttggttcttgtgacctgtactagtattatttcccatttggggcagaatctctgggtgcgttttaatgactatatgaatgcttaaaaggaacttgaggaacaatgaagtccgtactcaactgttctatgacctagaagcatagtcggtgaagtctttgtctgtgtacattgacaaatgtgcatctgatacatgtgcgcttacatgtgtgtacagagggtgtgcacaggggaggctgggcggctgcctcctcctgtccatcagtgggcagaggtctttcccctctcaccatgactgggtgtgtggcaggatgttggctggagagttagctaaaaccagcgagagagggtaaagttgaggaaaattgattctaattgcatcatgacaatcagatgaagtctatttctgcttctcagcatccgagatgctttatttgggcaattaaaatgtcaggccacatacctgtgaaatgttaaccctacaaggaataaacagaaacagaacggcctttatcctctgaaaagaatatatgtcatatatatatgtcaccaaaccgaacaagtgatcagagttaattaagagaagggtttgccatcacccggatctggccaactctttcgtttggaaaatgcctacaagctcagttcgtggcaccttcccaccctcactccctatccctctgcaaagaaaccagggaacttttctttggcattgtgggtactaagatgcgccaggagtcccgggtggtgcgcgagcggcggaattcgtgacatcgccaagttgcgagaggcaaactccccgattccatccaaagcctctcgcggagcctttaagagacgttgtgtgtgcgcgctgcgctagtctccccgccggggcggaaacctcgggtgcgggatgtggggagagcagaggcagcgctcgcagggccagcacgggcccatccccctctcggcggcggcggcggcggcggcgcggccaccccgtccccgcccccccaacccccggtcccccgcgtgccccgcgccgcgccggcgacgccgctcgcgctaggaccgggctgcgcccgcggccgccatggcggggccgccgcagtccggccaatgacggcgagggggcggcgcgcgcgcgcctggccaggccaaccccggctgctgccttataaggcgcgccgtcgccatggcaacgtgcgctaagttgcagcagtcgtgtcaaagttcactatatagagagctcagtgagctgatcgcggagaagccacttctgccagccccggcgcctataaatcgcattccctcccgcgcccccctttttagcatatttgatcactttgattctctgttcttttctctccgcggtgtgtgtgtgcgtgcgcgcgtgtgtgttttcttcttctcctcctcctctccccgagttgcctcctttctccgggtgccgtactgccttttttcccctctttcattctttctctccgtctttttctcccccctctgcgcacgaaggatgtgcttctaggtggtgatctgccctcctctctctcttttatcatttctcccccgccgccggcgagttgactctttccctatgtgtgtgaggcggcggcggcagcagcagcagcagcggctccggcggcggcagcagcggcagcagcgacttcagcggcggcggcggcgctagacgcagcggctccgggcccgacccggcggcttcggcggcggctccggcggcagcggcggcccgggcggcccgcagggaacggcgagcggcctccacccagcgactgcgggcggcggcggccggagagagcgaggcgcgcgccggacgcccggggcaggcggcggcggcggcggcccagcgccaggacgacgccgcgcagcgcccgacgcggaccactttcatgctgattcccccggacccgggcagcgctccggccactccgcgggccgccggcctccgccccggcctgcctggctccctgggcgcgcccgcacccggcgcctccgatctcctagtcctcctgatttcgatggctttcctgaatggctgactgtgggctgccctggacttggcccccggacagtcgcctctcctcctcctctacctcctccttcaccaccacctcctcttcctcctcctcctcctcctcctcctccgccaactcctcggctgcacaccagctctaagagcgagagtgaacgagagagggagggagagagtgagagcgagcgagatctttggagagatttttttttttgcctcctacttctgtcttgaagccagacaatcgacttcagctctccctcccctccctctttctccacgttctgctcccactcgctctcctgtccccttcccctcccctcccggcggaaagccccccgaaaccaacaaagctgagccgagagaaacaaacaaaacaaacacaccgggccagacaagccatcgacaa

SEQ ID NO: 6788 - DNA, 6000 bp, Homo sapiens
aggtgatgctgatgctgctggtccaaggaccgcactgaaaagtgaggcacctcacccttcagaatgctgaggggtttcctatattcaccgggaagatgagcaggtgacctctgagtcatttgctttctttataaaacagtcttctatgaagtctagatgctaggtctgaatctactagttcaccttttggccaatgacgcttagggactctgaagtggttttaagcctctgtgctcctgcataggtgatttatttgtttttactagataattggtgtatttaggcactcagctgtccacacaaaagagaaaccttgactgcactgacttggggacttgtttttgttggtgggttttttgtttgtttgttttttgagacagagtctcactctgtcacccaggctggagtgcagtggcgcgatcttggctcaatgcaacctctgcctcccaggttcaagcgattcttgtgcctcagcctcccaagtagctgagattacaggtgcatgccaccatacccagttaatttttgtatttttagtagagacggagtttcaccatgttggccaggctggtcttgaactcctagcttcaggtgatctgcccgcctcggcctcccaaagtgctgagattacaggcgtgagccaccgcacctggccgggaagtccttctactaaaaatgcaaaacttagccaggcatggtggcatgcccctgtaatcccagctagtcgggaggctgaggtaggagaattgcatgaacccaggaggcagagactgcagtgagccaatattgcaccactgcactccagcctgggcgacagagcaagacctcatctcaaaatataaaaaaagaagttcagagggaggcagttgttggattaggtctgcaactcaacagcttcagggccagcttctctgcagctctcttggcctcttcttcatggttgcaagccagcttctcctgctccacctatcatgtccatcttcagggaagaaagcaggaagggccattgcagctgtgtatctccatttgccaataaaccaaatacattcccagagccccatcctacgtcccacaaacttctatttacatcttattggccaaagtgggctccatggccatttgtggctgcagaggaagctgggaagacagagaagggattgttatgcttggctgtgaccaattggggttccattagcagagaagaaagacaggaaggatgtgggtgagacaacctgggatgtctgattattgcacccttaccaagcaaaagcttctaggaagggacaacaaaagttcaaacaccgcagtgtctgttcatctttgacccactgaggaactactccttaaaatgggtttaggtcgtacatcctccctttattcagcaaatatttattgagcacacactctgtgccaagcaatgtttggggcaatggaaatacataaatctcatggaacttacaaaatgctgtgcaacctaaaacacttgcagataaggagacctattgcatcaggcttctggagcgaacagcctatgaatggacaccatatttggctctccatttgctgagagctggaacgggtgatgctacagattttatttctaaccagatagctagggaacttacacttaccgcgcctccacatgatcgacctcaccttgtatactcacagccacctcaacagctgggtgctgcaggtctctctgctttacagcggggaaaacaaagcctcagccaggtgagggaacttgctcgtgatcatgcaggtctcaagtgactggggactttgagcccaagtccgcctcatttcaaagcttatgctggttcctctgcatgctgcggcctttctgaaacaatcacacgaagccatcacgtagaagactaaactctctttaaaagtaaacttcagccagaactgacaccctgagcatggggcgttcatcacagcagatactgctgatgatcactgtggcttcatgaataagagcctggggacacaaggaaggcttctcctatgacacacacacatgcacaaacacatgcacacacacgtacacatgcacacgtacacgcattcatacacatgcacacactcatacacatacaagcatgcacacgcacacacatgcacacatgcactcatacacatgcacacacacgcactcatacacacatgcactcatacacacacatgcacactcatacacacacacacaaacacaaacactgttgcctgcagggaaaatgcttcaggagccacctctacttctacatcccacttttgtacgtggattccaaaaatctcttctaggcccaggaacagtcttgtttaaaggctggccaaggaggtgggggacagaaccagtgggacccaaagaatccagtgtgctggaacttgatgccgatgtcagcctcaatgctctcaccctgacagcagaagtggcggcttctccctccacctgtgcccggacagtgccaccagtctaacttctgccaccgtccctacctgcagctcacctgagcccagaaccatgccccctgcaccctcccgacacactcaggtaatgcccccgtttgtgttatctcttgctctataacaaacaaccattttattatttctcatgattcactgggtcaggaatgtggtcgggacactggtaatagctcattcttcctccacatgaagtccgccggggctgggccatccaggctggctggttcactcgcaggtctgatgatgatcaggctgagatgattggaatggtttgccaagggggcctcagttctctctgccgccctgttccctgcttcttcctctccatgtggtctcttcacgagggtttctctggatgaagaacaggcaagaggaaggaagagagagctgccagatctcttaggcctgggcttaagcacccttcctgcatgtggaacccctggcacgctaacctagggaaaggctcacacttctcactcactccactacccggcccacctcagtgacctcagaggggtctgccgagcctggggatgggcagtcgtccctgtccactccctgtcctggaggtacactggaaagccacaaataggcctttgtagcggcaagaggcagctgagaagcaccacggcaatgtagccgtcactcttggtgactccagctctttccatcctcggcccctccatccagatttgggtcctgcaagctgattctcaagtttggccccattgataagagccagaggcattgttgttttcttttcttttcttttcttttctttttttttgagacagtcttgctctgttgcccaggctggagtgcagtggcatgatcttgactcactgcaacctccacctcccagattcaagcaattctcttgccttagcctcccaagtagctgggattacaggcacctgccaccacgcccggctaaattttgtatttttagtacagacagggtttcaccatgttgaccaagctggtcttgaactcctgacctcaggtgatctgcctgccttggcctcccaaagtgctgggattacaggcatgagccaccacatccagccggcattgctgttttccttgtggcaattttaagtcaagtcaagactgattcagggtcttcctgttgatataagggtgtgaggaagatggttgtggcaggtgctatgagaggctgacctcataaaagttgtatgaatcattcagacaacactcctgccttgttatattggtcaaagccaaccataggcctgcccgcattcaagggaagggatatgagtctacctcagcctgctcctgactcagttctgtttgcctcagaactcagctactctcccttgggattcgctgcatcccaactgcctctatcctcctcagtcatggtaatcattcactcactcattcaatcgttcaacaaatattaattgagcatctaccctgtgcctgatactatgctaggcactgaatatatagcagtaaaccaggtggcataagactgtccccagggagcttccatcctaaagaaggagagagaaaataaagacataaatgaggacactctacgtggtgtgtcaggcatgatatgtgggctcatacctgtaattccagcactctgggaggccgaggtgggaggattgcttgagcccaagagtttgagactagccaggacaacataagaagaccttgtctctatgagaaaaaaaaaatagccaggcatggtggcacatgcctgtggtcccagctactcgggaagctgaggtgggaggatcgcttgagaccaggagatggagggtgcagtgagctatgaccttgctactgcacaccagccactccagcctggatgagatagtgagatgctgtctcaaaaacaaaaacaaagcaaagtagaaaacatggataaggagtggtagagacagggttggacctgcaatttgaaatagatggttagggggtgtggaacaagccagccacatggctatctggataagggtgtccctgttagggcagggaaatgtgcgaaagccctgagcagtggggcctgtgcagagggttcaagatgcgggaggacaaggcggagcaggggaagaggtatagtcagatgacgtggggcccaggggaaagacctggggttcagtctgagtgagattaccggccagtaagggatttgggcagaggagcaacaggattcgactaaggccagcagtctgatgtaagctgtggattcgtgcacctgctttgtgtgcaaatcacctattttcctgggtaaaaccattagcattagaggctagagccgtgaagctgagcataccctttcacttaataattccatgcctgggaattcaacctggagagagaatttaacaaaacagtattcttcaggagtctcaagttttcaataagaagtttttaaattttgtgtttttaacaataaccttttaaaataatggtgaacatatattccactgtctggttgattacttatatctcaataccacatttcattccagcagcagagttaagtagtattgctttaattgcaacaagctgagctaatgtgggaagaatgcagtagagtggcacagaagaatggtgagttcattgttattaccctcctagcccgtgagaacgcccaccatcccatgagttcctacatctatgccatgaggagcagttgggtttcagcacagcattctctatctttgcaaagttgttgattttaaccctgtgttttgaagttgtgctttgatttaattagcaatttcattttgatgggatagttatatcagtcataccccttctacttagttttatgtccataatattataattaaacattatttaattcaacattgaagggcagtgaaataattattttctgttttttctttttttctttttaattattatactttaagttttagggtacatgtgcacaatgtgcaggttagttacatatgtatacatgtgacatgctggtgcactgcacccactaactcgtcatctagcattaggtatatctcccaatgctatccctctcctctcccccgaccccacaacagtccccagactgtgatgttccccctcctgtgtccatgtgttcccattgttcagttcccacctatgagtgagaatatgcggtgtttggttttttgttcttgcgacagtttactgagaatgatgatttccaatttcatccatgtccctacaaaggacatgaactcatcattttttatggctgcatagtattccatggtgtatatgtgccacattttcttaatccagtctatcattgttggacatttgggttggttccaagtctttgctattgtgaatagtgccacaataaacacacgtgtgcatgtatctttatagcagcatgatttatagtcctttgggtatatacccagtaatgggatggctgggtcaaatggtatttctagttctagatccctgaggaatcgccacactgacttccacaatggttgaaccagtttatagtcccac

SEQ ID NO: 6789 - DNA, 6000 bp, Homo sapiens
gctttagggagcgcagatatttaggaaaaggccaggagcgggaaaaggaagaagaaacgaaaaagattctccccttttcttaccttttgcccctcctttcccctcccgaaatttgcgcctacttgattatttgcagctgtttcgaacctcaaggtttgttcacagtagcgagagagacttgcgcttggagaagtgaaaagccattttcgcgccagggcttcgctgcttgagtttgggggttttgctctccctcccagcaaactcccctcaaagccttgctaacttcgtcaagccctgccagcctttactccttggccacttgggttcgcagtacccagccaagggccccgggcgggtttccatcgctgggggtggcctggtacccccaaagctgagttcccgcctaggagaggacgctgacgtcctggggcttcctcggtgcctgtcacccagccccctgccttcctcctcggcctcagatgtcgtcccacctgcccacgagcagggaacctggaacccactctcccggcagtccccagcgggttccgccacccggcggccgcccctgacaccgagtgggtgggaggaagaggcagctggcggggatgggccattgagacctcttgaaaaatattaaaagacaggatgggtagagatttctccgggagaaagttcgagggtgcatcgggtcgcggctgggaggagtacccgaaatgccagcaggagaaatgcaacctgtttaggccacaccttcaatccccgaggctgtctggagagactgcgtgcgggggacttgccggcgttcccacaccgcgcctgcaatccactcccgcggctgcctggcctctgccactcgcggcttgaagccagtggctctcaagccctcggccccgcggcggcccgcgcagccttcacccggcgccggcaccacgaagcctggccgcagtggactccccgcagctcgctgcgccctggcgtctcccgtcgaggagggagggacggaggcctgagccgggagctccctggcggtggtcgggccgccccccttgaggcctgctcccccctctcggcctcgccaaatccctgaaagcccagtcccccttcgtcaccccgggggcttctaatcactcggtatcgatttccctaactcttttcatcctgttgaagacacatcttaaaacactccagcccggagtgtgctctgggctttatccacactaataaaatgatttacccttctctccgcgctctcctcacagaggaaaatcgttcgagccccggctatttgtgtgtgatcagtaaatatttagtgcgctgacatccttagctgggcttcggatcgattcggggcccaccgggaggtgcgcacggtccgggcggggccgcgccgagctcgccgagggggctcctcccgccctcgccgccggccgctgatttacggcccctgcaaccagctaaggggggcgaaagcgcgcctggaaaattggcttttcaaccttttacttttgacattcagccacttccccaggctctaattctcgcccgcactcctccctcccgccctactaagggttgccctgtgcgccctgcgagcccttccagcagcaacgcgcggcgctcgcgccccctcggcccggggaccacctatcacagccctgagccgcgacgcggggaggccccggcccctgctatgggggtcgcctccttcgaggagagatgctctccgcccgcccacacctctgagggaggagagggggtggagaagcccagagctgcatctgctggatgacgagccgctctccctgctaccctttctccgacccgtcggcctttctcctactctggagactgatcctcgacgtccatcgggccggatggcgtcgggtggaagcgttactttcctcgcagaaaaactcctcctctttcctaagatcagaaaaagcgcttagcttggaattgttaggtggaggcctcctgccctgatagtggctgtgagagggctgcggccgtgacaccgtctgtgtcccctggccctcctggccttccccgggcgcagacgatttcattattgcagggccgcaccgtggacctggagtagggcactgcggggtcccgctgcgtcctacgggagcgctacctcggtctgctacgttgcccgagtaagatgtgaggaatcccgaccctcggactccactactcttgggccggggcttcgggcctgaaagtctccggcaatgtcgcccacctgttagcgagcttgttcccctctcacctggggcccgggcctttgcaattcccctggggcccaagaaggaaggggcatgaccttgctgggtctaggcacctctccaaaatgctagcgccctctcctttgtcctacacatgattttctaaacaaccttatctgcagactatatctttatactaatgcatacttaattggtccgtcttgactgtccatataaaacaatttaattagggtgctttcttgctttggagagcaaagaaaaaaaaaaaaaaaaccctgcccagtgcttattgtatttagcaccaatacaggcagaaaatgtagcacaagtttttggttgaaagagcacctctgtgcccattgaagggcgttgatccgaaaagacagaaaggacaagtaaaatcgatttgaagcgaccctctctgtccctttcacaccattcagaaactccattccttctaagacaaagaccagcgccttgggaattctcagggaaaaagaggactctagtcccacaagcctagggcacttttttaaaaaaaaatcctcaatatttcacttaaaacccacacttgatgctgtgccccccaagtatgggttccacagatgccccctccaaagtgccaagctgcaaggctgacaaaccccctttcccctgcctgtttggccttgtagccaggccaggacagccgtttagggttagtgcagccctcacctttgacctcctagatccgagtggctgccagcactacaactttggccaaagttaaaagaaaaccacaacaaaaaattttttctgctcccaaacccagggaaaccagttctggttcagccgcctgagccaccttacccaatagcaacctccatccctaacttttttttcttcttcttttgcaatgaactgcctgagccatctctgaaggagggaattgaagttgtcagggctccacggctgggttgtgggtgggggtgagtttcttggtctaactggtcctccattaggaacccccgaatgccaggttatcccactggtgcccgagctggggaaggcagtcatctatcagaactggcaggaaagggagaagggagaggaatgagatgggcagggaggggagagaaaaggccaggctgtgatcatcttcacctgccctgagtccagccttcctgttcaactattcctcgaccttcggctggggatgaagggggcgggggcgaaagggagggggcacccccgagttacacaagtggcctccttctactaagagaatgagttcacctcctccccagaggagcctcaccatccatccactcagtataactgatgagacaaaccgcaaggaaaaacttctgtagcccatatttatggtattaatgaatagttaaaaaagatttacacttcttatgatcaatattctgagttattttgctcaaagtatataattacagtgtcttcagagttttcatcattgtttgaggtggcaaaaccatttgtaattttcattagccagtaaacatgtaattaacattcagcactgtgtttaacttaattcctgtttaagacaaggacaagaagcagccgaagagcgttagttccatttgtcaagtctgacatacatcttaccataacagtttcctaaaataaaagatccgtgtttccccattattcttctcttaaaacaaaacaaaacaaaaatccattagttaagacagtattaaactgtgagaggcagcatagtttatattcaattttcactagttaccgtattcttgcttcctttattcgttttggggagtagagaaagggagggggtgaatgaagcattcattatctgaaggcatggaatggggaacccctccccccaaaagaaatagatttcctcctcaggaaagttctagaataaggaccggaaaggggggaggcagaaatccacaggggagagggggaaaaatcacttggggagacttgagttaaaagtagaaaatgaggattccaaaggattcctaggaaaaatgttgccctcttgtctcaagttctatctttgatccaggacgagggaagcctgtctgccagtctgcgaggctgatgctttttccccctcctcttccacctctgttttttcccaacttgctttaggattagcctccatctctctcgaccccaaacagtggaatttggctgtgccttgggtcgtcttgctttgcaatatcgcctatagttgttggcggttttctgctgaggctgagccgtttgctccagcctccgactaaactcattaagttgggagatttttttcaattggacgggtgtttttaaagtctcgtctttccagccccaaacaaggtgtaacaacgcactcttccttctaaggaatgagatgagagacaaggatcactccagacatctcctacctacggtttggggttttttttcttaaaggcgaggcttgcattcctcagcagctatgtacaaagctccctgaaaccttgtctctctaaagttagtgtgcagggttttccaaggctgagagagcctaatacatggggaagcacttccttgaggtggaagatctctcccttcacctttcctctttttccctgcaggctagtgcctactttttatcagtttgcacaatcgcttagataaacaccgaggaggagattctctttaattatcaaagacacatcttttcagggggccaacaaagcatttatttcacccgccaaactaaaggagagttattccagtttaggaggaagatgcaagcggtttgggaccttgaacaaggcaaatatggttttggtatgtttacttacagtattttttctctctctctttcctttctcacttttctgcttgtgctgtgtggggttggggatgacttggggcttttcaaaatatcggtttgctaacgtgtatgaaatgccgaggactgtggtttaaggggttcggggaaggggggatcagagtcaattcaatgcattgccatattttattacatgtgtgtggtaggagagatggtggagggggaggggggaaaatacaattgcaaagctgccaaaatatgattaaaccgaagcgttaagactgcggagcctcctatctcctcgtcctgtctcctcaaactcatttccttccacagagcaaactaaaaaccagtcctataaagcgtggttttgcaagcagcagatgactcggttttctagcaaaggagctgctaggctcgcactaagtatcagaatttactgttcgctttgcctctgcgcttcattttgcaaccttgtgcaactgacagccaggcaggcagggagggagaaaagcctagcccggcgccctcggccacggttcgggtaggcgagcgctcggttaagctaggaggagaatcgcgacgagaagggtactcaccatcgggcggggcggtggagctggcgtgcggatttcaggcaaacgtttacctttttgctgtctattgcaaccgcgccgggctgacttaagaagcaattctgtgctctgtccagaacattcaaggagcggttcctcatttttaaaaagccagcgagagagacgacagagacagagagaaagaaaaagagaggagggggtgagggggacgcacataaacccagttcaaaaaaaaaaaaaaatcacctcttcgccagtgactcgggaaacgcagaggtggcgagatccgagtacggtccaaccaagccagagccaattaattttaaatcctgaagaattattcagattaaaa

SEQ ID NO: 6790 - DNA, 6000 bp, Homo sapiens
tttttcagaggacctaactctgacagcccctggtgattttcaaagtaccacaagccagtggttaaaaattgcattgacttggaagttcagagggacacaatggaagcccctttccctattcatggagctccagtgtggtggaagagaaaaacacacacggactagattgagggaaaggaggaattcaatgaatcctggaggacggaactggtttctactgagttcagagttaaactcggcatttgctggggtctgtattcatattgtgattcaatctgtaaagaaatacagcccatcaggccactttctgcaagaaaattatattcctgggtgttgagtttctttcttttcttttttagattagggcaaatgttgtcccaactttctctaggcaaattaaagcttgccattcttctcattataataaatttacatctgcaaaaaaagactgagttggatttttaaaaaacaacaataatatattgattttatcttctcagagctttttaaccttagacgcacagcaagtgagcatctctggagaagacatttaaaaatatttttgcccttttttcttctcagtctgtagtcttgtctcttcttctatgcattaaaattaagtataattcatacggtgattttttttctcccttgtaacagcatttcataactgaatgagtcctaaaatacagagtgaaacacccctgactttatggcagccctgtgatcatttgcctagcaggctccaatttgttaagatatggttgggaaattattccattttaatctaaggccatcacgcatacttcaaattccaaaaatctctaagtggactggggaagctcttcctcctcgatattgttccttcccatgtttgtaaaaggtaatctgctatggaagtctcattcaggaggtgagatgaagatttccctataatcaattattttcatcctctattgagatgggaatgcccattagatttcctatctcaaccccagtctcatcacatctcagctgagcttgtcccgaatctgctgacatttgtaacattagcaattcctgaatcatagaggttggaagggaaaacaacaacaactaccaaaaaccttctcctgtgtaatgatttcttttccatccttcttatcctctttaggagaaagttatattgtgtctctaattaacctgaaattctcagcttggcttcattctgtggcaatcttattacacaccaggtttatgatagttcagtgtccactataggtttgctgggcttttttttttttttttaacaactttcaaataaaccgagaacctgcagctttagtgaaatacgtgatttcatcggagaaagagtgagggctgaggtttcgggaatgaagcttaaagaagatttttcctttcctaaaaaccagcccctatctgcccagatctttagtccttacctcatattctgcctatgtgtgtaaagagaattgaatgtaaaatgtgatctatgcatgtcaattatatgtatggtttatttttaaaatatctttaccctgtcaatttttttttcagctaccaaggatgttttctgtggtcatcaatttactcttcatatgtgttcatttctttcctggagctcagcgtcttttgtgtaaaatattttaattgttcacaaacctggttggtttaccggcatgaggttttttcttggtgcaaagtgtgtacaaaggagacacaattttcttgtataaatgtggaataatgataattcactaactggtcataaacaacaagtttactgcgttggaatatagtgtgttctgagagcaattctacatgtttgatgtttaaaaccagacaccctggaattcaaagacacaactgtctcaattattttagcacatggagcagaatggcaataggctatgaagttgttctttttgcagtgacttcttgaggtagaatatggcttgggtttggttcttgtgacctgtactagtattatttcccatttggggcagaatctctgggtgcgttttaatgactatatgaatgcttaaaaggaacttgaggaacaatgaagtccgtactcaactgttctatgacctagaagcatagtcggtgaagtctttgtctgtgtacattgacaaatgtgcatctgatacatgtgcgcttacatgtgtgtacagagggtgtgcacaggggaggctgggcggctgcctcctcctgtccatcagtgggcagaggtctttcccctctcaccatgactgggtgtgtggcaggatgttggctggagagttagctaaaaccagcgagagagggtaaagttgaggaaaattgattctaattgcatcatgacaatcagatgaagtctatttctgcttctcagcatccgagatgctttatttgggcaattaaaatgtcaggccacatacctgtgaaatgttaaccctacaaggaataaacagaaacagaacggcctttatcctctgaaaagaatatatgtcatatatatatgtcaccaaaccgaacaagtgatcagagttaattaagagaagggtttgccatcacccggatctggccaactctttcgtttggaaaatgcctacaagctcagttcgtggcaccttcccaccctcactccctatccctctgcaaagaaaccagggaacttttctttggcattgtgggtactaagatgcgccaggagtcccgggtggtgcgcgagcggcggaattcgtgacatcgccaagttgcgagaggcaaactccccgattccatccaaagcctctcgcggagcctttaagagacgttgtgtgtgcgcgctgcgctagtctccccgccggggcggaaacctcgggtgcgggatgtggggagagcagaggcagcgctcgcagggccagcacgggcccatccccctctcggcggcggcggcggcggcggcgcggccaccccgtccccgcccccccaacccccggtcccccgcgtgccccgcgccgcgccggcgacgccgctcgcgctaggaccgggctgcgcccgcggccgccatggcggggccgccgcagtccggccaatgacggcgagggggcggcgcgcgcgcgcctggccaggccaaccccggctgctgccttataaggcgcgccgtcgccatggcaacgtgcgctaagttgcagcagtcgtgtcaaagttcactatatagagagctcagtgagctgatcgcggagaagccacttctgccagccccggcgcctataaatcgcattccctcccgcgcccccctttttagcatatttgatcactttgattctctgttcttttctctccgcggtgtgtgtgtgcgtgcgcgcgtgtgtgttttcttcttctcctcctcctctccccgagttgcctcctttctccgggtgccgtactgccttttttcccctctttcattctttctctccgtctttttctcccccctctgcgcacgaaggatgtgcttctaggtggtgatctgccctcctctctctcttttatcatttctcccccgccgccggcgagttgactctttccctatgtgtgtgaggcggcggcggcagcagcagcagcagcggctccggcggcggcagcagcggcagcagcgacttcagcggcggcggcggcgctagacgcagcggctccgggcccgacccggcggcttcggcggcggctccggcggcagcggcggcccgggcggcccgcagggaacggcgagcggcctccacccagcgactgcgggcggcggcggccggagagagcgaggcgcgcgccggacgcccggggcaggcggcggcggcggcggcccagcgccaggacgacgccgcgcagcgcccgacgcggaccactttcatgctgattcccccggacccgggcagcgctccggccactccgcgggccgccggcctccgccccggcctgcctggctccctgggcgcgcccgcacccggcgcctccgatctcctagtcctcctgatttcgatggctttcctgaatggctgactgtgggctgccctggacttggcccccggacagtcgcctctcctcctcctctacctcctccttcaccaccacctcctcttcctcctcctcctcctcctcctcctccgccaactcctcggctgcacaccagctctaagagcgagagtgaacgagagagggagggagagagtgagagcgagcgagatctttggagagatttttttttttgcctcctacttctgtcttgaagccagacaatcgacttcagctctccctcccctccctctttctccacgttctgctcccactcgctctcctgtccccttcccctcccctcccggcggaaagccccccgaaaccaacaaagctgagccgagagaaacaaacaaaacaaacacaccgggccagacaagccatcgacaaaactttgcaaaagcaaaaacaaaaaaggaaaaactaaccaacctcaaccaaccagcccccgagccacccggggcgccctcccgcgccctcttgcaccctcgcacacacaaaaggcggcgcgccggagcccgagacccggggagccgccgccgccccgccgccgcccgcagccaggggagcaggaagtccggacgcagcccccatagatatggcaatggtagtcagcacgtggcgcgacccccaggacgaggtgcccggctcacagggcagccaggcctcgcaggcgccgcccgtgcccggcccgccgcccggcgccccgcacacgccacagacgcccggccaagggggcccagccagcacgccagcccagacggcggccggtggccagggcggccctggcggcccgggtagcgacaagcagcagcagcagcaacacatcgagtgcgtggtgtgcggagacaagtcgagcggcaagcactacggccagttcacgtgcgagggctgcaagagcttcttcaagcgcagcgtgcggaggaacctgagctacacgtgccgcgccaaccggaactgtcccatcgaccagcaccatcgcaaccagtgccagtactgccgcctcaaaaagtgcctcaaagtgggcatgagacgggaaggtatcggcctctcatttctccttccctcgtcctgggtcccggggtcctgggtacgtttggctagcctgctctgggtaaggacaagaagccccaagctcttctcttcgtattgcagcggaaaagggttttatactagaagcgagttctgcattggaacccagaccccaaatccgcatgctttggccgactgatttccttctttactctctctttgggctgtttccatttcctttgcattgattgtgagttcactggagtctgcctttctgcaagggatggggtgtttgttgttgttgttttaaagcctagtttacttctctctctctgcccttgtttttcctgcatgttcaacatgtccctccccctcacccctttccccagcccccaccctctcaaaaaaaaaaaaaaaaaaacctgagattgtacttttgtacaggaggttcaaattacaaatggcaattttatgcacttcgccgtattaacgctgccgcccgggcagcgctcatgtgaccctccgtggattaacatcctgctaaaaaaaaaaatacctctgctttcttttttcctttcactttttgaaacgaagagagcgcgataggaagtaggaaagggtgggcgaggggccctgggcggctgctttcgctctgcgcgagttgggtctttgtgatataaaattcgccgagcgccgcgagccgtgctttgccaatggcgcgctcggcgcggggcgcgggctccgggttggggcgagccaacgccggggtttctttgtgtttctgcgagagcgactctcccggtccggagtcagataacagcctgggcccgagcctcgccggctttccccggcccttacaggccctgcccaggctccgctagtgccggccgcctgctccctgcctctcccggcttcctctctctttagccggcctctctctctccgccctctccc

SEQ ID NO: 6791 - DNA, 6000 bp, Homo sapiens
tagcaggctccaatttgttaagatatggttgggaaattattccattttaatctaaggccatcacgcatacttcaaattccaaaaatctctaagtggactggggaagctcttcctcctcgatattgttccttcccatgtttgtaaaaggtaatctgctatggaagtctcattcaggaggtgagatgaagatttccctataatcaattattttcatcctctattgagatgggaatgcccattagatttcctatctcaaccccagtctcatcacatctcagctgagcttgtcccgaatctgctgacatttgtaacattagcaattcctgaatcatagaggttggaagggaaaacaacaacaactaccaaaaaccttctcctgtgtaatgatttcttttccatccttcttatcctctttaggagaaagttatattgtgtctctaattaacctgaaattctcagcttggcttcattctgtggcaatcttattacacaccaggtttatgatagttcagtgtccactataggtttgctgggcttttttttttttttttaacaactttcaaataaaccgagaacctgcagctttagtgaaatacgtgatttcatcggagaaagagtgagggctgaggtttcgggaatgaagcttaaagaagatttttcctttcctaaaaaccagcccctatctgcccagatctttagtccttacctcatattctgcctatgtgtgtaaagagaattgaatgtaaaatgtgatctatgcatgtcaattatatgtatggtttatttttaaaatatctttaccctgtcaatttttttttcagctaccaaggatgttttctgtggtcatcaatttactcttcatatgtgttcatttctttcctggagctcagcgtcttttgtgtaaaatattttaattgttcacaaacctggttggtttaccggcatgaggttttttcttggtgcaaagtgtgtacaaaggagacacaattttcttgtataaatgtggaataatgataattcactaactggtcataaacaacaagtttactgcgttggaatatagtgtgttctgagagcaattctacatgtttgatgtttaaaaccagacaccctggaattcaaagacacaactgtctcaattattttagcacatggagcagaatggcaataggctatgaagttgttctttttgcagtgacttcttgaggtagaatatggcttgggtttggttcttgtgacctgtactagtattatttcccatttggggcagaatctctgggtgcgttttaatgactatatgaatgcttaaaaggaacttgaggaacaatgaagtccgtactcaactgttctatgacctagaagcatagtcggtgaagtctttgtctgtgtacattgacaaatgtgcatctgatacatgtgcgcttacatgtgtgtacagagggtgtgcacaggggaggctgggcggctgcctcctcctgtccatcagtgggcagaggtctttcccctctcaccatgactgggtgtgtggcaggatgttggctggagagttagctaaaaccagcgagagagggtaaagttgaggaaaattgattctaattgcatcatgacaatcagatgaagtctatttctgcttctcagcatccgagatgctttatttgggcaattaaaatgtcaggccacatacctgtgaaatgttaaccctacaaggaataaacagaaacagaacggcctttatcctctgaaaagaatatatgtcatatatatatgtcaccaaaccgaacaagtgatcagagttaattaagagaagggtttgccatcacccggatctggccaactctttcgtttggaaaatgcctacaagctcagttcgtggcaccttcccaccctcactccctatccctctgcaaagaaaccagggaacttttctttggcattgtgggtactaagatgcgccaggagtcccgggtggtgcgcgagcggcggaattcgtgacatcgccaagttgcgagaggcaaactccccgattccatccaaagcctctcgcggagcctttaagagacgttgtgtgtgcgcgctgcgctagtctccccgccggggcggaaacctcgggtgcgggatgtggggagagcagaggcagcgctcgcagggccagcacgggcccatccccctctcggcggcggcggcggcggcggcgcggccaccccgtccccgcccccccaacccccggtcccccgcgtgccccgcgccgcgccggcgacgccgctcgcgctaggaccgggctgcgcccgcggccgccatggcggggccgccgcagtccggccaatgacggcgagggggcggcgcgcgcgcgcctggccaggccaaccccggctgctgccttataaggcgcgccgtcgccatggcaacgtgcgctaagttgcagcagtcgtgtcaaagttcactatatagagagctcagtgagctgatcgcggagaagccacttctgccagccccggcgcctataaatcgcattccctcccgcgcccccctttttagcatatttgatcactttgattctctgttcttttctctccgcggtgtgtgtgtgcgtgcgcgcgtgtgtgttttcttcttctcctcctcctctccccgagttgcctcctttctccgggtgccgtactgccttttttcccctctttcattctttctctccgtctttttctcccccctctgcgcacgaaggatgtgcttctaggtggtgatctgccctcctctctctcttttatcatttctcccccgccgccggcgagttgactctttccctatgtgtgtgaggcggcggcggcagcagcagcagcagcggctccggcggcggcagcagcggcagcagcgacttcagcggcggcggcggcgctagacgcagcggctccgggcccgacccggcggcttcggcggcggctccggcggcagcggcggcccgggcggcccgcagggaacggcgagcggcctccacccagcgactgcgggcggcggcggccggagagagcgaggcgcgcgccggacgcccggggcaggcggcggcggcggcggcccagcgccaggacgacgccgcgcagcgcccgacgcggaccactttcatgctgattcccccggacccgggcagcgctccggccactccgcgggccgccggcctccgccccggcctgcctggctccctgggcgcgcccgcacccggcgcctccgatctcctagtcctcctgatttcgatggctttcctgaatggctgactgtgggctgccctggacttggcccccggacagtcgcctctcctcctcctctacctcctccttcaccaccacctcctcttcctcctcctcctcctcctcctcctccgccaactcctcggctgcacaccagctctaagagcgagagtgaacgagagagggagggagagagtgagagcgagcgagatctttggagagatttttttttttgcctcctacttctgtcttgaagccagacaatcgacttcagctctccctcccctccctctttctccacgttctgctcccactcgctctcctgtccccttcccctcccctcccggcggaaagccccccgaaaccaacaaagctgagccgagagaaacaaacaaaacaaacacaccgggccagacaagccatcgacaaaactttgcaaaagcaaaaacaaaaaaggaaaaactaaccaacctcaaccaaccagcccccgagccacccggggcgccctcccgcgccctcttgcaccctcgcacacacaaaaggcggcgcgccggagcccgagacccggggagccgccgccgccccgccgccgcccgcagccaggggagcaggaagtccggacgcagcccccatagatatggcaatggtagtcagcacgtggcgcgacccccaggacgaggtgcccggctcacagggcagccaggcctcgcaggcgccgcccgtgcccggcccgccgcccggcgccccgcacacgccacagacgcccggccaagggggcccagccagcacgccagcccagacggcggccggtggccagggcggccctggcggcccgggtagcgacaagcagcagcagcagcaacacatcgagtgcgtggtgtgcggagacaagtcgagcggcaagcactacggccagttcacgtgcgagggctgcaagagcttcttcaagcgcagcgtgcggaggaacctgagctacacgtgccgcgccaaccggaactgtcccatcgaccagcaccatcgcaaccagtgccagtactgccgcctcaaaaagtgcctcaaagtgggcatgagacgggaaggtatcggcctctcatttctccttccctcgtcctgggtcccggggtcctgggtacgtttggctagcctgctctgggtaaggacaagaagccccaagctcttctcttcgtattgcagcggaaaagggttttatactagaagcgagttctgcattggaacccagaccccaaatccgcatgctttggccgactgatttccttctttactctctctttgggctgtttccatttcctttgcattgattgtgagttcactggagtctgcctttctgcaagggatggggtgtttgttgttgttgttttaaagcctagtttacttctctctctctgcccttgtttttcctgcatgttcaacatgtccctccccctcacccctttccccagcccccaccctctcaaaaaaaaaaaaaaaaaaacctgagattgtacttttgtacaggaggttcaaattacaaatggcaattttatgcacttcgccgtattaacgctgccgcccgggcagcgctcatgtgaccctccgtggattaacatcctgctaaaaaaaaaaatacctctgctttcttttttcctttcactttttgaaacgaagagagcgcgataggaagtaggaaagggtgggcgaggggccctgggcggctgctttcgctctgcgcgagttgggtctttgtgatataaaattcgccgagcgccgcgagccgtgctttgccaatggcgcgctcggcgcggggcgcgggctccgggttggggcgagccaacgccggggtttctttgtgtttctgcgagagcgactctcccggtccggagtcagataacagcctgggcccgagcctcgccggctttccccggcccttacaggccctgcccaggctccgctagtgccggccgcctgctccctgcctctcccggcttcctctctctttagccggcctctctctctccgccctctccctccgtctctttctccgagcacactgattagacagacgccagacctccgctctctgcttgtctctcactgggggggttccccgccgggctggggctggggcttcggggtttgtgggagagtcgttccggagtggccacaggccgtctggggtggaccctcgtgccttttgcaaaagcgcctcaccctccccccagactcgcccctcccgctccctctcctccaatcaataagaaatatcagctgtttagcagtaaagaagaaagatgccctcagaatgctacatcccgcccacagcgccggggaccccgaggcaaggtggccaattctgggtcctcggcggaccagccccgagcgggcctcggaggcaagtgtgcccctctggccctcagagctcgcctgggtggtggtttgaaaggaatggtgccaagagcctggcgactccagctctgtggcaggcctgcctggttcttgcgctgctcagggcctgggtcaggtgggggtcgggctggggcagaccccgccggggaacctggggactgaggctggtcattaactgtggagtgtctcctttcctccccgcagcggtgcagaggggcaggatgccgccgacccagccgacccacgggcagttcgcgctgaccaacggggatcccctcaactgccactcgtacctgtccggatatatttccctgctgttgcgcgcggagccctatcccacgtcgcgcttcggcagcca

SEQ ID NO: 6792 - DNA, 6000 bp, Homo sapiens
tatatgacagctatagctttacaaaatgtatttcccattaagacttgaagcactctgggaggtcaagataggcggatcacctgaagtcaggagttcgaaaccagcccggccaacatggcaaaaccccatctctactaaaaataaaaaaattagccagctgtggtggtgtgtgcctgtaaatcccagctacccaacaggctgaggcaggagaatcgctggaacccgagaggcagaggctgcagtgagctgagattgcacccactgcactctagcctgggcaacagagcaagactccaactcaaaaaaaaaaaaagacttgaaagttgaaattattccttgatctatggactacaagatggatgttgcgttagaaagcatgaaaacaacattaatctccttgtacacctccatcagggctcttaggagaccaagtgcattgtcaatgagctacaatattttgaaaggattttttttttctgagcagtaggtctcaatagtgagcttaaaatattaactaaaccatgttgtaaacagatgtgctgtcatccaggctttgtagttccatttgcagagtacaggtagagcagatttagaaccctaggattttcagaatagtaaatgagcattggcttcagcttaaagacaccagccacaatagcccctaagaagagagtcagcctgtcttttgaagcttcgaagccgggcattgacttcctctagtatgaaactcctggatgacattttccaacagaaggtcgttttgtccacattgaaaatctgttgctcattgtagcccccttagtcaattagcttagctagatcttctggataacttgctgcagcttctccatcagcactttctactttgccttatacttttatgttatgaagatggcttctttctttaaacttcatgaactcacctctgctagcttcaaacttttcttctttagcttcctcacctctctgagacttcacagaattgaagacagctaagcccttgttctggattaggctttggcttaaaggagtgttgtggctggtttgctctcctatacagatcactaaaacttggaccatatcagcgataagactgtctcgttttcatatcattcatgtgttcacaggagtagcacttttaatttccttcaataactttcctttgcattcataacttggctaactcttcgtcacaaaaggcctagtttttggctgtctcagcttttgacatgccttcctcacgaagcttaatcatttccagctttttaaaaatgtttaatctatttatttgtttatttagagaccgggttatgagactggctaatttttgtatttttggtagagacgaagtttaccatattgccaaggctggtttcaaactcctgggctcaagcaatccaccagccccagcctctcaaaatgctgggattacaggcatgagccaccgcacctggccatttctagcttttgatttaaaggaagagatatgcaactcttcctttcacttgaacacttagaggccattgtagggttataatttggcctaatttcaatatcgttgtgtctcagggtatagggaagcccaaggagagagagacaggggaatgctggttggtacagcagtcagagcatacacatttattggttaagttcactgtcttatgtgggagtggtttgtggtactcccccaaaattacaatagtaatgtcaaagataactgattacagatcactataatagatataataataatgaaaacgtttgaaatattgcaagaattacccaaatgttacacacgatcacaaagtaagcacatggtgttggagaaatggcgcctatagaggctggatgcaggattgccacaaaccttcaatttgtgaaaaatgcagtatctagaagtacaataaaatgaagccccaaaaaacaaggtatccctagatggcagtttagactatgaatgtccaccgggcgcagtggctcaagtctgtaatcctagcactttgggaggccgaggcaggccgagcacttgaggccaggagtttgagaccagcctggccaacatagcaacaccccgtctttacaaattattattattattatttgaaacagttttgctcttgttgcccaggctggagtgcagtgatatgatctcagctcactacaacctccatctcctaggtttgagcaattctcctgcctcagcctcccaagtagctgggattacaggtgcccaccaccatgcccagctgatttttgtatttttagtagagatggttttaccacgttggccaggctggtctcgaactcctgacctcaagtgatccacccgcctcggcctcccaaagtgctgggattacaggtgtgagccaccgtgccaggcctacaattattaaaaatacaaaaattagccgggcatggtggcatgtgcctgtggtcccagctacttgggaagctgaggcaggagaatcacttgaacctagaaggcagattgcagtgagctgagatggtgccactgcaccccagcctgggtggcagagtgacactttgtttcaaaaaagaaaaaaaactatgaaggtggaagttatttcctggaggctgtgtaaacatagaagagaaggagatccaaggacagaactgttagaatcctcccattaagaggcaggttaagattcaacagggaggttaagtaggaggaaatccatgagacaatagtatcctggagatcaagagaaggaagttttgacaaacagggtgctggggaccagtgtgcagttttacacattaaggttcataatgatgcagagtggtgttagttgggaaagaatggctttccagacaggtcctcattgtggagcattgcccatggtgaattctccatttgaccaaagtctgcccccagaaattcaaacttccccttctgcgagtgtcactatcagaaacagattctttttatccaaggtcacatagccaattttaaaaaaaaggccagatgtggtggctcgctcctataatcccagcactttgggaggccgaggcgggtggatcacttgaggccgggagttcgagaccagcctggacaacacggcaaaaccctgtctctactaaaaatacaaaaaattatcagggtgtggtggtgggcaactgtaatcccagctacttgggaggcagaggcaggagaattgcttgaacccaggaagtggaggttgcagtgagccgagattgtgccattgcactccagcctgggtgacagagttgagactctgtctcaaaaagaaaaagaaaaaaaagttttttttctttttgtagagacagagatttgccatgttggccaggctggtcttgaactcctgagctcgagcgatttgcccgccttggcctcccaaagtgctgggattacgagtgagccactgtgcccagccacagccaattttcttgaggctgagtttcatcattaagtgtatgtctatcagattttaactcaagttcacaaatacattgatataggacatatactagaacgtcagtcaatttattaataaaaatacaactgttaaatgcttcagtggcctaactactgcactcttctttctctctgcagttctgcttaagggaaaggcaaattttcagtatgttactttgtgagtatagaaggagaacaaatatgtcgtggatcttacagtttctcagctagcccagcgtgagacattcttaagggatatctttgtcaaacagttggcctgttgaacccttttattttcaatacttccttggctgacaaatgccttccttcgtttctccaaaaggagtgcaatattaactctttttgtttttctagttgcaattccagtgcaattcttcctgtctgagattctacatcctggttgagtttcgatggtttccaaattccttatccaggcatttagggtctttcaattgttcccctgcccccagaaatgcattcattttctgtggctttttactagtttaacttttagagggcaatcttatttccaagtttctgagggacactttgttggaaccaacaaacattgcgagtaactattcagatatcaagtagaatgaggattcagtaagaagccgcaggacttggcaaataaaaaggtcattgggggagctcaatgctagcagtttcggtaagcttgtgggagtggaccccctgggagtggacaaatgaatctgaattccttcgttagatatctaggaagtgctggaccctcagagtaaaatataagtaattacagacgagatccctgccctggtgcggcttatctgagaaggaaaggtgacctaaagtcacgacaattgtgtaatgatacagttcatgttgttgaggaactgtacagggctgtgacagcctttaagaggtggctctggcctagtgtagaggtttaggaaggaaaggttctgaggcagagacgtaggactggagatgtgaaggcgtggcagagtggagcaagacttttggcgtgcccaaaagacagcctgtgtggctacagagcggagagcgaggagaacagaactaggcgaggatgggtaagtggaaagagtaaaataaagctcctagaacgaggggaccagagtggacaggaaagggcggggaggggcggttccacttagaaactacaattcccaggaagcactcggcagccacaaacggatgtgaggtgaggcaggagcggcgacctttgaaggaaaaaaggaagtgtttggacgacagcgagcgggagaagcggggtcaagtaggtaggggtgcggtgcgggaggggcaggcgggctccggcgtgcgagggccttggccagcggagcgtttcgcggctccgtgtcgtcataaggcggcggccattttcgcgggcggaggcggcccggcgggccctgggagagctgggacgggcggcggccgggtggcctcggccacccgctaattgcatcttttcccggcgtctcgtctgcagagggagcactatgtctgcggaagtccccgaggcagcctccgcggaggagcagaaggtgagcgcgcggggcgtgagccctgggccctgcccaaggccgggtctggcgggcggcctgctcccgccaggcggagggccgcgcccgagatgcggggccgaggcgcatgaggccgaggctcctgcgccccacctttggcttcccgccgtcgctggctggtgcgccgacgaattgggagttccaacgtgccccgcgtttactccgaatcgtgccttttgtaacacctccgtgggtcgcggtgttcctcagtcacttatatttacgcgagagcccaggacgcaggctttgggcgtagagcctaagtttttctgtaagcctcaatttggttaggaagttttattttttcctttgaagaactctccaactacttgtattgtgagcgtgcggttcactccaaaagcagtgcctcgtgtgcgggccgcgatgtgggccaggattggcatttcagggccaacccttgtaaccatggtcagtgagtaaagtccggccttcagtgtcttcacctgtaaaggccgaatactggtgcttgcctcccacggcggggtgaggcctagaggaggtgagtcaggtgtagtgtgcagcgcagtctgtgctcaaaaaggtttcagtcgatgggactcaaatatggtacttgactaaaaatcgaaagggtggaattttaaaattttactcacgaaattaatcagggttttattggaaacaggaatattttgtaaacgcccttgtgtcttcctgatgtaggggaataggccgggagtgtcactgtggttcaaattatgaatatcaagcctttgtatttatctaggctggtgtttgtctctcccactgtaattatttccaccgccctgccctcctaggcaggtgtgactggccgagaagtgagaaagggccgaggtatcttgtctcctaaattgtttatcaacaatttttcttacaaatcaggttgtgttgccgttaaatacgattttggtc

SEQ ID NO: 6793 - DNA, 6000 bp, Homo sapiens
ccacgcccggctaattttttgtatttttaagagagacatcgcagactcaggtgtccgaaactaagctcatcatcatcccacttcaccaactattaccaccatcaaatgtctccctgtattctgtgtcacctaaaacaagtctgggagcaaattcctgatttgtccttcaccttccccatctaaacaattaccacgttgtcagttgttaccaccattccttatgcttcctctccactaccccacttcaatgtagaaggccctcatccatctcttacctcattttctctataatttccttttttaatttttttaacttttaagttcaggggtacatgtgcagttttgttatttaggtaaacctgtgtcatgggggtttgttgtacagattatttcatcagccaggtattaagcctagtacccaacagttattatttctgatcctctccctcctcccaccctccaccacctggtaggccccagtgtctcttattcccctctatgtatctatgtgttctcatcatttagctcccactcataaatgagaacatgtggtgtctggttttctgttcctgtgttagtttgctaaggataatggcctacactccatctatgttcctgcaaaggacatggtcttgttctttttatggctgcgtagtattccatggtgtatatgtaccacattttctttatctggtctatcattgatgggcatttaggttgattccatgtctttgctattgtgaacagtgctgcaatgaacatatgtgtgcatgtgtctgtatgacagaatgatttattttcctttgggtatatacccagtaaagagattgctgggtcaaatggtagttctggggttgcagagaaaaaggaatgcttatacaccgctggtgggagtataaatttgactttttaataatagctgttctgactggtgtgagacggtatctcattgtggttttgattttcatttctctagtgatcagtgatgttgagctttttttcatatgcttgttggctacattataatttctaattggtatgatttgaatgtatctgctccaaaattcaggtgttgacaatatgatagtgttaggaggtgttggttttttttttctttttgagacagagtcttgctctgtcgcccaggctggagtgcagttgcgcaatctcggctcactgcaagctctgcctcccgggttcacgccattctcctgcctcagcctcctgagtagctgggactagaggcacctgccaccacgcctggctaattttttgtatttttagtagagacggggtttcaccatggtagccaggatggtctcgatctcctgacctcgtgatttgcctgcctcggcctcccaaagtgctgggattacatgcgtgagccaccgcgcctggccaggatgtgttgcttttaagaggtggttagaccatgcggattcctccctcatgaatgggattaggtgcccttctaaaggggcttcataaagggaatgtgctcttttttgcccttctagcttctgccttgtaaggacacagtgttccttccttccggaggacatagtgttcaaagcaccatcttggaagcagagagcagctctcaccagatgccagcaccttaatcttaagagttcttaccctccagaactgtgaggaatacatttctgttctttaaaaattacccagtctgtggtgctctgttatagcagcacaaatagactaagatactaatgttctgtgcctctctaatccatctttcacctagtagccagaatgatctttctaaaattcagacctaaacatgtcactcacctgcttaaactcatcaatgtttctccattgctttcaggataaaatcaaacattcttggtgtggcatgcaatgcccttcagaggtctggcctcttgtctacttcctcaaaatcagctcctgccacttctcaaaaggtaccttatgctccagccagtcctaactacttacagtctccaaaagattcatacgttttcacccttcttgtcctttggaaactctgttccctctgattacaagactccatttgcccttgcaatccattttattttctacatgttctcacctcaaccattttatggtaaaatacatataacataaaatttaccattttagccatcaaatacaatttagtggcattaattacattcacattgttgtgtaactattaccactatccatctccagaaaattttcaatatcccaaactgaaatactgtactcattaaacagtaactcctcattacctaacctttatcctcaacccctggtaacaactcctacatgttcttttttttttttttttttttttgagacagagtctctctctgtcgtccaggctggaatgcagtggcacaatcttggctcactgcaacctctgcctcctgggttcaagcaattctctgcctcagcctcccgagtagctaggattacaggcacccaccaccatgcctggctttttggtgtgtttttagtagagacggggtttcaccgtcttggccaggctggtcttgaactcctgacctcgtgattcactcacctcggcctcccaaagtgctgggattacaggcatgaggtactgtgcccggcctcctatatgttctttttaaggctctcctaaaaacatcatcagctacctgcctcccaagctgagtggagggtttctgtcctctgctgacacggaagtctattgcagtgcttggcattttgcattgttcatgttaccttaaacctctacttcctgccctaaactgtgaacttcttaaggacaggaaccattgtctcaatctctgtatacaatctttgggtgacaatgttttataccaaatggctgataaatgcaagtcatcaaatctgctcattgcttttgaatcacctagagagcctttaaaaacagacgtctagggattctgactctagtaaatctggggagggacttaggaatctgaaattttggaatgctctccaggtaattctgattatgtgcaaggaagccatcaagatttggaagtaaaatcgatttaaaagactatgcccaagtaagatggtctttttattcttgatgaatcattaaaaagaagccaattcatttctcttgattttcatgctatttctgagtctctagctttagggaattacaataaagaactcaaaatctcttagcaatgatttttctgaaccattctccttccactaagagttataaaatgaaaatatgtcatttccatatttttctggaggggggacagggtcttgcttgctctgttaaccaggatgaagtgtagtggtgtaatcatcgctcactgcaaccttgaactcctgggcttaagggatcttcttgcctcagtttcctgagtagttgggactataggccggtgccaccacgcctggctaatttttaaaaattattttgtagagaagggtctagctttgttacccaggctggtctcaaattcctgggctaaagtgatcctcccgcctcaacctcccaaagtgttgggatttacaggcgtgagccaccacagctggccttcatttctttgttgacttaccaaagtgctttcaaattttcctccaaccaccctataacatagattattagattcaatctgctttatttttaatttttttttttttttttttttgagacagagtctcactctgtcacccagactggagtgcagtggcgcgatctcggctcactgcaagctccgcctctcgggttcacgccattctcctgcctcagcctcccgagtagctgggactgcaggcgcccgccaccacacccggctaattttttttttgtatttttagtagagacggggtttcaccgtgttagccaggatggtcttgatctcctgacttcatgatccgcctgcctcggcctcccaaagtgccgggattacaggcgtgagccaccgcgcccggcccccaatctgctttattatattaccatttgcttcggctttattacacttaccaaagccctgccaccccagtcgtcccagggccacttcaaatctctttattcatacatcaatgaatattttcccgaacacttactatgtgttactcagtattaggtaccagaggatacagcagtgagccagtcaaaattcctgcctgcatggcgcttacattctagttaggaggaaccttctcctcagagtgcttcctgtaagaatattttccttagcctgtcctagtctgactcttctaatcaggaattccataattccagaccacccttattagataaagggtaacatttgcctccggccacgctatgtcttaacgacgatcagccgctgtggcgattgtctggtatgcagctgttgaggctgtacattggcttcatgttaacatctgttctctgtgacactgtgcagctgaatgagttgggtgtctgtctccggaaggacgagactcctgtctgtagctagttctgtgtcctcccacgcttcatgagtgcttttcggtgattcttacatcaaaataagcccagtggataaccagaaaacctagcaaaacaaaaacaaaaacaaaaaacaaaaaacaaaaaccagggaaaacaatttcgtagaagtgcgttaaacaatgtcggagctagaagagaccttcgagatgtagccccactgccttttatagacaagaaaactgagacccagagaggttacctaagtcgcctccggtcacacagcccaactgaagaatgtggaccggtgatcacatctaatttacaatcacactgggggtgttcctcctaaaatttaacgtctaaatgagatccagccgcgtcaccgcttctacccacgctcccccctcccccgcccaccgtcctttctggtatttattctacgtcgctctttcttgaagagtcaagtcgttaaaataccaagtggaggcattctacagacaggtgtccacaccacggccacgcggacacggagtcggggaatctggatccccacatgcccgccgagaactctccagctcccgcttacaaagtttcctcgcatggtacgttcatctttccgatccctagctgcgaggccgagacgcctgctgctgtggcctccgacgaagttcggagatgccctttccttgcgaaagctgggcccggtagcgtcggccgcggggtcgggcgttctcgggcctggcggtcggcgagggagcgccgggcgcggggcggggcggcccctaggcgcgcgctgcccacccgggctgcaagagccgcgggcccgcgagccccggcttggagcaagaggcgcgcgcgggccgtgggggctgggccgaggcggagcgcgaggcggcggcggtggcgggaggcgccgcgggacgaggcagcggcccccgccccccgaagcccgtccccgcgcggggctggggagctcagggcggggaagccgcggggccgcgccacgtccctcgcccgccccagagcgggttttacaggcggctccagtctgggggcttttgtgtctgcgactcgggagcggcgagagagcagacctcctcctcagagggcgctgtgagtgtgccgccagggccgggccgcgagcctcctgcttcccctgtcagcggctcctgaggcggcggcgaagaagaaggagtgggaggaggcggcggcggcggcggcgcactcgccctcagcacatgccggccccgggtggggggccgcccccaggccgcgctcccggccaccgccgctgagccccgccggtgcccgcacgccgccccgccgccccgccgccccgaggcctcgtcctcctcccaaactttgcaaagtcggcccgcgtccccaccgccctcggccgtgcctcggctccgaggcttgcctcgcagccgcagcggccccgcgaggaggaggagccgccgccgcagcatcaaagagaccgaattcccgcggcctgggggggagtcatgctttgcggtctgtaatgtcagcagaacaggagaaggatcccattt

SEQ ID NO: 6794 - DNA, 6000 bp, Homo sapiens
tatctactcaaggaaataaaaatgcaaagttcacacaaagacttgtacatataaaatgttcacataaatgttgtacacataaatgatgccctcagcaacattattcagaaaagccaaaaagtagataccatctaaatgttcatcaaatgttgaagggataaacaaaaagggcatatccataaatgagttactattgagcaacagaaaggaaaaaatactaatacatgctacaacatggatgatccttaaaacattatggtaagaatccagacacaaaagacaacatattgtatgatttcattaaatgaaatgtccagaaaaggcaaacctatagagacagaaagtagattaatggttgcctggggctggaaagagggactgattacaaatgggcacacaggatttgggggttaatggaaatgttccaaaactttatcatgttgagggttgtgaaacttcacacatttactaaaagtcacctaatggtacaattagaatgaatgaattttatggtatgtagcttataactcaagctatttaaaacacagatacacaaacatatacacacacagattccccataatgcagagaataaagtccaaaatctctagcatggcaatgaagaccatctctagtccgcttcaccatttccagtccaacaaccttcatttccccaacacagcgatgcaacagcttttcctcttccccagaatatgtggagctgttcacacttctgtgattttttttcccacagttaaaacccacaaccccttttctacccagtgaactcctacacatccttcaagacccaaaataaattaaactcctctgaagtaatctctaaattatctccatcagaatgaatttcttactcatttgtggtcccatggaatcttctatatatatatgtataccatttccttttttttttttttttgagactgatttcactcttgttgcccaggctggagtgcaatggcgcaatctcggctcagtgcaaccaatgcctcccgggttcaagcgattctcctgcctcagcctcccaagtagctgggattacaggcatgcaccaccacgtcagactaattttgtatttttagtagacacggggtttctccatgttggtcaggctggtctcgaactcccaacctcaggtgatccacccacctcagcctcccaaagtgctgggattacaggcgtgaggcaccgcggccggcccaccatttcttctttgcattataggtctttgtacagtgccatctccactgtgttttgttcatctttgatttttctttcagaaaaattatatactaatagctagtatttgttgaacatttactctttgcaatgcactttatatatatattacttctagtcctcacaacaattctgtaggtgaggtatcactgcctccattatccagatgaagaaactgagactcaagaggacacacgacatgcctaggatcacagtgccagtagacagaaaaactgagatgccaacctgagacagataactactggaatccagaagtccatgttcttgccactaagcttcttgtggttcacaaaacagaaaagaaaggatgcatatatttattgtattttatgttactccgctggggctgctatgacaattccatagcctgggaggcttaaacaagagacatttattttcttacagttctggaggcttggaagtccagatccagctgccagccaatttggttcctggtgagaactctgtttctagcttgcagatggctacctttttgctgtgtcttcacttgggggagagaatgagctgtggtttctcttcttctgacaagggcatgaactccatcattggggctgcacccttgtgtcttaatctaaacctacttacctcctaaagataccacctccaaataccattaggattccttgtagtaaacaaaaattataggaggccattaggctcctataatatgacatatgaattacatattcatataagatatgaattttgggaagatgcacaatgcacacgttggcaagaattatgagacctgagttttagtatcagttttatcattgatcatgtgatgttggaaaagtcacttgacaatcttgaaacgagcccatttccttgtaaggaaaacaagagggttggactagataatctccaaatcgtgttctgattctaaaaattctgattctgtgtgctatcttgcaaccattgaaactcagatataccagttcagagcatactgtttggtgatgatctgaaatctcaacacagagctgtatggtaatgctaccatatcacactaccatgggcaggtacctcccagcagcatgagctcttaaacaattagagcagttccttcaggccaggtcaggtgtccccaactcttcctgactgcatgctttgtgagacagtacccaacacatgaacttttacgctgcctttgtcctacacaagccatccacatcacttacctaataagaaatactatctgcagccaggcatggtggctcacgcctgtaatcccagcattttgggaggccgaggtgggcggatcacgagatcaggagttcaagaccagcctaaccaacatggtgaaaccctgtctctactaaaaatacaaaaattagccgggcgtggtggtatgcacctgttatcccagctactcaggaggctgaggcaggagaatcgcttgaacccgagaggcagaggttgcagtgagccaagatcgccccactatactccagcctgggcgacagagggagactccatctcaaaaaaaaaaaaaaaaagaaaagaaaagaaaaaagaaaaagaaaaaaagaaatgctatctgcacagtgccaggcattgtagtggttgatttttttaagcattcacaaacactgtctcctaactggcctcctcccttcaatgaattccgtaggttgccaggtgaactttcctgaagcacagccagccagttctgattgtgtcattatgtaagcttttttgtttgtttgtttcctagcattttatttcttatgcaataaagtcaaacttccttagtctggcttataaaatcttacgtgttctagcttcaaccagtttttccaaccccttttcctctactactcttcagagaccttgcattccaggcaaaataaactacctatggtttcctgtagcatattttttacattaacataatttctaacaatattctaaatcagtctaaaatgtcagccaggggtagtggctcacacctgtaatcccagcacttagggaggccaaggtgggcagatcacttgaggtcaagagttaaagatcaccctggcaaaccccatctctactaaaaaaaaaatacaaaaattagccaagtgtggtggcatgcacttgtagtcccagctactagggagactgacgcaggagaatcgcttgaacccaggtggcagaagttgcagtgagctgagatcacaccactgcactccagtctgggagactctgtcttaaaataaaatgtagaacatgcttccctaatagcacacactagattctgtttatgcaataagtttatgcagttccttgtattaaaaaaaattataggaggccattgtttagaacttctgcactagaccccaagagaccagactaaaataaaaatggtatcactcaggctcaccacaccgaaactgagttatgtggccctccaagaaatcaggagacagaggtaacaggccagtttcaattttcaatcagcaagataatgaatttcctctgttttagtccctacagcaaagagtaacttgaagtaacctgatgttaaccaatcagttatctttctattgtactgtctgtctccaccttaccaggaaagtaactttgaaatgatcaatctgctttttgttctttgtttctactttctacagaccttttttctgtccgtaatgccaacctcctctgttccactcattgggacactcattccattttatggaatgaagtgttgcctgattccagaatcgcaataaggccaactgagatctttagatgtgtcaaatttttgtcttttgacacttgtgctggtctgtctagaacgccctttctcttcattccacatacccacattcttcaaatgagctcacacggcaggtgctcagtgcagcaactgacatgtaagtactcaatactattcaaaactgcgttttgtccctcacactagctattcctctccctctaacctcaatctatacacctttcttatgtagtttattactttctattgtatttaatgtaaatgtcttagattgccagagatccaaagcactggaaaaatcagtattcagtcttagtccatgtgtacccagcaccaagcacaaagtactctgtttacggtcaataaatctttccgtaatggatgagaacaaaactagtgtttgaactcacagctaaaactggatggggagtggagcggaggtgaaggagcacttaatgaggccctactatgtgccaggtactgtgcagagcacagcttcttcctttgtttcatttaatcctttccaaaaaaccgtatgatgcagcagtaacaatttcatctccattttacatatgaggagtttgggttacggaagtcaggaaacttgcctgaggtcacaaccaagtatgtttgggtctttccagtaccgcacttgtcgcttgtccgccttccaatttatcactcccctcctctccccgacgaaggtcgaggactttctaggaaaacacgcagtctccaaccacttccgcctggcgagcccagtctcgcacttcgctgccagaaccacagcgagcgcttgtggcgggaggaaaggaggggagcagccgtcaagacgcaaggccccgcccactatgtcgctgagacgtcatcacgcagggccgagtcggcgcggccacatcctttaaatatggtcttttttgggcgcgcgcgacaatgtgaggagtggggtggagcgtgtgtggtgtgtggctgcggcctgggcaagagccgccgcggaccatgaggtgggcggaaaggctgtgttgcagcccagacgcggacgggagggcgctgccgggccagcgggcgtgctcatgcaggggcgggaggagggaacatggcggccgggccaggaccctttgctcctggctctgcgcggctcctacccctgctttgcttgcccttttacctgcttttctggaaccttgtttcccctctctttgcgtcccctttccctcagccgtttcttttgccttcctcgactattcccccccagctccacactgggtcgaagtgtgagaggtagattaagtgggagccggtcgggcccgttcggtgtcgagagaccgactcctaaatttgattaggttctcgcaggtcactttatcagtctgcctggggtcacaggagaagtactgaacatgagagatcaagcctgatttgtagtcctgatgatgtctgtaagtgatcttgtgaaatgtcacttaagttgacctcaagtcttctcaaatgtgaggttctttgtgaaaggcctaagattcctgatatcgaggtagcttttgtcataaagtgcctgccagaatctgccccataacaaagcatggtcgggaaaacaaaagatttattttggcagtaagggaatggaaaactgagttgacttcccgttccatgccatcaagtggcctagtatgtaagcaatgagaacaccgttctgtttcagctcttatttccatagtgagtgtcctgagagtaacactcccggcgtagattaaatggaaaagggctcgtcctgtatcgtcattgctgctctgctacaaagaaccttgggtctgctgtattctgttttaggtgccacagtctgttgagggtagatgtttagggagagattcttcctcacctaatagcacctggcctagccaatcacttgcttttgatcttggccttttgtttttactcagctgagtaagttctggagggatcctgcctcttggagccttcgc

SEQ ID NO: 6795 - DNA, 6000 bp, Homo sapiens
ctgccacccacctattctgtggaggttgctcagctctgtatgcctgtgaactttacccttttccttattgtggtgattacaaaacataagccagtcctctgaatttcctaataggtgtatgaaatatatggttccagaaatcccagaagccctgcaccattgtctccatttagtcaaatctttcacctccaacatcccattacactaatagccacactaatgatttgcagtcatctatcaactgttagtgagtggcacagtgctgcgcaaacatcttttcaatgggcaaccagacatgttacacctttaggaatgtttggaccgactcacggaactctacagttttcagagcacaggtcagctgatttgtgaccttctcaaaatcagggctactgtcttattcttgtttgattatccatcacagtgtcagcataatacctactcagtaagtgtggctgattatgagaaatatgtgtatgtgtgtgtgggtgggtgtgagtgtgtaaaagtgtaggtgtctcttgccacccaaatgtagtctatttcacgatatttcatgaactatgcatatgtatacatacatgcatatttcaatctacatctatattcattttaaaatcatgaataaggcagataaaccacattaatccacttgtcccgtccccctttatactcataaacagcagagttccttgtcttactgttggcttctgggtctcaccagtgttactccatttgtaagtgttcctttatgagaaactggctccttctggactcatatttaagcaaggctgtgatctcttctaggttagtttgtgatgtgtccatagcttcccaagtatccttgctttagaactctctgggtctgaccctattgtgtttataggaaacttggtcccctggctctatgtcaaccagaatggctcaactcctaaaggtcacagtgcagtggtggctaaggattccattgaatcaagctgcctaggaccacattaacctttcactgatccctttcttgttcagctataacaaaattaattgaattagcaagcagacgcacactggagagagagacgcagggcctgggtgagacaaaaccaaaatgctgtgcctcacatgcatcagcaaactttgaaatcacctttgtcctaggagccacttgcagattcgggataagtttgccagtccactggtttgtcattctccccaatagcattatatctgtgatttggggtggcaaattatgagatcagaacttgtgtggtgaaaaacaaaatatacgctcataaagtcaagtatcatttatttaaactgtaacataggaagactggcaccaatttactagtgatactaccgtctagactcctgcaaaaatgcacccatcttttcccctaggtgtttttgggaacaacttggcattagaagtgtctctctactttcttactgtgtggcagactcagtgtggaacccagcacacaggaacaccacgtggggctgtgaccatcctgggagactctgagatgagttacatgtgtttataagtatgttgtgtgccttctttttctgagattagtcaacagaaacctttgagctgcaaattaatatataacaaactcccattcctggtaaagaagtcccattctgtttaattatcttcatgtaagcaatattactttacttttttttttttttcagaacacttggtaaaaagaaaaagaaagaatatgttccttagcactgtgttctccctcagtcggtactcataagcatttatttaataaaatccaaacgattattcctacatatttattgcattttaatattttattgtatttctacttgattgtatttttttttttccttgagacagattattgctctgtcgcccaggctggagtgcagtggtgtgatctcagctcactgcaacctcaacttcctgggttcaagtaattcttatgcctcagcctcgcgagtagtagctgggattacaggcaagcaccaccacgcctggctaatttttgtatttttgtagagatggggtttcaccatgttgcccaggttggtcttgaactcctgacctcaagtgatccacccgccttgacctctcaaagtgctgggattacaggcatgagccaccatgcccggcttttacatgattgtattttaatatacagtgggtaaaagtttgtgctaaaatgtatcatttatggctccaatttggtattattgaagggagatgtcccttcaatatgggagatgttcccttttactcctgactgatttgtttggttggggccttataatgtcatagaaaatgtgcattttgagtggttaaaaaaaaaaaacagcctatagtttttactctcaaagagctttgtgttaatataaagaacagtaatataacctgggttaaaagctgaagacatttaatagaggcatgtattacaaatagcatctagctacattggaaggttaggacttcatatctgaaattctgttgctcattagttgtaggaagtgaatgaagtacatctccaaagggcaaggtcagtattacattattctggaaatgtctttgttgaataaatgtgtaaatatttcagataagtacttgagattatatttctattggggacatatctatagaatgaatgattctacttataactgcaggagcagatgtcatgttacatgttgttcccaatgactgatttcatttgaaatgatctggaaataaatactgattactagtgatgtcagattattcaccttggagtcagatgtctcacaaggcacgctagagctaatagatttggttcttttgaaaacattgttttctaaagcaggatactgttttaaagtagcattgtgaatcatccgagttgtatatctgggttcacttgcattgagtagggaagaacatacttccgaggatgcagtctccgatggttttccatcctttaacgatacaaaagaaagaaaattgtacctgggacctgcttataggatagcttggcattagtcgttagcacaagggaaatcaataaccaaatgtgaatgatggtgtcagtgtaactgaggggcgttgcctcattgggagatatagttgcatcataggaacgtggtgtgatttaatttcataattgtaaacattacagtgggtatggctgattcatttgaaactcttgtccactttgctatggctggacagctgagttaacatgggtaggtcttgggttcacatttttataatttcttttctttgtagttttttttgggggaaaaatctttaagaaaaaaagctgtattagaatgaatttatctgaaatcaaacttttataaagccatggcttgactgaaggacaacgaactttattgaccttctaaatcagagcgctgtataaatgtttggaagactcaattttgccttgaaagggggctggggagggagtgtatgaatccttgttttctacggtgctgattatttgcttgtgttttaaattgtggcccaactcaggggcaagagcaactcacttacatggagaaaaaaatatgctagaattatccttgcttaatcatcatgaatgcaacagctaatagccatctgatattttaagttgtgcgtggcaacagaccaacagaaaagcaagcagaatgaaatttcgtgaaggaaccgcaataggtacgcaaacttggcttttcagaatttttttctgttatgctcggtactatagacaccctgaccaaagttttaaacaatgcagactctgggtatgtagcatctgaaattcattgtaaagagattgacctgtaaaataataacgtcatgatttacagttccgtaaggacagtaagaagaattaagcttcaaagtttagagggaattaagtcttagtcgcatgttaaaatgtacaaagttcaccttcagaggtctttattttctgtcagaattaccacagtgtttcatttttagggtatgaaaacgatagcttttcctacttgtagatgggttctctggagagatatggaagagcctgggaatttagcggctcaaatcagctggcaactggagttcatttaggtgattcacatacaatttccggctttccttgcaggtatcagtggtcttggacgcggggaagggggttgggggggacaggtgtagaccaggaccttggttattggtataactgccaatatccaagggttgccaagggttgggtgggcggagttcccccgcccaggccgagtctctccagaaagacttcggaggagcttactccactccccggacggtcccagtggcttcgttctccacggcccagaagtgggccgtaccttccgattagagctggggcactctaggaaatgcgggtgaccgtagctccccagaccaaacctgtcttttccaccaacgagctggcgcatttatcgcccccgagtgctccggcaagccagcgggagagtggcgtcgggttgcgagcctcttgccccaccgagtgggggcagaaagtggtcagaggcgcgttccgcggggcgctgcgtgcagaaaagcgaccggcggccacaggtgatcccgaaggcgaggggaaggcgggcgcccgggcgagggcccggggcgcgggagggcaggcccggccggggtgggccagcagagccgccgctgctactcacctgcccgcgggggcggggcggggcgcggcgctggggcgcgcctgcctcccgcctcccgcctcccgcctcccgccccgggaggaagcggaggggcgcggtgtaaacagagcggcggccgtgatgtcagccggtcacatggagcctcttatggctcgggatggctctcggcgggcgggcagctgcggcagctgctgctgtggctcgggcggcggcggcgcggcggcggcagagggggctccggggtcggaccatccgctctccctgcgctctccgcaccgcggcttaaatgatgtattttgtgatcgcagcgatgaaaggtgagcccgggcgccccgccggggccgggtgggctggcggctccggggggcggggaggagggcgcgcagggggaggggtgggcgcgcctgcccgaacgcacgtactgcccggggctcggcgcgggggccctgccagggccttctgggccaccgccgcggcgccacctgagcccggccacgggatcggcctgcctccgattggggggcaaaggcgcacggggtggatccccctctgctgccccctccggctcctgtcagtctcttgggtccgcttggcaccgggcgggtctcccaaaagaaagtttgccgggagtcgccgcgcttcggaaaggaaggggagggtctgcggagttcagaggaagccggggacgcccgcggccggtccccagggcccgcacccgggacagctccggcctaggtcggggaggcgccgcggccgggcagggccgtgcgtgcgcgttgtcgcgatgtcatccccggggactggtcagcgccccaggccttgcgccctgcccctgcgtccccgagcgcctcagcggccgccggccgggcaagtgccgcaggtccgcgctgtgtcccgcgctgtgtcccgccgcggccacttccgaaagcgcgcgggccggagcgagacgggcgcctcgagcgtgccaagacgctctgggcggcccagggagccgcggcgcaccccgcttgacactttggctggtggatggaggtggggaggaactcggcagcccacgggatccgcgggcaggggcggaggttagaccgtggtgagggccgacgggcgcgggttagtcgcggccaatcctgccgggcggcccggccttccgccctcatcaggactccgtagccgggccgggggcgggaggggagggggatttggttggagggaggactggctctaggtcctctcaggtgagaaggagagaaaccgtggcaagtcagggaactttctgatgggaaagctaaagtttggaggtgttcaggaagtcgcccgtgctgccgg

SEQ ID NO: 6796 - DNA, 6000 bp, Homo sapiens
actccacacattcattaattgttagactgtagttttggtattttattttattttattttttattttttgagacagagtctggctctgtcacccaggctggagttcagtggtgtgatctcggctcactgcaacctccacctcccaggttctcctgcctcagcctcccaagtagctgggattacaggcacccaccaccacacctggctaattttttgtattttttttttttttttttttttttttttttagtagggacaggctggtctgaaactcctgacctcaagtgatccacccaccttggcctcccaaagtgttgggattacaggcatgagccactctgcctggcctagttctggtattttatgtttgaagatgccaatgtaactctaacaatatttaaatattaattcctgtagtagtatttaaatattaataattgagttacagcatattgggtttccccaatatacattagatatgttaagtttttaaatgattaccaagggcaataaaaaaaatgaagacagctcaagagagtgggagaaaagtttggaagtcccatattgatctgtaggatgaaggtactgtactgacttaatgagggctatttgagatctggcccagatctgagagcactgccttatagttcatattaagtatatggattcatgggctgggcgcggtggctcacgcttgtaatcccagcactttgggagtctgaggcgggcggatcacgaggtcaggagatcgagaccatcctggctaacaaggtgaaaccccatctctactaaaaatacaaaaaattagccgggcgtagtggtgggcacctgtagtcccagctactcgggaggctgaggcaggagaatggcgtgaacccaggaggcggagcttgcagtgagcctacatcgcgccactgcactccagcctgggcaacagagcgagactccgtctcaaaaaaaaaaaaaaagaatatggattcatggccgggtgtggtagttcacacctgtaatcccagcactttgggaggctgaggcctccaagagttcaagaccagcctgggcaacagaatgagacccccttctctacaaaaaatacaaaaattagccaggtgtggtggttcacagctataatcccggcactttgggaggctgaggcaagcggattgcttaagctcaggagttcaagaccagcctgggcaacatagtgagatcccatctctacagaaaatacaaaaattagctgggtgtggctgcacactgcatgcctgtagtgccagctatttgggaggctgaggtagaaggatcgcttgagcctacgaggtgaaggctgcagtgagccaagattgtgcctgcactccagcctgggtgacagagtgagaccctgtctaaaaagaaaaaaaaaaaagagagagactatggattccccacaaaaattacaaaagtgtagttaaactcacatacctaattttaggtggggtttgtactatctatctttagagatctcaaagcaatgagtatgttgaaaataatagaatagaggacatgtgatgaattaggagtcaagccagttattcatacacctatacaaaagtgcctggagtttttaaaaaagctgtaggaagagaggatgtaaacaaatgctgcttataaatcatttttcttcaggcagtgggtaaaatgagtgatgcataggaatttgcatttctacattggcttacgctatcacatttaatcataacttgattttcttaataaaacatttctttctatagaacacatttattatttaccataatcatgttttaattttttgaaacatcctagtctatcatagttttagatatattgttgttcattgagctcattttatttactatttcaaagttttttgatatttaaacctgtttggcaattgaaataccaagctctgttttgtcagggtaacatgtttaccacttgtcactttcagccaggttttttttttttttcttggagacggagtcttgctctgtctcaggctggagtgcaatggcacgatcttggctcactgcaacctcagcctcctgggttcaagcgattctcctgcctcagcctcccgagtagctgggattacaggcatctgccaccatgcccggctaattttttttttttttttttgatttttggtagagatggggtttctccatgttggccaggctggtctcaaacttctgacctcagatgacccaccctccttggcctcccaaagtgctggggttacatgtgtgagccactgcatcccgcccaggtttttaaaggaacaattagtggatgagctgaaattccatttgaattgtgcatgtgtatatactcccacatgtattcatgtcaatggcagaggtggagatgtattaaacatcctattgacccatttgagtttgaagtgatttcctaaaggttttgctgaagtgattgcctatggtgaatcaatttaaccctgtctcatgcatacaggaaaccaatagacgtggtgtttcgtttaagtgaccaaagctcatttcctctctgccccagttaaggtggataacagttcaattttggtgtctataaagaggttatcatgaccaataaaattagagcctgccgtggcaagtatattcactgccatggaatagaaaacaaatttaggagctactgttaagcattctgcttgtaagaagacctatttaagataggaaaaccaaatgaagatttttactcatttttctctgaatgcccaactgcatttctctgaatattttacctgccataacgatatgggttcttttccttttttttttttttttcttttttctgaaacggagtctcgctctgttgcccaggctggagtgcaatggcgcaatctcggctcactgcaacgtctgccttctgggttcaaatgattctcatgcctcagcctcccgagtaggtgggatcacaggtgcccaccaccacgcccagctaatttttctatttttaatagagacagggtttcaccagtttggccaggctggtctcgaactccttacctcaggtgatcctcaggcctcggcttcccaaagtgctgagattacaggcgtgagccaccgcacccagcctccagatacgagttgtttttttcgagtattactttgttaacttttaccccaaccattcattttcccaatattttcaaaccccaaatcacccagacacaataaatgaggtctcttttcttatccatagtgtcggtatgaaagtttattttgaaggtttttttttttttttttagacggagtctagctctgtctccatgctgcagggcagtggcgcggtctcggctcactgcaacctccgcctcccgggttcccgcgattctcctgcctcagtctcccgagtagctgggactacaggcacacgccaccacgcccagctaatttttgtttgtttgtttatttatttattattatttttgagacggagtctcgctctgtcatcaggctggagtgccattggagtgcaatggcacgatctcggctcactgcaatctccgcctcccgggttcaagcaattcccctgcttcagcctcccgtgtaactgggactacaggcacgtgccaccacccccagccaattttttgtattttagtagagacggggtttcaccatgttggccaggatggtctccatctcctgacctcgtgatctgcccgcctcggcctcccaaagtgcttacaggaggactacaggcgcgagccaccgcgcccggccaatttttgtatttttagtagagacggagtttcaccatgttggccaggatggtctccatctcctgacctcgtgatccgccagtctcggcttcccaaagtgttgggattacaggtgtgagccaccgcacccggcatattttgagttttgagtggaggattagacagtcttcttccttcccaaatttgattatgggctccctttagcctttttctttgttttctgtcttttttccaccaccaccccgcccccgaggcgcagtctcaagaggtcctgagaacatgtgccctgctctctgttttaaggattaaaataactgtcgagttacattgaatcttttttgcctattccatttggctaggttaattccagaccttacacaaacatgtgcagctcttacaaaatgtaggtgaagacaacatttttctaaccattcggcttcatgggctgtcacaggagaactaagtgcatgaaaaacctttcacaacattgaaagaaattttaaaaatctggttgaaacacaattaaaaatccacaagagggagatgcttgctaaaccgtcagaaaataattccctcgagggacctgagagaggagcctggagccttaggaacagccactgggtcagccacgggattaagggtgggagggagcaggagtatatagagacgggggcttggtggaggagtacagttgaagggaaaagcgggatgggtttcgtgcctctggcagcgaagcgtgtacttggtctaagatcttgagcagaaggtaagagcgtgttgccaaagcagagctcagtgctcccgatatatcttctggtagtcccagaagaaatgggggtgggttgctttgaaggcacttccgcttagcaaccccacgcggttgctaaggagggggcagccgtggggataacccggaagtgatggtgtcagtttaacgctgcctgcccaaagtttgtcctattaggcccgccagggtactctgcgactccgggacgagggcggggccgcgctagtggttccggttcggctccagccgcccctcggctcctcgccttccccctcccgtccgccttctcccctccctcccgctcctgggaaagagagaaaccaccgctgcgggtgggtagagaagcacttggcgcctcggggaggggaccgcgcccgcctcatttgcgccttgcagcactgctggaccaggtatctgcccggcttcgtcggggttctgtaggctgaagtctgagggggtgtgtgtgtgtctgagggggttggtggggggccctttcctgggcgtgggtgggggacgccgtgatcccgggtggggcgcaggctggcgtttgtgtctgtggagggttgcgggggcggaatggaggggctgagggacacagcgggtggagagtttcggttagcggggtagaggtaggcggaggaggcgccccttccgagaaactgactctagccggtgtggaccgggagtttgccacctggagggcttactctgaaagggggagcatcccccgggagccaaaaggagggcacagatctcgtcagggtgactggggctatcccgtgcttccattgccctctttccctacccaccccgctgggacagagctggacttcgaaggttgtgggggttctgagtcgactgggtaccgcggggagccgcccttggcggagcttagggcacaagagtgggtaatgagactttcctctacccaacttccgtacgcttcccccacttcttcctttactgtttcctcgcccccacgtcctacaggagcaatgtcccccaagtgggcaggcatcacaatgtaaaagagagtggaactgggtttgttgcccctaaatgacacttaagatgtttggaaagtgcctgaatgacatattcaaccaagtctcccagctcgatattaattccggtataaattaccttagaaaagtggaattctgaaaagcatttaacaataggctagtccaggtgtagtcttgtgtagtagatgtacgtgtttatttaaaaagaatggactggggaaaccatatagatgtatcacaggtctaggcaagacatgttgaggcaaggcttttgcagcctctttcttacctgccagtaaacctgtcctaatttaaatgaagtagaaagatcctcttcatttttgtttcaatcagtgactgaatactaggtgctgtgtagtgatgtctcagaacagatatgtgaattttcagagagagaatgaa

SEQ ID NO: 6797 - DNA, 6000 bp, Homo sapiens
gtcttctctgatccttaggtgccctgtagaggggtcctgaatctatggagggctctggatacagattggcaaagtgttatctggcaggaagtacacaagctgtttccatggtgggggcagattgagaatcctcaaactgtactaaattttaaaatgttgattatataagaaccattttgacaatattaattcagtcacaataaatgaaaatttcaccctagttccaccattatagccagtaataataataataatacctgtaatgtattgaagatgtactatactagggactgagctaagcactttacagatatgatctcattcactctgtttttttttttttttgagacggagtctcacttctgttgcccgtgctagagtgcagtgacacagtatcttggctcactgcaacctctgcctcctgggttcaagtgattctcctgcctcagcctcccgagtagctgggattacaggcatgtgccaccatgcccagctaatttttatattttcagtagagacagggtttcaccatgttggtcaggctggtcttgaactcctgacctcaggtgatctacccggctcagcctcccaaagtgctaggattacaggtgtgtgccaccacacctgttctcattcactcttcttaatagtccaaagagatatcgccacttcgtagattagagcgctgaggctcagagaagttaaaaacttgcccgtggtcacagatagtcaatggtagatccaggacttaatgcaggtctgagtctaatactgatgcctttaccctatattccttctgccatcctaataaactttttcattttctatactccaggccttgtccatattttctaattttacataattatactcatagcacagctgtaattcagattattttacaaacttaactttatatcctaatacacatcccatccaccaagtcttattgagtctacctctaaaatatctataatctgtaatccacttcccttcatctccacccttatcttttgtctagagcctcttaaccagtctccatgttttactcttgtccccttcttatcccctcttctcccaggagtgagtgatattttaacaatataaaccagatcacggcattccccaacccatcagtgggttctcactgcatttgaataaattgcaaatccttaatccagccaaagggccctgcatacttcacccatgctttgctaagctcactgcactctaaccacactggccttctcccagctcttcagaacagcatgattctctaccacctcagggccgttgcagtttcctctgcttggaaccctcccctcatgctccccatgactgatgcttctttgtcttcaagcctcttcttttttttttttttttttgagatggagtctcaatctgtcacccaggctggagtgcagtgatgcaatctcagctcactgcaacctctgcctcctgagttcaagtgattctcctgcctcagcctcctaattagctgggattacaggcatgtaccaccatgcctggctaggttttgtatttttagtaaagatggggttttgccatgttggccaggctggtcttgaactcctggcctcaagtgatctgcctgccttggcctcccaaagtgctgggactacagtcatgagccaccacacccagccatcaggcctctttttaaatgtctcttcaacaggccattcctgaccatcctcctcaacctaaattaggtctcctattcacacagatcgtagcttatatatttgtgtgattatttgattaataccattcacacaatcttatagtcctatgacagaaggacgtctgttttgctgagcactttatgcccaacacagtaccagatacacagcaggtgatcaacatttattgaaagaataaatatatttctatgttactatataggcttcacaaatataatgtaatagctgcataatacccgacagttatccctttaattaatggctttaataatacatttgtttcatatgcagttgaaagaactgaccttttatggttagaaaaaaaaatgtttgaagtccctggaccagccataccagaaatctgagcacactaataacaacattatgcatgtacatggtgagcctaattttgctgttgaaagtaaaaatacaggccgggcatggtggctcacgcctataatcccagcactttgggaggccgaggcaggcggatcacaaggtctggagatcgagaccatcctagctaacatggtgaaaccccatctctactaaaactacaaaaaagtagccaggtgtggtggcatgcgcttgtagccccagctactcgggaggctgaggcaggagaattgcatgaacccaggaggcagaagttgcagtgagccaagattgcgccactgcactccagcctgggcaacagagtgagactccgtctcaaaaaaaaaaaaaaaagaaaaagaaaaagaaagtaaaaatacgtagattataggttttgaaatcaatttagtaggttatgagcagtactgcttttaaaaatagaacagaatgggccgggcacggtggcacacgcctgtaatcccagcactttgggaggctgaggtgggccgatcacgaggtcaagagatggagaccatcctggccaacatggtgaaatcctgtctctactaaaaatacaaaaattagctggggtggtggtgcgcgcctgtagtcccagctacttgggaggctgaggcaggagaatcgcttgaacctgggaggcggaggttgtggtgccctgagatcatgccactgcactccagcctggtgacagagcaacactctgtctcaacaacaacaacaacaaaacagaatgatgtctgaatgcctgcctggcaagtgagaggataaacattgttttatataactttttgtttctattttatatcgatatacctatagacatagtatgtatgtgctgaagtatgtaccaggttgcaggttgtagtgtaaaatatatttcttactgtggattgtagtttaaaaaaatgaaaaactcggccaggcacggtggctcatgcctgtagtcccagccctttgggaggccgaggcgggtggatcacgaggtcaggagatcgaaacatggtgaaaccctgtctctactaaaaatacaaaaaaaaaaaaaaactgggcgtggtggcatgcgcctgcagtcgcagctactggggaggctgaggcagtagaatcgcttgaatctgggaggtgggggttgcagtgagccgagatcacgccactgccactgcactctagcctgggtgagcagagtgagactccgtctcaaaaaaaaaataataaaaataaaataaaaatgaaaaactctgatttcagtggcttgcctttgaagttattcgaacacttcagaatcctcaggtattacctgataaatgacttgttcagtgttctacaagctcactttcctgatattgctgattactatgcatggaggatttggaaactcccaagattattttattttttacaaacttattttgtatttatttatttatttttttgagacagtctggctcttttcaccaggctagagtgcagtggcatgatctcggctcgctgcaacccctgcctcctgggttcaagcgattctcctgcatcaagcctcccgagtagctgggagtagctgggactacaggagcacgccaccacacccggctatttatgtatttaattaattaatttatttattttttgagacggagtctcgctctgttgcccaggctggagtgcagtggtgcgatctcggctcactacaagatccgccttccaggttcacgcgattcttgtgcgtcagcctccggagtagctgggactacaggcgcctgtctccacgcccggctaattttttttgtgtgtgtgtatttttagtagagacggggtttcaccgtgttagccaggatggcctcgatctccagacctcgtgattcgcccgcctcggcctcccaaagtgctgggattacaggcgtgagccaccgcgcccgacctgtcccttgacttttttactgtcctgagatgccaggcttatgtgggcggtgtgttcccagcagaagatgatcccgtggaagtcccgggggatgaaggttaggttagtcccagtgccagcctttggtagaaactcaggacctgataggtagaaaggcgacgaagagagcctgctcttcttcaagttctacttttgccatcctaattcccctcgctctaaggataaaaccaagcttgatgaagccgccttaaaactgccccttcaagtgggagccctcatctcatttttatccaggaaagagcccagagcatctgccgcggcctgtaggctcttctctgccaggctggcttccgaaatttcacggtggcgggtaccttaaggccactcggccgggcaactggcaggaagatgaaggtgggctttaaggaggagcacagctatgcccatctcagactctggagacccgaacgaactctaatctgaatgtgtgaccttgggcaaatcacttaccctccccaggcctcggttcccttatctgcaaagtaaaggtagccctaaagtccccgccaggtgtgaatgggactttaagtccatcaggcaggatgttgatggcactgcgccagggccccgggtcggcgtggggcgggggcgcgccaacgcggggccggcaccgaggactgggtggcccgggagaaaagcggcgactgcgcggctgcgcgggggacggtgcacacagtgctgcgccccccgcctcttggctcgctgccgcggcccgggggccacgaggttacgtaaggagccgggcgggggtagcggctggggagggcggggcgggcaccgccccagcgcggccgcccagcccccgcccgcccgcgcctggcggcggtggcggcagtggcagcagtggcagccgcgcagccccgcggaatggagcggcgccggggctgagccgggcgcgcacgggccgccgcatgtgccgcgcggggagcggctgccgagcgggcggagagcgagcgcgagaggccccgtcggagcggccgccggagcagcgccggagatggggtgagtgagcccgcgccgcgcgctctccgcgcgcccctccggagggactgcggggccgcggctggcgtaaccgggctcggagcctcccggcgggccggcccccgcctccccaagccggagcgagcgcacactctgcgcccgggagtctggggccacctgacccgcgccctccgccggggcacgcggacacccagcaggggcaccctggcctgggcgcggagcccgtggcccttcccctcccatacagcccgggcacgggggcacctgacggggaccggtgccctggccggcctcctgcctcggccattccgcggtctcttcgcccctgggcgcagtcaactccagggcctgtgtgagtctaagcagtttgtcgttctccacgtttggatttattacaagcaaaatggaaatcgaagttttcctggaaataatcaaataataataaacctccagcgtaggaatagtggactttggatctgctttgagatgctgaagatgatggaagtctataaggaacctaggtgaggcttcagtctttgaaacaactgagtagatgctcaggagggaagttgaaatactctgtcgaagtgactaatgcttctgagtatataaagtaatttaagctttcccctcggcgtctctctgagcagtaggctctgtgagtctgggagccactgtgctaatagcacaataactccttacatctgctcactctatttgggcacacgttgacggtttgccatacgtattcaggggacacttatgtccactttacagatgaggaaactgaggcacaaagtggttcggtgacttcccccaggctgtgtagttgatgagcatttgtgtagcaggggtggccttgccactgcctgacgtgggcatggaggcgggtaagtgaaccagaat

SEQ ID NO: 6798 - DNA, 6000 bp, Homo sapiens
ttttcttggatatagagtcttgctatggtgcccaggctggtcttgaacttctgggctgaagcaatccttccacctcagcctcctgagtagatgagattacaggcatgagccaccatgcccagcttctccatgtatttttaatttgcattttcctaatggctaataacactggtcttctttcatgtgcttatttttcacttatatatcttctttggtaaactgtcttttcaaatcttttattccctaatctggaaagtggtgcccatcacttctaccatatttattagaagtgagtcagttaagtccagtcaacattccatgggagaggattacattggagtgggacactgggggccatcctagaggctgtctaccacgtgtggcttcccatttcttttagggtaaaatccaaactccatatcctggtctacaaagccctgctagatctagccccagccttccacattgcttttttttgttatttgaacatgctaagctccttctccttttacggccttagtatcttctcttgcctctacttgggatgtttttccatcagattttcccacagttgatcatttgtcatttgaagtcccagcttaaaagttacctcctcagaaaacccaacctcagtcacccaatcaaagtagtctaccagtcactccttatcaaatcactctgtactaattctctatgtgactcttagtactgatagaataaaagtttcaatgtaacaggaaatttctttacctcattcatcgttatatcaccaaatcctagaatagcgtttcacttgtgatagacgctcaataaatatttacttactgaacaaatgaatgagatctccaaagaagcaagaacagatgggatccatagtatagctgaagggattaaccttggataaagttcctgtgactactgctgtttaataaacgaccccaaatttagaaaaggcatagtgaagatgtctctgctccacaatgtctgaggcttcaatttggatgtcgtgaaggctggaagtgactggacagttggggctgaaattatccaaagttttgctcactcacatgtctggtggttgatgctacctgttggctgaaacttcagcttgggatgatagccaaaacatctacgcaaatgcagacttcttcatggcttgcttgctgagttccaagagtaagcacttcaagaaagctaggtagaagttgcatcaccttttgtcatctagactagaaaaatcacttttgctctagttataagcacgcccagattcaaggatagagaagaataaccccatttcttgacaggaggagtgttaaactcacatagcaagaagaacacatttaggatgggaaatattgttgctgccattctggtcaactccaactatatcatggccagttttgtggccattcatgccccaacaatgacaatcaaagcaagaaaacagaggagaacagcctggaaattctaaacatttatgtttatcagttttacaattgattgtcagtttttatcttcaactaggtaaggacaagtggaaatcattcccaggtcttgtttttgttcagtgtccttgtgtagcttcgtggcagtgggatgtctataggtcatcttggcagcacctcacgtgactaatgaaattttcctttcccttaattctgttttgaattttccttcctttcaaacgcagccaaatttattagtttactctgagagcaacattcaggagattaatccaagtaccactggaaaagtgattcatctttttaatgagcactgaaaaacacaaacaaaaaaaccccaaaacacttgcccagattcatttttataacggatgggctctttgacaggcaactggaattctttagcagagattagctgtctgtggtttgtgggctccatttcctttcaagtgtttggttcagctgcaaacaggtataacctgtagcactcattgtttctctctttagtcttcatttctccattgttaaatttctccattttatatcttcttctctagacactgctgtgaaaatttgtgtcctagatatttattttttgtttcataaattataaaagaatactttgcctattttccttttgaagtgtaaataggctgcaagtagtctgcttctgttgtagagtgatgttttccacttgccatgcttcctggttactgacaaaattagacagtttgtgcttggatgctggtgggaatttagatctgtattatgatatcttgaagccctaagccatactgtataaaagattctatcccaaaccactgaaaaatctacacagtaatgatgattaattatataaaaagcttaagatttgcatataagaaacatttcattaagagaaagaggaatatgggggaaaggtagagaaaaaaatatgagagaaggagattgtgtcaattactacatgctatgttcctgagaggagacagaaaaagtacaattatagctccctcacagaaaggactttacaattttgttaggaaaggaaaaagaaatctcgatgcataacacaattagagaagtataatatgcttcatgcagtgaggttccaactttaactaagccctataattgtgctgaaaagaaagagaagtttggtttggaataacatgggaaggttcagggaggaggtgagacttcagccaagacttacaattggcaaggggagaagagatagccttccacaaaagggtaacagaagggggcaaaattctgaggcctaaaagaaaggcatccttgccttggggacacctgtggcctacaatcagcacatggggagttcactactgtgggagaaataaaggcctccagctggggtccaggggtggggtgagggaggcttgcggggtgcttatcactgtaaaccaaaaataaaatttgaaggtccgccctcaaccgtctgaatggacttcctcctgtagtccagggtcctccaaatttaacctaaaagactggcttaggccatgatgggaagctgaggtcagacatgcctcattatgcccttctttcttttagaatccaggaaaagctacacagcatttaatatcaacacatataccttgagtctgataagaaacacaacttactttctctgaagcctgctaactggaggcttcatctgcatgataaaatttcggtctccacaagttcttatgctaacctagacattcctttaaatcaattaccaatcagaaaaaaacttaaatttacctataacttgggagcccatcttgccccacacccgctctgctttgagttgtcccacctttgtggattaagccaatgtttatcttaaatgtatttgattgatgtctcatgtctccctaaaatgtataaaaccaagctgtgcaccaaccaccttaggcacgtgttctcaggatctcctgagggctgtgtcacgggccatggtcactcatatttggcacagaatacatctcttcaacattttacggagtcttttttttttttttttgtcagtaccacagacaaccacctgactcgaggaccttacctatttctcattcagccaatgctgcagcacgttattaacgtccttgaaagcaagtcttatacagagaaaacttattttgatatattaatgaatctgatcagaatggaccagattggggggatagataaatggttgcaattgtgctccctggaatagctttggagtttacctagatcttctgtctctttaggacagagctgcttgtgtttatatagcatcttacacaggattgagacaacttcaatttcctatatcaaaaaatcgggggagggcggtgggttatgggggtgttcaaacctcccaagtgacatctgctgtgactgcatgtcttcctactctttccactgggatgcacctctggtagctgaactataacgagaaggtaaaagctgtgtccaatacctattaagctgccttcttctcaacagctggggaggtggcgggggtgggggggggcggagggaagtcttttcaacagttttacacatttggaaataggcctaaagtgaagaaggggattttcaaattggtgtgttggaaaaggggctgggcttttgagtttgaaatctggtgctgtcacttactggttttgtgccctgggaatatttatttcagttttcatgcctctgtttttctataggcaaagtagaaaattcgaaaaggtcctcaacgagtttgtacagctgctcccactccctcatcacctcttgtgggcctttggaaatgtatgttggaggagacattttggattgttgcaatgacttgggagtgccatagcacctagcaggcagaagccagaaacaccaaatgtcttaacaatgcttgaggcggtgctacaaatgaagtccttctccaaatgcattgagccccaagaaaaatcgctgattctgaggaaccttccaactttaacaatttcaggacgtccctaagctgagctaggaggcaccacgcacaggccggaggcaccacgcacaggccagagtctcccaaatcctgtcccgcactctctcccaccttattaatggccagctcatctttcaagtttcgacttgaaccacttctcagagatatcttcccaggtgcccatcccaacgttactattatatcataatttgattctccctccccccatccccccgccaactctgtaaaccccaagtataacacaggacgttgctatttgttgactgacacatagtgcttggtgaggtcacgctggcgctgaatactttttgtataaaccgacgaacagctgatgaccgcatgaatgctcacacaaggggaaagggcgccaagccaaggagccggcgtcatccgacgtaacttccgccctttaacgctcctgcggacgcccccttctcccagtccgtgtttgtttccggaatttcaataaagctcgattcggctcgaagaagaccccgttcttccgggaaaatggcgactcccgctcgtgccccggagtcaccgccgtccgcggatccggcgctagtagcggggcctgccgaggaagccgagtgcccgccgccgcgccagcctcagcccgcgcagaatgtgctcgctgccccgcggcttcgagccccaagctcccgaggacttggcgcagcggagtttggtggagctgcgggaaatgttgaagcgccaggagagacttttgcgcaacgagtaagctggggtcccgcggagtctccgccaggctccttcagctcgagctccctgggcgctcccctcccctcccgcactctgttcccttccctggaaggtgactttgactcagtcacattcgcttcagtcctacgggcgagtggacggagggcttgctgcggcagagccgtgcctcttcctggccaggcacgtatgcctgcgaggatagctcggattgaacggctacctggcgttgcagggagttagtagcccctggtcggttttatttacccggggactgtggtggttccatgagtctgctttctaaacccttttgtcgcccgcacccctaacccataacagattgtcagcttcatctctggattctaagcttacaggaaccgtaggaaatgggaagagtgggatatgaagaggggtttattaggccgggaaagttcgaccctcattcagctggctggttgaacggattttagcaagggagccacgtaataaaagtgattttgttttttaggcagctttgttcagcagcttgttgcaaaagatggtttgaaggaataaaaagcagaagacagtagaaggatattttcagagagacttcccacgagacacttgtaagaaagtgagctaggaagggattgggagaacttttaagcatggactaatttaaatgcagttgacagagatggctgaagtttccaatctatatggaagaccactagcaaaaataggaaaattcagggagaggaatagatccaaggttgattttacttagggtgtgcagagttgagaggagagcaggac

SEQ ID NO: 6799 - DNA, 6000 bp, Homo sapiens
ggacacttgagttacttctaccttttgactgttgtgaataaggctgctacggacatgggtgtggaaatactcgtagtccctgctttcaattcttttgggtatatccccagaaacagaatgaccggatcatatggtaattctgctcagttttttgaggaactgccatacatacaccacagcattttcctcagaggcagcactacttcacatcttcaccagcaatgtgcaaggattctaatttcttcacatcctttccaacatgttattttctgttttttaaaagcgaatagctggccaggcgcggtggctcacgcctgtaatcccagcactttgggatgccaaggtgggaggaatcagctgagatcaggagtttgagaccagcctgaccaacatggataaatcccgtctctactaaaaatacaaaattagccaggcgtgggtggcacatgcctgtaatctcagctactcaggcggttgaggcaggagaattgcttgaacccgggaggcggaggttgcagtgagccaagatggcaccattgcactccagcctgggcaacaagagcgaaactccatctcaaaaacaaagaaaaaaagataatagccatcctaatggatgtgaagtggttcaatgtatatctttttatttgtataacttctttcaaaatgtatataattattttgtgtatatgtaatttgttttacatagtagcattatgctattcctttccctctgtgtcttactattttctgttggaactgtgtttaaaatctatacatttgttttatgtacatggaattcattgcttctcacttttgcatagcactttatagtatgcatgaatcacatccatgtatattgagaacctactatgtgcttgtaccaagctttctatatgatttaatctgattccatacagcaatcctaagaaggtgttgtaattatcacattttatggatgagaaaactgacacacacagagttaaggaacgtgcccagagtcacacagccggaagtggaagaggtagaagtttaacccaggtcattctggtgccacagaagagctcacacgtgtaaggtgttacaaagagctataggtagagatctgactgtagacagaggctctctcttaggtgagggcactctgataaaagttctagtcctgatttggctacttatcttcacagtgcaaatcaccttcccttacagacatcactttctgtctgtgtaagatgaagatgattttaatgctttttctagattcactacttgttgattaaatacccttaagctaatgggaaaataatcagaattgaagtcaggtgtttgtttctttcgtgtatttggagtggctggcctacctgggagccactccaaatacacgaaaaccctctgatgtgtctattcacgaggtgaactgttcataggatggactattcccagggaaacagttgctgtctccacttccatcccacctctcctgaactttgcacttaccatggtgaaaaattaactgggctaatgtttccctcccaaggacaacctctgcaaaagcaggtatggctgggccccaaaagaccaggtgccagaacagagttgtacccatccagagcagcccacccattcactgcccaaagtcaagatcaagagaacatgcagggtcttctcagcactggaagaatcagttcctcagccctcctcagagctttctgaaactggacttagtcccccagtggagggacttctcttggagaaacaggcctgaggagaaagaactagcccagaaatggcacttattagacttgtaggtgggtccagcactatttttctgcatgcacagctgttcttgtcacacggatgccagcagggaagcatggttctgccacactaactagctggctgcctagttatttcctcccctcaggaaaatgagagggctgaatgagggccccttcccataccatgattttacagggtgaagtacctgtcaggtccttctactacatgtaatcctcaaatctctctgacgctcttcctctacagtgcaaatcactctccttcagcagacattgctctctctgtaacataaaggacttgaactacaggaggacagttacaatgctctttctggatccaccactctgcacagtgagaaccgcttgctccattcttacagcggagagaacggacgctgcccaaggggaagaagagaaagagccgggattggaagccaggccagtcactgatggatcctgagcccctcttactttctttggctacctctcaatggttggacttgttcaggttaagattaacactttactggacgatgatgactgcaaggcccctgcccatctttgcccactcagtcacatcatcctcatccccaccctttgatgcttctctaggctgtgaacgccttgaaaaccttagtcttttattttggaagttcaggaactgaataggagggctgcaactcagagctgctccgtcaatgtgtgttaaacttatttgacctccctccaccacttttcatggcattagcaatgcaaaccttttcacatgagcttcccacagccaccctaggagatcgcgagggaagctacctctagccccattttacaggtgagcaaataatccttgcagtgttacaacagtgtgcccgtgtagagaactgttttgcaaagagctcgatcaatgatgtcatctttgccttccgtgacccaggcagctgggtgcagtctcaagatcggagactgaggcttcaacaaagtattgggttcaaattccagctctgccacttggaaccctgagtaagtaatgtaatctctctgtgcctccgtaaacgtgaggcacaggaacatctacctcaccaaccactgttaagactgaatcaaagggcagcaggcggactacccggaatgaagaaagcaatcaataaatgtggattgtgtcatccttgtctctcttgacggacgggaagaggagagtgaaacctaagaccacagcggcagcgcgttaacaggaggaccagcaaggaacggaagccaggttgtcaagcctcagttggctttcacgtattctccttttcaggcgggtatttaggaagagaggagggtgaggagcacagcgcacttctgcagcagcagctgcggattggcttgtgggaggcggttctccggagcaaggcaagggcccctgccgcttctgggctgactgtggattccgccacacctcacagggctttgtaactccccacccacttgagggttccagataactttttttttttaacaaagcaggggtgggggtgggagattcctgctgttaaaaacaaacaaagggcttagacaccggctagtcggctgcgggaggcagcaagagaaaggccgaggggcctggagtagctcctgaaaaccgccgagggccctgcgggcagacgcccctgaattcttttggtggggagaaaagccgcggagctccccaatgtgccaattggtttgttgttgttttgctttttttgaatacacaaactctccgaaaactcctgtcttgccccacttttttgtgagttcattgctttggaaacaaaactctcttccatttattggcaattatcaaatttccgatccttctctatcaggagatccagcaacaaacaccctgttatgtaaatttctttcaaagataaattcgaaagcccctccattcattccttcaagaactcaacagatgtccttgaggctcattttctgccgggcactcggttcacaaggctcaagagacccctggctccagccattgtccaggttgtcactggtgtccccagctctccacttctgaggacccacttctcaccccctcctcctccgcacacgttcccgaggctctcggccggtgtgatctcaccgactagagaataaaaacagcccaggggcgccggcgccggccaagggccttgacggggatcagcaagcgcgaggccaagtgcgggccccaacttcctgggcccgggccttccgcgcgccccctctcgggctcgggtcctctccagggtgcactcgcgtccggacgacgcttacttgctgcgagtccaaccctctccggcccgcaactccaaccgagccgcccgagtgtggactccgagagcggacgccacgggccgcgctcagccctcccgcccgaggcccctctcgccgtgtttcccaggacttcctccccgcgcccgcccgacttcaggtcggggccgcgcagggtcccgcgcgctccagccaggactgccgccgcccgggtcgcccacgtgggcgtgctgggcgcggggtggtggccggccgggcgccctccccggagcagggggcgggcagggcgcccgcgggaggaggtggcggggcgcgggggaggaggcggggagccccggcggcgagggggcggtgacagcacttggaaaggaggctgcacgcggatttgcatgaaacacagactgggagcgggcgggagcgggagcgcggcgcacgccccgggccggcccagccagcgagcgagcgagcggcgagccgggaggaggagggtggcggggcggtgaggccgcagaggcggagggatctgcgcatcaaagctagcgaggcgagcgaagtttggccgggggttggactttccttcccggaggcggcacccaaacagctaccccgtgcggaaacccaaacttctgctgccacttggagtctcgcggccgccgcctccgccccgcgttcggggccttcccgaccctgcactgctgccgtccgcccgcccggccgctcttctcttcgccgtgggagccgctccgggcgcagggccgcgcgccgagccccgcaggctgcagcgccgcggcccggcccggcgccccggcaacttcgccgagagttgaggcgaagtttgggcgaccgcggcaggccccggccgagctcccctctgcgcccccggcgtcccgtcgagcccagccccgccgggggcgctcctcgccgcccgcgcgccctccccagccatgtcgtccatcctgcctttcactcccccgatcgtgaagcgcctgctgggctggaagaagggcgagcagaacgggcaggaggagaaatggtgcgagaaggcggtcaagagcctggtcaagaaactcaagaagacggggcagctggacgagctggagaaggccatcaccacgcagaacgtcaacaccaagtgcatcaccatccccaggtgggggcccgcccgggggggacccggggtcacgccggcccagccccctggcactgcggggccgacccagtggggctggagatgggaagagggagagagagggagggagtgagactgtgtgggtgcgtgtgtgtgagagtgggagagcgcgggcaggaagggggtggggggaccccaaacaaaaccatctctgatttgcaaagatcagagcccgaggcttccacgcggcactctggcttccacacctcacattccctttccacctccgggaggggagagcgggttgctgcgggactcggccgcccccactccggggagctggggctggaagttgaggcccgctttgttcggctccgcgggccggagcccctcctccgccgccgcctcccgcccccgcggcccgcgctcgtggaggtggtggtgtctttgcgtttcttttcttcagtcgggtctccccactttcctctacaggaatgcggtccgtacagctggggctgtgggtgaggagcgggagcctagtgattgacagattccttcttcgttctttctttgccttcgggattagcatttttatcgagtatttttagactcggttgtgccagtctcccgccccctgagcatgcacgcactttggttgcagtgcaatgctctgacttccaaatgggagagacaagtggcggaaaatagggtcttctcccacctcccacccccccatcccgactcttttgcccttcttttggtccaagagattttgaaaccgtgcagaacgaggga

SEQ ID NO: 6800 - DNA, 6000 bp, Homo sapiens
accggctgatggattcatttgagaggtgaatgaaagagaaatcaggatgtctttacagcttttaaaatttgaggccagttatggtggcttacacttgtaatccctgcactttgggaggccaaggtgggtggatcgcttgagctcaggagttcaagaccagcctgggcaaaatgatgaaaccctgtctctacaaaatatacaaaaattagctgggcatggtggtggacacctgtaatcccagctacttaggaggctgaggcaagagaatcacttgaaccctggaggtggaggttgcagtgagccaagattgtgccactgcactccagcctgggtaaaagaacaagactgtgtctcaaaaaaaaaaaaagaaagaaaaagaaaaaagaaaaataaataaaattcgaaaccttgctggctctcttttaataggttttctttttcaatatttaaggaattttttttttcttttaagctgctgataacttacagcaatttggtaaggcatacttttgcaaccaaaaattcaaagatttgcttttccttcctacctaattcctccaaaatctggaaactattcatgaagattcttatttttatgacaatatggttatttgcataagttcaataagaagctcttctcttcaacaaaatacaactggaaatattggttatattaccaaagctttgactgcaatgtcatattgtattaatctgttctcaccctgctatgaagacatacctgagactgggtaatttataaagaaaagaggtttaattgactcacagttccacatgactgggaatgcctcaggaaacttacaatcatggtggaaggtacctcttcacggggtggcaggagagagaatggttgccgagcaaagggggaagccccttataaaaccatcagatctcgtgagaactcactattacaagcacagcatggcggaattccctcccaccccactgccagtgctgttccttcattcattcattatcaattgaattgatgccgattcaattatatccacctagtcctgcccttgacacttggggattattacaattcaaggtgacatttggttggggacacagacccaaaccatatcatatatatatatacgtatatatatatattcatatatatatacatatatattcatatatatacatatatatgaatatatatattcatatatatattcatatatatgaatatatatatgaatatatatatatatagcaatgtcatattttaaaatgtgcatggaatcatagaatgccaattttcaagtgttctcagctttatagtgaataaaagtagtcacttccaggcaggcccagaagcctcaagatattagatattgcaggcaaagtctgatgtctgccttggtttgacttcctaacatcaagaggtttttaaaagtccagatttgttgtcacaatttccagcaaaataaatttaaaagaagcctatgtggttattcttgccgcacttatgtaaataatcaggtcaagtttgaaactaaattaattttaaaaataaattggtcttaccatgattatctttggtagaaatgggaatgactgtagagagaaaaattatgtttctgaagaaaaccatagtacacctgttactagattgcagctttgttcattgtttttgagtttttatcatctatctatagactagcctggatcctgagttcttgttgccttcaatatctgactgcaattctccaaccatgaacaaaaactgctaagctgaacaactcgatataaatttcaagggacaagtcccatgcttgatgagggagccacatagagagtttagcagaacacctgatgccacagccagagacatttaaactgcaaaccaggatgagaaattgctgacatcatgttgtggacagcgttttccaagactgtcagaataagactcgctaccatgataagactccttcccttcttaattttttcttgcttatgcccacctcttccacttggcaggataatgctgtagttaaaatttcacaattagtagtttttgtgggtaagttgataaagggtcaaacccaaacatttacaggacccaagagagcttttattccacctagtgggtaactttagcaacatccctaatgcaactgtttgttcaaattttactagtggcctcttttgtagagttagcactctttgctttaatttaacccatttctgagatgctagatgatagaattgctgcgtactaaccaaacggggaaatctgtgctgttgctgtcacttcttgttgtacataaataatctggtattgtagagactcagtttcaaaaagttagcaggctacttggtgaaaacaggtagatttctcatctggctcattctttgatctatttgattttagttggtttggtttatggcaaccctagctaagaagcatactccgaactcttggcattgtcctcctgatagtcacaattctcaattatgttctctcaaaaagttttacatatttgcatacagccaattgttgaatgtcatatggtctctcttcagctgcaatgacagaaatacaaaatcatgaggacactgtaatctataaatgatgtgttgagactggaaacacagaatgatgttaaatgagggtagtgctaatgccctcagtcttagtcacaatttcacctaggttgttaaataaaaatcatgggatgccattgttttcaaccaaattcctgcatcaggcctccagatcagactaaaaatcaaaatggtgtcacccatgttcaccaaaacaaaactgagttatctggttttccaaaaaatggtaagagagatagccaattttccaaacagaagtttcaatctttaacaggcatgataatgaaatttcctgttttaatccttaaaatagaatacctgaagtaacccaatgttaaccaatcagttttctttctactgttctgtctccacgtctccaccttaaagaaaagtgactttgatataaccaatctgctttttgttgtttctgccttcttcagtctattttctgtctctaaagttaacatcctctgcttgattcattgcaacatttattctattttgtggaatgaagttttgtccaattctaggagtgcaataatgccaatgagatcttgaatctcaatttgttttacttttgtttcttgacaatggagaggtttaggctagagagcattttcaaagtcatgagcatatagacttcaagtcaaccagttagatgagatcacctggtgataaaatagagaagaatgcaaggaccgagccctggagcagtccaacatttaaagattgagccaaagaggagaaaccagcatatcaaaaaggaggcccagtgagggaacaggactatctgtgacgtgtaggtaagttcagggggaaaagtgtttcaaatcaaaggaaccatgtcaattattcgcgattctacagagaggtcaattgagatatggatagagaattggcaattgcctttggaaacaagatcattagtaatcttgataagtgatacagatgatggaagccaaagctcgatcagggtagactgagaagtgaatgtgaagtgagaggtaggaacaagcactattggagagatcttgaaaaacctttctaagaatttatgaagatagcagaaaaatagggcagttcctagaggcgattttggagtcaaaggaagtttattttagatgggagaaatttcaatatatttatatgctgataggagcaattcaattgagagggaaaaaactaacgatgctggagggtaggtaattgtaagagtaaaatccttaggaatgtgcgtgaaaaaaatccggtcactggtaaagggactggccttcctaggcgcagggacacttcattcatagcaacccaaatgttactatgcagataagggtggttttgatggtgagaagataagggagtttatttctgatatctttcattttttccatgagttatgaggcaaagttgattagtaaaagtgggggttggggaggaggtatatagaaggctttcagtagagacgaaaaggaatgaaataatccttccatcaagtctacttaaatgtcaatttagtggataaaaccctcccagaattaagtacatctcccaaaccctttctctctctcaatgaccttttgctcctttctggtactcactaacatttgcaattgtatctttgttcgttcacttctctgattccccattagagaactacagaagggcacggactttgatttcaaaatgtatatttagccgttagcacaaggcaagcagatggtcactaaataaatacttttttaaacaaaaatgttaatgaacaccttcaaaattttgtcttacgccacctcgttaaaatacttgtttgtgcaagtcacttttcctctctgagctttcatttctgaatctataccatgggaattatctcttccttgcctacctcccctcgttatcaagaggatctgagccaataatgatagaaatgcttcattaagggccccttaaatgtaatggatttctatttttagcccactggtagcctcgcaggtagcaggtgctgaaaaagccttgcttattgggggttgggggacagcattgtttctgtgaccgtaggcgtcgaagctatgcagaagcgttccgcggaccgcagagagatggggctcaggccagcatccctctcgctccggcccttcccgggaggagctggccgagctaggatggggggcagggagaccgagggggcagtaactgtcaaacctcgccgcttggcgccattatttaaatggaacgtgcctgtctcgcagctgtacgtgcccggggcggggcttcgagcgccctgagcggggcggaggctagaggcgggctgggaaggtggaggggcgggccggggcggggccaggccggctagaggggcgggtctagcggcggcccccggcgaagttcactgcgcttgcgctgacagacgcaagatggcggacagtgcggaactaaaggtaaagcgcagctcgaattcacttctaatattcggccgcggagacggcgccgctgctgccaggggggatgggtccgaccctggggggcctctcgggcctgactccacccgggcctggagttgtagggagagaggcgcgcccggtctcagcagagggggcccgcctgcggcgggccgcgggccccgggtgcctcgggggcgctgacgggtcgtccccggcgtgttattgttgtgggcgcctctggcgggggtggcgggggaagagatagggagtccggaggtaggggctgcagctgtctcatgggctcggctttttcaccttccagttagcctccctgccccccatggggagctggggctgggggcagggtgctctcgtaggggggattgggaaagctccccgtggccgcttcctcttcctcctttgcagtcccgggctcctgtcaggcgctcttctcagacccccgggaacttggcttcggccgccccgcccctccgtggatcccagtagcccccgccccggactcggctttccccggctgctcgcttgtcaggaagcgcctggggtgccccgcttgtgggaagcgcgatcccggggcgatagggtggggatctgggggagaagctctggtaaagtttagcgagccccgggccggcgttggggttcggctgagaggtagtgagcgggacgttactctttctctctgattccgggcagccgaggggagaaaccccctcgaagagtgtgtctttggaagcagtgttgggagggggggatgcagctacctctctcccttcttttgccttagctggtgtggagggtgagaggagcctttgggggtctctgcacacaccatgatggcgatgctgtagctgatggaggtgaatggttcgtgtttatatccccccattgccttttgtttgtagggacatcttgctggccatgttgatttgaacgaaattctcccctcatgcta

SEQ ID NO: 6801 - DNA, 6000 bp, Homo sapiens
gcctggggcttccttcaagtaccggacatgacaggcccttgtgatctctctctctggccaaggcaggtcaccctcctcctgtctcagcatcttccccctgacacacactctccaaaggccagcttcccatgctccacctccctcaatcctgctctcaagacagggtcacacctggggatccatgccagtcacagtgtctcctgccccaaggggttctgcctggaagtctgtgctttccgcatggaattcaaagctttgtggctccctggcaaaggggctcttaggacctgggcatcagaagaagggctggggcacagatggggtgagaagggagaacaggcattttctctgagcctattcaccgtaagggacatctttccatagggaccccatgatgggaagatgttagaggaaggggatccagggtccttttgaaaggccatggccaggccgggtgcggtggcttacgcctgtaatcccagcacatgggaggctgaggcgggtggatcacttgaagtcagaagtttgaggccagcctgaccaacatggtgaaaccccatctctactaaaagtacaaaaattagccaggcgtggtggtacctgagtcccagctactcaggaggctgaggcaggagaaccgcttgaacctgggaggcagaggttgcagtgagccaagatagtgccattgcactccagcctgggtgacagaaagaaaaaaaaaagccatggccagactgtgaggtggtaggaaagggagttagagggaggtaagtcccccaactcaatgtccccagcaaggaccctatatgtctttaccctcctttctcctccataacatgaccagataggagaagatgctataggagaccctctctgacacagtgagaagttgagggaaggataaaaggaagaaactgaccttgctggatccccttgtgctgccagtgggggaaagacactgatgtcgattgaacagtgtccccaaaatgtatgtccacatcctaacttcctctacccgtgactgtgatgttgtttggaaaaagggtctttgcagatgtacttaagctaaggatcttgagatgagctcatcctgactccagtgactgctgttctacagagacgagaggacacagacacacagagacagcatgtgaagacaggcaagattgtgtgatgctgccacgagcccagggatgctgggaaccagaagctggaagagacaaggaaggattctccctctcagggttattgtggtgaccacagaatgcatttggaagtggctttgtaaactgcagagtgataagccaattcaatatttggagttgtgttttatcttccaaaggcctcagtaaacatttgtagaactgaccagtgttggattgggcatggtgtctcttcacagccatgggcagagggaccataaacgtagggggcagggatgggcagcggtcagagggagccatggaagcttcagagggagcacaactctgcaatgccccgacttgggacttctggcctccaggactgagagtaaatagttgtcgtttgaaggtgctgtgcatgataatttgtcacggcaacactgggaaaccactggcaacatggaccccttatctggatacagtggcagaaaagaaagctctgcaagaagttcccgtaaagcatgtccttgcccttagtgcccatttcctcctctgtcaaatgaggcaaatacttccagccctgatgagataatggcctcatcagcagggcaactctgacggtgtgggtgaggctgttctaggtttcgcgctgccaggcagcgcctctctcctagcctccgttttctcatctgccaagtggggcagtaagccctgccctggtgactccattgccaaggagaggggaggcgtgagcggacttatggattggggtagagttgggtgccagggggctgagaacacatgtgagggacctgaatcttgccatattaactaagggcgatggtttctgtagtaccgtttctgctatccaacaaggccttgtaaacaaatataacgtctgggcccacccaggaggagctggtgagtgcctgaggagtagatggccagtggggatgggtgaagaacacatagaatagtgacatctgatatggcgccccttgaacacacaggcaaaggaagagatggggcattttgagtcacatggattggggtaggactgtttccccccaaaaaggctttttgagttatgttgtaaagatgtcagagggagactcacatttaagactgaagctctccttccttcacacccttgccaggactccctctgaccaccccaatccctgcccccctccgtttgtggtccctctgcccattgccatgaggagagtgtccaatccaatatcagtcagttccacaaatgtttactgagccctttggaaaataaaacacaactccaaatattaaatttacttagcactctgcagtttacagagcacttccaaatgcattctgtggtcactacaataaccctgaaaggaaaaaaagatgattatctctcactccacaaaaaagaaactgagggtcagagaagagagacaacttgctcaaggccatttgattggaggttgcctgactcctggagctgctcttccccgtctccttgctgccttgctgtcatgtcacctgctgtctcactgggtcatttgggcgtgtgcccctcgcacgcctgtatcttcccaactggtgtcagctcgaaaccctctgtggtctgcagtgctcagcctggctttccaggtctgggcagctccctccttccagatcctgcctgtgattccagctcctttcccttgctgtacaaagttcccacctctgcactttgcctcactctttcttcctgcccactggtacgtatcccagtccttcccacacttcaggtctccctcggctgcacaggaggctcaaatccagcatagattcctgaagtcctgggtccaagttctagctctgctactgacttcttgtgactgtgtgaccttgggcaggtcactttccctctctgggcctccatttcatcactatgaaataggagtgttgaacacaatactctaaatgcatctccatgtggtctaagtacccccctccccggcccctccctgcccttccccctcctctgatcatcctgtgtgctcaccatccacaatcccctctcctggctccacatcattctccaaagggttcatgttcaatcattcagttagactttaaactccctaagagcagaggagggtgattttggccaagatatgcagatcgattcatcagtaatccactgaccacctccatttaggttgggagcctctttatcttccctctttagtttcttcaaggtgcacacacagatacctacagcaggcaggaatccaggtggggcaccaggcatctctgctcaccttggctgctggtggtggggtgcctgcctgtgctgtgcatgctgcagctttggcagggtggccaatcagtccagtgccagcctttgcctcccagagaatgcttcacaccctattcttcccccaaacccatcactggcccagacatcaaaagcacacatccctgtgctattccccttcaaagagcttcatatctaatatctcactgagtcccccgactagccttggaaaggcaaagcagggattattaatctccattttgtagatggtgagggtcttgtccaaggctactctgaattcagcatagagctgggactgggctccactcttgtgtccagtcattcttgtcaaactctggtctgtggaatatacatgcctgcctctgtgtaggccccagtctctttccctttaagaacttgggtctgagaggacaagcgcatgtcgcacgcacacacacacgcacatgcatacacacccttacaagatgcacagccaccaaaaagcctaataaagcaaggtgcccaagaccacggttcaggatccgtaaaaatggccggagataattgactgcaacctattcactgcaaatggggcaacttgggcccacaaagggccagagacttgacccgagtcacagagtagactagagcccaggtctctggactcccagtcctgtgctctctccactgtgtgtgccctcagcaaacaaggcaaggcagggaggagcaggagctcagagagcctggggctgaagggtgggaggaaagagcctggtgggggacttcggtccacaggtgtggatgttccaacctttctctggcagggtcggggtgggggcaccaggtagctgcaacctgttccttcagcacctgggaggagacacagagtctggttccctgaagccaaatgtttcttctttgtcctctgtgtcccttcatctcttatagctgtgtccactgagtggcagaggtccaggcccagcgccttccagtctaggagcctgtgacctgggacaggatccctggggaaagggtgagggctggcaaagggcccgccaccctgagcactccaagagacaggggtggaactcacttcaaggattcagggcggcgaggatcctctcccaccggcgaagcggacaccgcggtggggctgcgagtacccagttgttgtttttttctccttccctgttctccaccccatgcacttttccgaggggcaagctccgcagttctcccatcaaggaggctctccaggctccctgccggccttcggctcctggggtggaggtgggcgtggggtacatgggccctaggagaatggggtgtgagagactcccctgggcttatggctttggtggcacctcaggctgtggaatggggtggcgagtctttggaagtcacagagcccagggtcggtggcacgtgatgaggcgcaggcctggctcagggggtggtgcccacggccctcggctcctcccccggggccgccccgccccgcgcgggaggggacgggcggggaccggcatgggtaggcgcggcgacccgcagggccaggtgcagggcccgcgagtccggggtcgccgcagcccgggaggagtgtctggtctccggcctgcctgtgctgtccccgcgccctgtccactggactcccgagacccttggaacccaggtaacccggggcgggactccccgccgcgcgccgcctccccacctcccggtccacgcgcacccgccctccgcggcagccccagccgccctgcgcccgtggagcccgttgagcctgggtggccgctccgagggcgggtctgggaaagtttgtgccggggcggccctgatccggcggcggcgcggctcggccactttcaccgcacgcggggccggtgtgaaggtggggcggccgccgccgtgcagaaggctctctgctgcaatcgagggcggtgaggggagctgttgccttctcgcaccttttctctcactctccagggcgtttgcgccgcttatccttcctccaccgcccccctcccgccgcccccactttaataaaacccttggattggggctgcacagttggcgatttctttacacctgtgcttcccgcctcctgagcccagatgtgagcctgggctgagcaggaccgtgtgggtgaggggcggcccactgcctgcgggggtcgtcccggccctgttgaagtgggtgcccagctacagggagttccccctgctctgtcattggcctccccccggccacagcccccagctgggcatctcctggctcccctagcacttcccaagtcctagtcggatgagcccaggagagggggtggaccccggcccagcagaacaagaactcaggagcccggtaactcttatccgtgagcagaaccggcttcctcccgcttaggttgggaggagggctcagcttagtgggagtcgggggtgacaactgccccttcccacgcagagccatagagaagagatggggagaggtcaggggatctgagaagagctagcagccaaaaagggacacatccctgatttcatttgaacctaacaaaccaatggcgagtag

SEQ ID NO: 6802 - DNA, 6000 bp, Homo sapiens
gtggtcaaggagggagtggtgggagaaaagggagccttagagccttgcccgcctccattctgaggggctgggatggtcatttggctggtgaaaattaaggtatctttaggaagactcacactgagagctgatatctgtggccttggtttggggccttgttcattcaatcttgcctactatagccttttagtcctcacccagatatctgttaatttagaccctcaatgccttcatgtctcctcacctgtgggacacctagcatacttcacagagccacgaggagccaggagtgccatataaagcccagctttgcagctacatccttcgatccctgcagaaccaccctgtgtgttatcttccccaagactcccacatgggtggtggccagaaacccctctgcttttggctattccatcagctgccttgatataccttccacggaaactagagcacctgggtctgactgcctgtttcccctcccaccctccttccttccttctctccactctccatgaaggtaaagcacgacaagcttccccttcctatctctgtgggacagagacttgccatacttttcttcttccctctgcaatactatcacaatacattttaaagtctctaaagtgtatacagcacacacattacttccttcaatgtcatcttcaccaaaactcagcacagtaggtaacatcatccccattttccaggtgaggaaagtgagacttagagaagtttcatgaagtgacagagcaaaaacctacaccacactttcgcttcaaaggctggtgcttatgcctttttgtataaaactaacatctcatccacatttgatctgttataagtccatgattcttggtgtaaaggagagacttgatagagaagaaggcaggggtgggggctgggggtagtgcctggacagacaatccgtgggcagttgtcacctgtgtagaaataaagataaggaggtagcagtggggataacacagacccatgagcctttatctccagcaaagagagagagagaagttagaaagaatggaggaggaaggaagggttgagaggagacatataaatggagagaaagcctgtggttatatccatggcagccctaccatgcctctccttctgcagaagcccatgcgttcattcctggtttcttcatatcttaaagtgaagttaaaagaacataaaattagccaggcatggtggctcacgcctgtaatcccagcattttgggaggccgaggtgggcggatcacgaggtcagaagatcaagaccatcctggccaacatggtgaaatcccatctctactaaaaatacaaaaattagctgggagtgtttggtggggggtgcacctgtaatcccagctacttgggaggctgaggcaggagaattggttgaaccagggagttggaggttgcagtgagctgagatcactccattgcactctagcctggtgacaaagcgagactccatctaaaaaaaaaaaaacaaaacaaaaaacaaaaacaaataaacaaaaaaccgggtgcagtggctcacgcctgtaatcccagcactttgggaggccaaggcagatggatcacctgaggtcaggagtttgagaccagcctgaccaacatggagaaaccccgtctctactaaaaatacaaaattagctggatatggtggtgcatgtctgtaatccagctactcaggaggctgaggaaggagaattgcttgaacctgggaggcagaggttgtggggagccaggattgcaccattgcactccagcctgggcaacaagagtgaaactccgtctcaaaaaaaaaaaaaagataaaattgccttggatcattatatattatacaatggaaatcctttgtctcgagtattaggacttaaagggatatgaagcagaactcaggtggctgctttctcccatcaagttaaaaaaaaaaaaaaagaagaaagaaagaaaggctgtggaccctggtacacattagcacagcagctggtcaactctggtcatttctaggagcgctgtgctcagaatcgtgtgctatgggcccggtggatctgcattaatcttttcaaaaatgcaaatctcagcttcaaattcaacagcctcctctggaatttcaaagagttctgggttgtttaaaggttgagtggaattcctgagcctgtgttaactggtcacagtctactgactctcataattagcgcaagaccactgtgttgtgtaaatgccactcagtattcaacaatgactaaccactccatttcagattgtttacttaagtggggggctttcatccacaatcagtgtttctgagcatttaacctatttaatactgagagacgagagagaaggcgagttgcccatttctctatttcttcccctacaccctaaccgctccccaactccagccaccaaatcccagtattgtgcgtagcccagttctaagtcttgtctggctattaagctgcatgacgttggctaccctgagcctcagtttccttatctgcaaactccaggggcagaattggatgatgtcgaaggtcctttctacctctgaaatacactgactgggggagaagatgaaatgtctcctttgtgaaaatctaaacgtatttattacgtaccaaaaaccacagcacggccgactccagacttgggaagtgtctagcagttgtccacgtgtcgcctgtcttttattgcaatggaccagtgcaagaagtaggaagcttgagcaagatccagttttaaagatatcagccgagtaacatttagaaaaatgggcagaacacaacagcagagtaagaaagtaaaacttgtcaacaaatttgtatggttaaatgtgtgtgtgcgtaagagtcatgttcactcatattttattttttagggatgatattagaactgtatttggagacaaaatgagccatgggtcctggctgaaatgctaaactgatacataaacaccaaggagaggaacttgcttccttctaaggggtgtggaaagttggagaataaaagagcctcgtgggatagggggcagtgatgccaagtgctatttatgggctatttatgggccaccagagattgaactgcctgtggggagaaggatccagaagggactctgggtagcagaaatatctgagatggagttttaccttttttgatgtggagtgagtgaagagagcctcctcttttactttccttaagaaatcttcagtccagtatacgttatacattaattaagttggtattttgagtgtgttgcttttcggggtatgtagaagagaggctgaattctcatttggcttgatgttggaatcaggaacagtcaactttgatacggggcacaagagcgggccatagctgataccctggtttctctgtctgggcctggcctatcttgtggctgggtgcacacctgctttattttttacttgaaatgtcttctttttccacctgtcctactcatgtcttcaaagcctaattttcattttccctgatcactccacctcctctctgccctcattcattcattagtgactacaggctggagatgccaatttcagggcttctgccctaagcccccaagggagctgtgtgcttcttgagtgcagatactttgtttcactcttccccactctaccccccaaaccagaagaacagagctcctgtttcttcctttccatggtaggcccaacacctggctttgtgcctggcacacagcagacattcaacatttgtagaactgatagactattagattagtagtgacaaatactccccgaagaaaatgcttatttgaacatacatcccaaattttctgccctccagaaaatgcttccttggaaggatttaagacagtttgatgtctctgcaaacattatctgcgtttagggaccaacttgcccttctcagcgttcacctgggatgtctttattcttccatttaacctttacaggggaccccgatggtgacgtgtccttcctaggggccattacctctctcagggatcctagtgtctggtagaaaacaacagctccaagttctctgcatccaaacttcgccaggatacgcagataaacctatttaaaaaaaaaaatctttttaaattctcaacttggtggtgtaaataaggcccttgcagcgccctcaagtaataatcaacggcagtcattatggaaggagggtagagatgagcgccttactcaaagccaagacattcacaatttctcgggccggctgcctgtgcctgggcgtgtgcactgtgcactccgaagctgtgtgcggcggtggccttggaggtgcgcgtggccttaggaattcccgcggtcgggcaccctccgcttaacaccgggccgtgtccccggcctgggagccgagcagcgcggctctggcatgctaagtgggcagcactggggcgcctttgttcctcgcggccgtctcccaggaccggcttccctctgaatctaaatgggcttctccctcacccgctccgccctggcctcctggcctgggcacggcgcccctgggtaaagcgcgcccggacacctggggcgtgggcgtgcgggggcagcccgggctaggcgagcgcgggagaggcgcctgcggtcccagcccggccaggcccgagcacctgcgcgagcccgagggagcgcccggccctctgcccccgccagtcgccggcgcccaacttgggggtcccgccgtccgcagccccaagtctcgcggtgctaccgctctgaccggggagccgcgggccgggcgccccccgccgcgcgacaaaggctgaaccgggaggaggaggccgaggagggggaggaggaggagagaaaggcggggacggcgagcggccgcggcggcggggagagcggagggagcgccgcccgcccgcgccgtcctttgtgtggcggcggcggcgcctgggcctgaccgggtccccggggctgagcgccgggctccgcgccgcccctcccgcgcccctgccaagcgggcgcctatcctctccgagcaagatggcaaccccggcggcggtcaaccctccgggtgagtagcggcctgggccccgccgcccgccgcagcccgcaggccttgcccggggccggagcggaccaggcgcgccgggcgcccccgggggcgcggagccgcagctcggcgcggtgggtggtggagcggctgtcactacgcggcagccgcagcatcagcaccagagcggcatctgcatcccaatcgctgcccatccggtcccgggcaggcgccggtccggacccgcgggcggccggacgctggcctcgcatcctcgggaacccgaagggcaggcccgggagcccccgaagttctgaaaataaccgcctttgccttccccatcccacgcatttttctcttccggtcccggcttttgtggcatcacggcgtcagccagtcctggctggtggagggctccgcgctgacggagggaaaagtttggagctgggattcaacagggtacaactcccgggactctcccctgcccgccccgcccactaagcgctggtcctttgcgccctttgcgactggctgctgtgtgtcctaaccctccgggggcacaaaacacccagcctgtggtcaccagcgtggagcagccctggtcctgcccaggtgacatcctctgctttctggtctgacctgtccccagggtgcagtctgtgacaactgagctcattaggaaatatttcaaaaatggaagagttcttgatcaagtggcaacattgacttgttttggtattgtagtagggaagttccgttttcactgggaaagttccctacctgatgagcagggtgtgggagaagagaaacgtgaacatctaagctagtacaaacttttgggtgttgtgcagaggctgctgtgggcacggcaggttgctgggtccctgtggaagatgcagggagagtcacagagggcggcccccaggaaattcccagcagagggaggtcatgtgttggagatagggagggtcggggg

SEQ ID NO: 6803 - DNA, 6000 bp, Homo sapiens
tgcagtcatagatggtggtctggaagaaaatagttaagatttgctttatggcctagtattagtcagtttttccatttgtgctgtggaagactatgcattccctaattgttagatgtaaaattaaaatcaagtatcttaactactttatcttttatagctatcaataattgaggaagctgtgttgaattccatagtagtggacttgtcagttgctccctatagttctgtcagtttttgctttgtatattttcatgccattttattagtggcacagtggctcacgcctgcagtcccagcactttgggaggccaaggcaggaggattgcttgaggccaggagttctagaccagcctgggcaacataggaagaccatgtatcttaataaaaaaaaaaaaaaaaaaaaaagtaggtgcactgcactagctctgttttggtaaggattttttgcctggtatgttaccaccaccacccaccctcagtctttttactttcaacctatgtccttgtttttagatttttttaaatgtgtactccacaagtggctaggttttttttttttccttaatccagccactggatttaaatggacagtctgttgcttcagtatggttattgtggttattaacatattgggatttgtttctccttatgtttggtttctttttggtatttaaaattttttttatttttcttcctttcttgctctccccaacactcctttttatttctgctatttaattggttccccttgaaatttttcatgcattcttaactaaacaagatgtaaaaattaagattataaacccttttctaaattatacaggaccatagaacacttaaactaaaaatatggtactgttatagtattcttttcttttttaactccacatgataaagatattaaaattacaatattgacttgttatcagtatatgtgtatgtatataccaattttctttgtttagtaatagtcattcctgtcctttatcccttacatcctaacctatttaacccaaagcttgattagtttatgatttaatctttctgtgattctttttggaaaaaataaacaaataaataactattggcttatctcccctttgttttcattctagcttaagtaaatgtttaggaattcccttgaggtccagaaacgtggagtcacatcaaattgtgttctattttgcatttttgaacatgactgtggataaatcgcttattttacctgcttttatcagtgtcctgttgggagacaggagcagaaaccactttgcatgtttttaaaaaggaaggaatatgatttttagggaataaggttacaaattattagaaggaatagaggaacaaaagggaggaagatggtgtttccagaggtaaggattacagaaagcctttgaccctgcaaggatgagtactgttcagagtccaccatcgtctgcctcccttgtcgtgtagctgctactagagcccctgtttatctgccatatgtccctctgtaggagctcacaggggcgactgctgtctgctgttggtggtggcatcaccaggagcagaatggattctttctctcatgccttttaatctggcatagatgccgttgacagaacctaataagaactcagtaactgtcagaatattaatgcatgtccaagcacttgaactaacttatcattaaggtcctagaactgcctagctctgtagaatgtttctgtaggattcatgaaaacttttgtggaagtcttaatggtgtttaccacatttaaaaatctagattaggtcatcttttcccccctgttaaatccaactgaaattctgaatccagttaggaagttgcagctagcaggggctttcagttgtgctatgtatttggcaagaaagttcaagaatcggcttgtttttttctaagacatgttataaattcattctaaatataaatgacatttgcagctcatagatgctgttttacccaaacattttttaatttaattaagcatgcttaatatgatatatcaatgtattccttattaagaaaacaagggaatgcggctgggcccagtggctcatgcctgtgatccagcactttgggaggccgaggcgggcagatgacctggggtcaggagttcgagaccagcctggccaacatggcaaaaaaaaaagaaaaagaaaataagggaatgcccggattgtgtacaaggtattttcctttatatatcaaatggaggaaacctgcagaaacactggaaaccagagtaagttgctacctacatacaattttcctttaaaaatttttaaggaattcggggaactattagacttggagaactatttcaaatcaaaggaagaagtggagagctctcacttcctaggctcaagaaagctgaatttttattggaaatgtaggactccagtaacacccttaatttgaaggtgcagggactaaagggtgacaattagcttgggatccttttcagccaaaattatttgaagccagctgtgcagggaaacccaagagtaggcctctcctcccacatccacttctaaactgcagcactgagaacacccttgggctgcagtagatatctgcagtgagggctgagccacatcgaagctgtgcagtgactcagcccgccttcctacattaaacttggtaatcttacatttatgtttatttctctggctttggtgatgaatatggtatagtcatatcttacatggggttaggttctaatgttagtaagggaaaaaaatcacatatagctaaaatcacccttgacaaaattctagagaaggcataatcatattggagactgccccatcaattctcagtagagcaggtagtcacttttatgtccagcgtttgaacagatggctagatggctagggtgattcttaagttgagtgctagctaaggtaataggcttgtattgtacgggctgagattttaaacactgcaatgataaacagcatgttgatgtacttatgctctgcaagatacccaacgagagactaacgtgggaatggcaggtttgcatcacatacctcacacttacctctctggagcatacccttcttgaatggaatgactggtagactcaccactatttaaattctctatttctggctaagtgcacataattgaatgtcgtgcatgtcaagtgagtgaatgacgtggccactgtaaagagataacataaatggatgaatctgcaacataaaaagaggctccacagaaaacagtatttgacagaagcagcttttttctcaaaattctccgagactgaaaatgagaagatctaacaacaaatgaagaagcagttcaggatgaaatactgataatatataaagtgaatgaagctgattataaaacatgtatgagagctggatgtggtggtgcatgcctataatcccagcacattgggaggctgaggtgagaggatagctttgaggccaggagttcaagaccagtttgggcaatatggcctgacctgtaattttttcccccccgtgggtacaaagggaagggaaacaggatcttcatcttttttttttttttttaatgtatgaatataattttgagtgaaatatatgccaaaattttatgaagtttttttttctttcagtgcttagatagataaatggtttgcttgctatataagaacataggtttgacatttatggatttaacattcctgctttgactattcctaagtaacctggaaggctcaagataggcagaggtatgtgattttgctgatttaatgtgcagaaatgagtccattacttagaaaatgtgccttgccagctgcccggtttatctatctcagtacagctttttctctttctctttttctttctttttttttttttttctgttttgttttgagacaagttctcgctagacctgggtatgcacccaggctagagtgcagtggtgtgatcatgactcactgcagcctcaaccttccatgcttaagcagtcattttgcctcagccttttgagtagctggaaccacagacatgtaccatcatgcccggctaatttttaaacttttttacaaaggttgggttttgtccatattgcccaggctggtctcgaactactagcttcaagcaatccgcccacagctcccaaagtgttgggattacaggagtgagccaccgtgcccagtctgtttttcttgattaattcttctgcagtacttgccatgaagtaataaacactccttccctattaaatatagcactttgaaagaaagcagactaaatcaagactgttgttcaaagtgaatagatggaagaattgatagttctgtcaggaaacaggtttttgatatattaaagaataggatgtttgacatgaacagagtttgtcattttaaacatgggggagagttaggcaatgatatacatagatgtgaggattgacaaaaatgatgtttctcttctttaaaaataacaggatgggccaggcatggtgggtcatgcctgtaatcctatgactttgggaggtcgaggcaggattgtttgagcccaggagttcaagaccagcctaggcaatatagcaagaccccatctctattatttaaaataataaaaatattaaaaatttattataaaaaaacaaatatcaggatcatctgtattcaagaaaaatgtactgataagtaggctgctgttaatttctagtaaagaatctaacttcaaatcatacataattttagataaatagaaaaaattctgtatattttaacagtattaggatgattctctaaatataggcaaagaactgaagagttccatagaaggtgactaactataaatgtattatacatgactggaaaagtaatggcaagcaagacttcagagctgagctatcttgatatttttatccagtgtgtggggtgttacacatgcatcacagctataatagagctatcacatggatcttttgaaaaacaagatagagatgttttaaaggcttctgggtttgatttcttagtcagatgctgtggtacttggcatttaacaactagaattcagaatccagatttttaaaggtgaattattttaaataactgagttgtaatagagaagtaatttatttgaaattattttaggaaatggaagataaagtgactagtccagagaaagcagaagaagcaaaattaaaagcaagatatcctcatctgggacaaaagcctggaggttcagatttcttaaggaaacggttgcagaaaggggtaagttctcatgggtaatttccaaatacttaagccctacaaactcagtatgctgacagattgtgaaacggatatctgtgcgtatagcattgtactttatcaggtatgtacatatgtgtatatgtatctgtaatgggtttttccaatattttgcagtttataaataagcattgtgagaatctacaactcttcagcatttttaataataaactatttaaagcatgtagaaatagtgcagatataacagaacccatataccccttcccagatttaatgtttatattttgccatgttggtttcagttttatctttcttaagaaagaaaatgttgtagatactgttgaaacccaccctatatgtaaatatgagccctttcccttatctctccaaaagcagccactatccagaagctggtgtttatccttctgcccatattttgaaacttccatattttttgcaggtgattcccacacaacattcaaaagcttaaaatacttatttggatgaaatgatcacttaataaatgcacagctatctcctttatgtaatatgtttcacagtcagatttactctaatacaatttaaacattttcattttcatagttcaaattactgaagatattattttcaaattcttgccatgttttgcgaggtagataccattatttctcaataatgagattgagataatgctggcctgtttgttccctaagtattgtcctgtgaccccttcctttgctgtaaaaaattagagagttcc

SEQ ID NO: 6804 - DNA, 6000 bp, Homo sapiens
gtggtaaatatttcatcactttttgcaagttcctataagaaactgagtaataatgacagtaagaatataatagtaaaaaccagaaaatcctttttaaacattgctagaaagacatttttctcctgccagttggattttcttgcccttagatttctaaaggactttaatatctgctagtctaagggtagcaaatatatgggacatgtgctgccattctcctgtgtctctttgtttggtgatcctcatgtcatacatcctgtttttaaaaaatatatcacaattagatactaatcacctcttttctttggtttctgttttaaggttcaaaaccagttaaagtaatatatattaattcaccacttccccaaaagaaaatgactatgagagagagaaatcaaatctttcatgaagttccattaaaatttatgatgtccaaaaacacatctgttccagtctctgcagtctttatggacaaacctgaagagtttatatctgaaatggacgtatgtaatgctttttttttcccctaaggggaatgtacttgtttatccttttgaagcataaagttttattgcaaatccctaaacctagtagttaaaaatacaggctttagattcaaactgaaattgaatttcgagtctagctggactttaggcaactaacttaacctccctcagcctaagttttctcctttcatacatgaaaggaagtagtacctacttgacaaggttattatgagggttaagtttgatattttatgttaaaggctgagcacgtttttagttatgtatgtagtgaaaactccttgatggtggtggttaatatgaggttttgtttaattggtctcattcatattcaagagttttatttttttgagatggaacctcaccctgccacccaggctggagtgcagtggtgcgatctctgctcactgcaacctccgcctcccgggttcaagtgatgctcctgcctcagactcccgagtagctgagattacaggtgtgcaccaccatacccagctaattttttgtagttttagtagagatgagatttcgccatgttggcctggctggtctcaaacttctgacttcaggtgatccacccatctcagccacccaaagtgctgggattacaggcgtcagccactgcacctgacccatatctaagagtttttaagtgtgaaaaggaacaggtgagcttaatttgattgttacagaaagtattttgccagattgttaatcttcagtatacttagtagctatgtgacctcgggcagattacataatatctctgtgtctagtttgcttatctgtaaaatgggcatcatgatattacctaactcataggattgtttaggtttaaatgaatttgtacatataaagcatttagagtaacacttggcactctgtaaatattagcttttattattctgtattttaaaatattttttccattatttttaaatacattgtttatagagaacttgattcattcattccataagtttttattaagcagatactattctatgcagggaggaagcagcagtgaataaaaacaaaacctgttttccctcagaccttaaataagtggcagagggcccagataacagtaaaaaagcaggtagtggtaaatgctatggagaaaaatagagtacgttaaggggaaatagagagatgggtggggaaggggtcattttatattcacgattaagaaggtttttctgaggataggaaatgtggacagagacttgagtaaaatgagggagcaaacaaaattttaaaatataaaaatgtttttcttgtacttaagagctcatacaattttaaggatattggccttttggtttttatatttgtttatgtttttctctttgccatttgccttttaatatttttatgatacatatgtcataaagcatttttaacttatgttttcttcttacacattttacttttaaaaatctgcctaaaacttatattgaggtgaatgtcaggcagtaacaagaagaaacatgaggtaggttaaaagggatgaaaattgacagtggcttctttcagtaatggtagaccaggtaatttggaccctccttttattgatgacatctaaaaaagctggacaaatattaaaatgtctttcttagaagtatcaaaaagctaacaagatagtgaggaattgtagggctgagatactgaagaaaacaggattcccagaaggtaagcctattatacttagggtcattttttccttggattatatgtgccagttctgaagaggcaactaagaaaatgaactgtgcttttggcagcatcataggactagggggataaaaggaaaacttcagttttccaccaagggcctggaccccaaaggggctgcacctcaggagtcagggtgaaccagaagtaaatgagctttctctgaaatgacagcctgagttttcaggccctgaacttggagtaaaatgctttttctggattgtgcaggtaaaagtaagtaaaaatgagaggatgataatgctttttttgcctcaaattattatacttcttaatgtctattagtctaatttatgttgctaagtgttctggaattattttgatttctgtggtccaacaatttggaatgtttttaaattttgaagtgcttgagtttattgtttgtttacatttttcttaatgatatctaattttatttccttctgaacatagaataagactttatcagattctgctttggtctatattgagattttctttgtatattaatttatagttcattttttgaaatgccctttggattcttgggaagggaaaaagtgtatctttgtagtctgtttatatatgtattttcaatctttcatatatattctcatcgtttattattattcatactttctggattcctttttattttttacttagagacagtatctcattgacttagtataattgtgtctctgtcaaatttttcttttatttttcagtttgtacaataaaaatttatgaccactatctgtttatcatggattttcttttttcaaactagcatttctcccttttctatataacgcttcttgctttgaattctgctttgtctaacactttcattgctattcttcctctttttatctcttgatggcatctgtagttgttttgtttttaacctttttgtgtaggaatgcctcacataagcagcatatagtttaattatacttttttactaaatttggtagtcttttagtaggaattaccattcactagctaccatttactgagaggctacttactatgtgacagccactatgccaagagattttctatatataatttctcacttaatctttagaacaaatccaagaagatgcccctgctgtacctgttttagagatgaggccgttgaggttcagagaggttgagtaacttacacgagttgatctttcttactcactgctggtgactgttagaacctttctcttaaatcctcaactgtaaggctagtggatgtacataaccagttatgaaatttctatggtatttaaagtgctctgtcagattgaagagaggtcttctggtgcttgtctccttgtagaggggacagtgtagtcctgaataagttaaaagccgtgtgtagtttttccattaccaaaacagtacatgaaaaacaatatttatgacttcatgtctcagaatacaataaaccaccttctgtcaatttctgccccatcttttattgctaagagttgttttccctgagtagttgtggaaagaaagtcactggttgatattaagggtgcaccagaagctggcgacacttctctggacgcattaaaaagcagcgtcctcacagtggcagagggactttcctcctggtcagctaagaccaagtgtctctgcaggagcctatagagtagacataaatgaaaatctgcctcccgtttggccctacatttcttctttgtggtcttgtctattttttgattcgttgaaattcctcttgagatgtggtagtttgtaaatattccatttcttgtgctattataacttggcaaatttgcctgttatcatgaacatatcagtgggaagatgaggttaataatagctggtagtagtttgttgtcatcttaaacaagaaccttttacaaccattagacttttctttctactttaaaagagcaggaagtatgtatgacagggatagggacattaagagataggtagggtggcttgaaatttttactaatactttaccaatttatttacataagatgtcctgtgaagtcaacgagtgccgaaaaattgagagtcttgaaaacttgtatttggattttgatgatgatgtcacagaacttgaaacttttggagtaaccaccaccaaagtatcaaaatcaccaagtccagcaagtacttccacagtacctaacatgacagatgctcctacagcccccaaagcaggaactacaactgtggcaccaagtgcaccagacatttctgctaattctagaagtttatctcagattctgatggaacaattgcaaaaggagaaacagctggtcactggtatggatggtggccctgaggaatgcaaaaataaagatgatcagggatttgaatcatgtgaaaaggtatcaaattctgacaagcctttgatacaagatagtgacttgaaaacatctgatgccttacagttagaaaattctcaggaaattgaaacttctaataaaaatgatatgactatagatatattacatgctgatggtgaaagacctaatgttctagaaaacctagacaactcaaaggaaaagactgttggatcagaagcagcaaaaactgaagatacagttctctgcagcagtgatacagatgaggagtgtttaatcattgatacagaatgtaaaaataatagtgatggaaagacagctgttgtgggttctaacttaagttccagaccagctagtccaaattcttcctcaggacaggcttctgtaggaaaccagactaatactgcttgtagtcctgaagagtcatgtgttttaaaaaaacctatcaaacgagtatataaaaaatttgatccagttggagagattttaaaaatgcaggatgagctcttaaagccaatttccagaaaagtaccagaattgcccttaatgaatttagaaaattctaaacagccttctgtttctgagcaattgtctggtccttcagactcctctagttggccgaaatctggatggccttctgcatttcagaagccaaaaggacgtaagtaaatatttacaaagagcttacagtgttttacttgttctttttccttaggtttttctccctcgttcctttactttgtcataacctgttttgtaattgtcatatagtcactgatatttcattttttcgatctattgatcagtatttcagcttccaaaataatcctctctagatatgtatacaaaggcgtatgggtcttgcagcttgtgtttatctaacatgtacagtgactgctaagctataggtaatgtgatttgtcaaattggtgaagggtaagtgcatccagaataatcataaacattgattgatttaaaatttatttatacttggtgttggactgcagttttatactttttggttttgtgaaataaatctgctcctcagctctgcctagattaggaataacattactttttaaactttttatttttctcacatggtatgctgtctcacgaatttatactttgcctagagttagtgaaagttaaaaggagaagaaccttaaagctaggatttcagctcttactgcagttccagtaaaagtaaacagaaatggtaatagtgtgagggtcccttaggcagagaagtagaaaattaaagatgatagaagttttaaaatagttaattgaattgttgtatccttgcttatgatgggtaagagctaatgtattttaaaaatgagaaatactatttttaaaggattgccatatgaacttcaggactatgttgaagatacatc

SEQ ID NO: 6805 - DNA, 6000 bp, Homo sapiens
gagccctagaaattactcttattacattgttataatacctactatgagctggagatggtccataccagcactttccaatagacaatgctatcaaccacacagtaattttaaattttctagtagtcagattttaaaaagttaaaagagatgaaataaatttaaatatctcacttaacccaatatatccaaactctgatcattttgacatgcaatcaataaaaaagtattaatgagacacgttacatttttgtactaagtctttgaaattcaatgtggattttaacagttatcacacatctcaatttgaactcaccatattttaagaaatcaatagacacatttggctaatgactagtattggacggtgctgttttatacagaagtttataacaacttgtaagatgcataatgataagagcagaattttgagtgccaagatttcagaaggatcatctcatctaaccccaacaatgttcatctatggatgaggaaatataggcatagaaatggttagtgactttcccttggccacattgccagcacgtggcagagttgggcgttgacttcaggcagtctgaagccgtcagtcacatcatgccaccgattagttgtgtggccttgggcgagtcacttttcttctctatattttcatttcctcacctataaaatgggcatgggtggagtggatcatccagggtggacactgcatgtttcaatcttcgtctttatttcctcatgtctggcaagtctggctctcctgttaccacccaggaggacatcaggttcacatcactgattctctggctgcttcttaccctggactttaccagctgggggacaacttaatgacaagcagtgagatggagcccctcccatgcccaagagcagtgctgcattttcattggtgtgtcttctattttctgcacatagcccagcttcagcttctggatgctttcttgaaagaaggaaaacttgttgtctgggcactcagttttaattttctgtcttctttgttcttgtgcatgttgtagaaagctccatactcccaaggaaattctactgtatatttccatcatttcccttctctccctctcaagaaatgcaagaaaataactgtcaactttttttgcatatataaattttaacagcacatacatgctgatgaatcttttatccaagaaggaaaggcttatttcaagtgattgaaagttgaaatgcttaggttttcattcttgttggataatggaattaccgtgtggacatgctactttttgatgacttcatcaactgcatttcccaaatccagtaactgtaatgaatgcctactatgtgcaaaggcacagtccctgtttttaaggagcatgtcttccaccagggaggaaaaagcaaatgttcaaacaaccacaatacaaggtagattgagcagaccaaatgccttaggaggggtgcacagcactaagatagttaaaatatttggtttggggtaaatcagggaaggctccacagaggagctgtcatttagaattaactttgaaaggaaggtagatttcagtaaacagagaaggcagggagggcctttagggagaagaggcagaggcaactatctatgtatcatggactagaagtaggagggggagcaggcagcagcatgtggcctggcctgagtactgcacatggattgtggagattacataaggatgtaagacagtttgacaaactcctgccaggagtgtcacactccctatcctccacccatgggagataacataaatcaatcacagcccacacctttccacatgacgagatcgacttgccatccttggtataggagtgcagagatagggagatagagccttcaataccgcgttgactagttagttgttaattgcatgggcaatggggagccattaaagtcttgtaagtaggggagtgacatggtgggaaatgagagctgtagttcagggtaattaacttggcagtactatctggaatggattagaatggttataagactgaaggccagttatttaagaggttactgagatggtttaggtgagcaataatgtctggaactgcatggatggctgcagaaaggaggggcatatgtcatgtaggtagaatttgtagcacttggcaagcatgttaggatgtggagaactaggggcaggagcaaaagagaggagtcaaagttaactttgaggttcccagtaattaccttagagtaggagaaaagtaatgttaccatcaggagaggagcctgggattggcaaggaggtagggggcgatggctgtggtgttgcaaagaggagttacaaaaaaactgaaattaggctgatctcttccacaagcatagcttttctaagccattttcagggaactcggtgcaaagtaaaataaccatttttaagcaaacactgttgccctttgtcaatgagcagagtctaaggaaggctcccatctcttcaaatatttggaaaattggaaagccttaattagtaatccgaaagggagcatgacggaaggaaagaaatataaacctaatcactgtgcttttcaggtttcaaatgcttccccaatccaggtaatttacactttagtcacagtgattgacagtcaaggaatgtatctaactcacttttattttttcccttggggaaagcacttgagttcccaattgttttaaattgcagaagcagtaattgtcttagagagttaggagaaatggctttttggagctgcgatctttttctgaagggaatatagagtctattttaattgattcaggtcattatgactattttctagatggtcttttcagggtgactaaacatcaccttagttaaaggagaacagtaagaaactcattaaaggtccaaggggaacagacttaataaaaaatgttaacaagttgctactggtacctaaaaggaaaccagggatactttttaagtcacttgcgtcccagatagaattactggtgaaatttaatgtgacgagtattttttaaagtattctaaaataaacatgaggcagccaatgtattctgagatgctcactgtcccagaggaagttgtttcttaaactgtacactttgatatatttgtttccttagaaaagtcaagtgtaacaagctaggtcaattgcatcaagaacattactaacaggctaaccaatggtaaatgttgtgaaggctactctggaaatctgtgctttcacgtatggggaaacccacacgtctgatttgggatggaggagacaattgtgcattgtttgtaggcgccaacagacaggctaaagccagggatccttgcagagacaggattaaggtatcaggactgttcacatctcatttacatcaccccgaagagtggaccacaggttttgctgattagtacacagactatggcaaagggcattgtgtatttgaaataagatcaagatcagtaacagtaacagaaactatgtgtgaaatttggcatatggcggttcctctgaaggattagctaactgggtttcccgcacttactattttttaaagcatttttccaaaccaggaagttagcaaaagaaaaatgtcccccaattccctccgcctaccccacgttctgaagcacatatatttatgccaccttctggcctctaataatattatttattgtcaaaattttggatccttttgaaaggaaggtggggcgtatttccacagtgtcttcgcaggcaaaagaaagtggtagattgagtatgaaggcagacaaatcaggctactaccattggagtattttccattctttcaatttgtattgttccttcatcttggagtttgcagtcaaggtaacgatgatgcaattatctgctttcctggagttttaggtacctactaggggatgaatgtatttcaatgggaggagggtgtagaatgatgcctataataatacgaattattaggagctgttaattatctgaatgttatccgggcattagtaatgcctctccagtatatctaccttttatggatgagactgtacatttaataggaaaagtaccagtgggaattgacaattagcagccacgcttgagctagatgcagcgtggcatgttttatccagcttagatagttgtcgaccaaacaggccaaagttttcttcagtagaaaatgccctgccaaatggtttctggatccttcgcggacaaacagcaaaggagctgaaagcgacctctttcaaccatgccagaaactgtccatggcgcttctagattcacaaaatctgttttagacacagatgtctttaaccaagattggaaacccactggccgtcccatcccaaagtaaaaagtgccacgtcctcccatcctccgccttccttgggatgtcagccccgttctaattcctttttagtttctcctcagccctcggcagggctggcagggggctacctgcgatttcccaacgtggacgtggacaatcggatttgtctctacccaagctggcagcggatggggacgagttctgttcccgagagagtctcagaagtaggcacggaatcatctcaccgattttaatttctgtccctgggctggggagaggggaggattggggcgcgggaggctctgttctcctcctcccctcttttccccacctcccaaaattggcagccagtctgtggctctcggtctggggtctggagggtggggaatgtgggtgtgggggccggctggagaagctctcgctagcgctgcctgtggccagacccgcctcttgtcccctttcgggcgcacacacacgtccacccagacactccgcgcgctccctcgcgcttttgcttgcccgcccgccgccgcctgctttttccctcctgctttcgccggtcgccttctccttctttttttttttttttttttttttttttttttttttttttttttggtaccatagagttgctctgaaaacagaagatagagggagtctcggagctcgccatctccagcgatctctacattgggaaaaaacatggagtcagctccggcagcccccgaccccgccgccagcgagccaggcagcagcggcgcggacgcggccgccggctccagggagaccccgctgaaccaggaatccgcccgcaagagcgagccgcctgccccggtgcgcagacagagctattccagcaccagcagaggtaggaggctggagaggggctggggagggggcggcgggagcccgggcgcggagcggggggcggccgggagcgggcgcccggggcgcggggtccggcggccgcgcgcgagcctgcggcggcgccccgagcccggaggacccccctcccctcccccctccgccccccagaaatgttgcaaacttttgcagcccgttctcggcttgcgggagcagagtggggcgggggaggcggcgggaaggttgacagccggcgggctcacccccctggctttgatttttctgcaaacactggaggaaagctgcgttgcctcaattaaatacgctcccccaaaatacggagatgcggggagtgggggcccgggaaagaaacttttaaagcggcagtgtccttttaagaaggggcaaaaaaatctgtttatggccaccctccttccgctttaccttttctcctcttgacagtttcggccctggctgcccgagtcgggggtgtgttttcggtccctctcagatctgggcggggggcgggaggagtgagcgacctgggaagtcccgggggtggagagggggcgctccggggtctgggggcgacgtggacaccttctttggagcacggcggtgcgtttgggatttgaaggaagggccgaaggaagcggggtgcgggcgggcgagctgttcgccaagttgtctggcgggcgcggcgaggggagatgcgcaagtttgcagaccgggggttcggagcccggcgcccaggctggcggggggcgtgtgcgcgccaacgcgcagagggcggcggtcctgtggggcgctccacgcgcatccggagggag

SEQ ID NO: 6806 - DNA, 6000 bp, Homo sapiens
tctcaaatgcctgacctcatgatccaactgcctcggcctcacaaagtgctgggattacaggcgtgagccactgcgcccagctgctgctgtatgttttctagtagtaaaagcattcctgtaaggttcctttgggaaaactgtgaaccaaaagatcactatcttttatatgccattccttcttttggaggcgaaggcgggacggttgcctcagccaggagtttgagaccagcctggacaacgtggcaaaaccccattgctatttttataaatgtaaataaataagtagaaacaatataacttcagagtctatatggaaacaacttttgtaagcattctttaacaactagagttgttaaagcaaatgttttagcttaaagcaaaagatttgcagtaactgaataatttgttcctggtcattactttataaaaaggcaagaattttccctcaatttctccttatattactgttgaaaaataaccaggaattggccgggcagggtggctcacacttgtaatcccagcactttgggaggccaaggcgggcggatcatgaggtcaggagatcgagaccatcctagcatggtgaaaccctgtctctactaaaagtacaaaaaattagccaggtgtggtggcgggcgcctgtagtcccaactgctcgggaggctgaggcaggagaatggcatgaacccgggaggcggagcttgcagtgagccaagatcgtgccactgcactgcagcctgggtgacagagtgagactctgtctcccccccaaaaaaacaaaaacaaaacaaaaattagctgggcgtggtggcgggcgcctgtaatccctgctactcgggaggctgaggcaggagaatcacttgaatccgggaggcagaggttacagtaagccaagattgcgccactgcactccagcctgggtgacagagctagactttgaaaaaaaaaaaaaaaaaaaaaaaaaacaccaggaattggacttctcttatgaactgaaaaggagccaggtgctttgaaaaatggaatctacttttgtggagactttcacattgcctcttatatgtgctttaactaaatgaccttagtaagtaaaatgttggcactttatactacatggtcctatcttatgttaggaaaaagtgtgtcaaacttcagtatgtcagtacatacaagaatatatatatatatatatatatatatatatatatatatatatatatatatttttttttttttttttttgagacagagtctcgctctgttgccagactggagtgtgcagtggcggcgcaatcttggctcactgcaacctccgactcgctggttcaagtgattctcctgcctcagcctcccaagtagctgggaatacaggcacgtgccgccacacccagctaatttttgtatttttagtagagacgggggtttcaccatgttgtccaggttggtctcgaactcctgaccttgtgatccaccctcctcagcctcccaaagtgctgggattacaggcgtgagccactggacccggcaagagtatttgaatagctctgcttgtggacaaaatataaaaatatttttcagttgtaaaaattctgttactactgttattgctaagataaccatcacactgagtttattggtggaatacagctttattgtgtcacattttctaattctttaagttgtatatcttaaataaagattatttaatacctttgagaatttgatgttaaagaaggaattaagttgtttaaggaatagagattgtattattagcacttatctagttccatctgtttatattttacagctgaaaataaatatgcaggagggaaccccgtttgcgtgcgcccaactcccaagtggcaaaaaggaattggagaattctttaggttgtcccctaaagattctgaaaaagagaatcagattcctgaagaggcaggaagcagtggcttaggaaaagcaaagagaaagtaagtttttatattctggaatataaagaaaatatttatctcacgcctgtaatcccagcactttgggaggccgaggcgggaggatcacttgaggccaggagttcaaaaccagcctgtccaacatggtggaaccctgtctctactaaaaatacaaaattagctcggcgtgctggtgcacacctgttgtcctagctatttgggaggctcaaacaaaagaattgcttggtgcagcaaaccaccatgcacacatatacctatataacaaacttgcatgtaatgcacatgtatctcattttcacgccactgccctccagtctgggggacagagtgagactctgtctcaaataaaaaattaattaattaattaataaagaaaatatcttgaaaataaaggacaaataggatattgagtcaagtttctcttcaagctcataagaaaatgcaaaaaaagtttttaaaaacttcttctaatttcttattataactcactcccaaatttcttttcttttttttttcctgagacggagtcttgctctgttgcccaggctagagggcagtggcgctatctcagctcactgcaacctccgcctcccaggttcaagcaattttcctgcctcagcctcccaagtagctgggattacaggcacacgccaccacgcccagctaatttttgtatttttagtagagacagggttttgccttgttggccaggctggtcttgaactcttgactttgtgatctacccaccttagcctcccaaagtactgggattacaggcgtgagccactgcatccagccagcaaatttcaaacattagtaaaaagtattctttttactcttcccaatctctcaaagaggatcagttcccattcacataagtgctatgtcattaaccatgaacttagtgtattgagtctttaattcttactgtctttttcctttaggcttttcttacaaggcaatttccttgttggcttatataacttgaattccattaatcctgtcccttaaaaaactaccagttcaacttgcacaagaaatatataaccaggctgtgtgcggtggctcatgcctgtaatcctagcactttgggaggctacagtgggcagatcgcttgagctcaggagttccagaccagcctgggcaacatggtgaaaccccttctctaccaaaagggtggcggcgccgcctataatcccagccactagggaggctgaggtgggagaattgcttgaccctgggagatgaaggttgcagtgagccgagatcccgccactgtactccagcatgggtggcagagtgaggacctgtctcaaaaataggcctggcacagtggctcacctctgtaatcccagcactttgagagtccaaggcaggcagatcacaagatcaagagatcgagaccatcctgcaacatggtgaaaccccgtctctactaaaaatacaaaaaattagccgggcgtggtggcacgtgcctgtaatctcagctactcgggaggctgaagcaggagaattgcttgaacctgaaaggtgttggttgcagtgagctgagatcgcaccactgcactccagcctgggggacagagcgagactccatctcaaaaaaaatcaagtaaaataaaaataaaaatatgaccaatatggaaaagttggaaaatatagaaatccccatcacctagaaccaactaggaataataccatggtgtattgtctttacaacttctctgtaagtacgtaagaatagtgaaaaacaaaaagtagggataaaactacacacaccaaacttggtgtgcaacctttaaaaaaaagtttccgagtttcatccgttgtatttcatgaatatctcattccttttttcctttttttctttctttcttcctttttttttttttttttgatatgggggtctcactctgtcacccaggctgtaatgcagtggcccaatgttcgctcacttcaacctctgcctcctgggttcgattgattctcccacctcagccttccaagtagctggaattacaggcatgtgccatggagttcagctaattttttgtgtttttggtagagatgaggttttgccacgttgcctaggccggtctcaaactccggagctcaagtaatccacttgccttggcctcccactgtgctgggattacaggcataagctgccacacctggccagtgtgcaaactttttttttttttgagacggagtttcgctctgttgcccaggctggagtgcagtggtgcaatctcggctcactgcaacctccacctcccgggttcacaccagtctcctccctcaccctcccaagtagctgggactacaggcgcccgccaccacgcctggctaattttgttgtatttttagtagagatgggatttcaccgtgttagccaggattgtctcaatctgacctcatgatctgcccgcctcggcctcccaaagtgctgggattacaggcgagtgcaaccacacccggccacaaactttttaagaagttaatgaaaccataccttttacatttttaatgacaggaaaatgctcacaataattgttaacccaaaattctggatacaaaagtacaatctttactgtgtaaatacatgtatatgtactatatgaaaatataccaaatatcaataatacttatctctgggtaaaaacctcttctcataccctgtgctaacaacttttaacaaaaaatttgcatcacttttaagaatcaagaaaaatttctgaaggtcatatgggacagaaaaaaaaaccaagggaaaaatcacgccacttgggaaaaaaagattcgaaatctgcctttttatagatttgtaattaataaggtccaggctttctaagcaacttaaatgttttgtttcgaaacaaagtacttgtctggatgtaggaggaaagggagtgatgtcactgccattatgatgccccttgaatataagaccctacttgctatctcccctgcaccagccaggagccacccatcctccagcacactgagcagcaagctggacacacggcacactgatccaaatgggtaaggggatggtggcgatgctcattctgggtctgctacttctggcgctgctcctacccgtgcaggtttcttcatttgttcctttaaccagtatgccggaagctactgcagccgaaaccacaaagccctccaacagtgccctacagcctacagccggtctccttgtggtcttgcttgcccttctacatctctaccattaagaggcaggtcaagaaacagctacagttctccaacccatacactaaaaccgaatccaaatggtgcctagaagttcaatgtggcaaggaaaaaaaccaggtcttcatcaaatctactaatttcactccttattaacagagaaacgcttgagagtctcaaactggactggtttaaagagcatctgaaggatttgactagatgataaatgccaatattaaatctgttggagtttcacgtataagacagaggagaaagagaacatcaaaaattacttagcaagctatggaatggagattcagttttcattttagtttgttaaatctacaaggctgtaaaatgattaggtaatagaaaaagcttccatgattctatttattatatatgtgcattggaagaaactaccaggtgttactataaatattctatgtattgtttcagccatcctaatttaatgctgatatgctctagatttacattgctaagttttcactcttctcttgggcacttaactctgtttcttttgtttgtttgttttgagaaggagtctcactcttgcccaggctggcgtgcagtggtgctatcttggctcactgcaaccttcgcctcctgggttcaagcgatttttgtgcctttcttgagtaactgggattacaggcacgtgccaccacatccagctaatttttgtatttttagtagagatgggattcaccatgttggccaggatggtcttgatctcctgaccttgtgatctgcccgcctcggcctcccaaagtgctgggattacagg

SEQ ID NO: 6807 - DNA, 6000 bp, Homo sapiens
acagttactactcatattttaatttgtccaaatgacaattactgaccggtcactaacttttggggtaaattactcaaggaagtacatgggctacaaaaagagatgcttcttgccccgtgcttctcaggaaggcccctaattcttttcacgtgtctcatctgactgattccttcctttttgttattactgtttttttgacattgggtggagtctacttcctcttaaagacagtcatcagagtatcttcctgagaaaagaaatacgtaaggtttctgcctttgtatcaacatgttttctccaagctcacagtagtagctacttggaaaagtaagagtgctgccttcttctaggttttgaggtttgtctcactgtgtttaatctcagacttgggtgaagtcccaaggctgagaaagaaatcactcatcctttatttcattcattttcttagctgattccccatccctcaggatctgtagaggtatttgtcgactattcactggggtggcctacaaaaatcctccagcttttggttggtcatgaagttctgtggattttctgccttttgaatccatcccctcctttctattccactgccaccgactgccctagtgcagagcctctttacgtcatggccacacttccagtgcactccaaagtacttgccttccaggctctgtctgccatccttactcctttctttgctgcctgccatctttcttcatacaaatctgatcatatcactgcactaattgcaaaactttaagagctcataatctgctattaagtctcaattttattcaagtccatttgcaatctaaccccaccctacttgtctctggccattccctcctgccctgaagttcaagcagaactggctaacatgcatttcccacatcccccgacccactatttcttccagctcctctgtctggaatgcgcttaccttttcctcctcattcttcgtgtccaacaactcctatgccaccttcccagggaagccttcactgttctctgcccaagcagcttccctcctgcctaccataagtgctctggacacacctcaaatctggcccctatcccagtagaggaggtgaattgtcaagtatgcagatgttggagccatcttgcctggggttgaagcttagcttaaccacttactagtgctggaaccaagggcaagttacttaacctccctgccgctccattttctcatctgcaaagtaagggacataatactactttcctcactgagttgctgcgacagttaaatgtgttgatgcattttaagctttgtgaactcagtaagtgccatataaaagtgttagctgtcattttatttgctaagtgcacatctctcttcctggtttgattgtgaactcctagaagacaggggctgtcttactcacctcagtccccagtgctcagtacacagtaggtgcttggtacatatttgttccatgaattggcttattattactctgccagttgcctgttggttcactgggttaactggcgagacaacagaatgatttccaatgagcttgtattccccagggtggatcagcaagtggttccagcccttgtgtctagacaggcctataactgctgtgtatctggatgacttggctggggttttgggttcctttcagcctgcctttcttatctctaggccccattccctgtttctcggacaacctgtgaatatggggtgtttcttgttctactttatccaaaggggctttgtaatgtattacccttgtccttggttggaaatgtgtcctttttctattgtgaaagtttggtctgtttggcatgcagaatgggagaatatgccaggacttcgggatgctgtcgcagctgaatgggagagaaagaaagagaagcttcagagatataagagtgaagagggcatgaaatatcaggagggccagaattgcttgggttcatctactgtgtgctcttgtccagtgatttaactcttgatcatttgtgcaagaaataatgagtcattgctgctcaggactttgctggagaaaagggtcctatcataagcctctcaactaaagatgccaatggaatttggaaagagtttagcagaaagcaacaaagacaattcagaagcagagacctagaggatatgaaagataattctaggaactgggatgggagaaggaggtaaaattcagtaactgattacaagaaaatgaagggtgcttatacagacatctggaattttctacacacctgtgctttagcagagaaattcaggactgctcttaggcctatgtggctatttctgtggatagaaaaggatgacagctaagacagttttgtcatagctcccgttctctccagcccaaacactagcaaccccttcatcaccaatgctcagagggtctggagtagatgagtcatgttgcaagggaatgtggagaacttctacaccagacccttatccctgttcccctcccattggccctcttccccactctcagttctgtagactccagaggactgctgactgggcagaagttctcagcttttgattcctcttttgaaaagagtccatctttttttaaaaatcatcttctctcagaaatattaatggaaaccagtgactgtgacttcattttttactttttcctctccactctagatccacttttccattgatttcagtcctacttgtcttcccattttccttctttcccactttctgggctccccactctcctctctcttgcagttccttatgacctcagattcctagtgctggcctattagggaggagctgtggcataagccagggcctggcatctgcctggacacaccacccacagcccttggcgattgtcagccagctttggggaaatggcctggctgggacaaccctggggctcttgttgcttcagctgccaaattgcttggagtccctggcccaccctaggagctgggttggcaaggatcttagtttctgtttttcatgaccatgagtgagttgaaatcttactctgtaataacatttcttcattctttccacatttacttgcactaccacacgtcaattacctgctctagatattggacaggcagagatgtaaacaagatccagcttctacacagagctcacaagctagtgagctgtctgctgcttttgtaaagaaatataacaccgtgtgaataggatgttaacaatatgaaaaagacttgggtagattagagggcttcgtggaagtggaatgggaaggaacctgtcatgaacaattttctttttggaagggataggtggatgggaggatgcagagaggagtgtagcagaaaagcagaaggacttgggttagaagactagatgtgtagtctcagctgttcaccaattaacctaatgtctctggcctcagtttcctcatttgcaaaacaggggcgataactgtagcccaccttgtggggcattgtgagaattggttgagaaaatgcatataaagcacttaggacacaagcacagctactgtgaggatgacgatgaggatggtgaagaacaggctgtgcaactttgggaaagtcacttgtatacaccggcctcagtttcctcatctacaaaaggagtgagttccacaggatcatctgtaattctgtttagcaacatttttttttcagcatcttccctgttggtgccattgggcattcagagagggtcaaggcctggcctctgccctccagaaggacagggtacaggcacacacatagataactctaacagaagacagggtcccgcggagctgctaagttcctgagcatgcgtgtttggggaaggggtttctggagagctccgtggggaggcagtgcttgacctgggctttgaagacagagattgtgtctttccctgctgaaaaacactttgtcctcaagataaaggccaaatttccagctaagcacacaggttcctcatgatgtcctcagctcccttccgctgcttctccactgttttcccactgcactgtgatacttccaattcttgaaacatattttataccttcccttgctttccttccatctttgtgcatgctagttcttttgacctgggactccctcctccctctgttaggggacagcagaggggacaagcaaggcactagggtcggactgggggattcatatcctacctttgccactgagaggccagtgggtcgcctgctgtgttgctcaatccctaggtgagtcagcgtcttcatctgcaaaatggggatacaaggtaacaacagtgactccctcaaagggcaatggtgaggattaaatgaggtaacacacgcaaagtgctcgccaggcaggcccacagtaatcattgaataaatatgggcagtgtggcccactcctacttgcatttcaggtcttagcttagtcatcacctcctctgaggttggctgtgtgctcccttagtacatggtatctcctcttctaccacagcccggcacctgtcatccccaccacactgcaaactctccgaggccaacagccagtcgactgggttggctgctggtggggacgcataataggcattcaggaaatactgaatgaatgacatggggtgagggtcccagtgatacgagggcgtgcagaggctgtagggggcagtccggggtgggggtaggtcgtgagactgaatgggcaggtggatctcaactctgcgggggacagagagagcatgggcgtccaggctgtccagggctccttcttgccctgggactgaccctgggagggcgcagcgccctgggagaggatggtgctcaactttaaccgggtcggcgccctcgggagaaaatgcagcctgacgggtcgggtgagcgcgctcggccccgccccggcccggcccggccccgcccccggccccacccccgggccttcgcggtgcagctgaggctgcaagtagccggcgccgtcccgcgtcgcccccgcgcagggcgggccccgcacgcttattctgcccgggaggaacgccggcgtccagcccgctaccgaccgccgctgcgggatgctgcgctccacgtccacggtcaccctgctctcgggcggcgccgccaggacgcccggggcgcccagcaggagggtgagtagcgggggcgggagccgccgccgtcccgttcccccatcccggccgccccctctagaggggactagggatgggaaagctcgggagccagcacctggccccgacgccccaccctgggctcaactccccggtcctgtgccggctctggcagtgaccctcccgcttgaggtttcagggggcccaccagctggtaggagagggcttaggggactttatggaattcccagagatttcctctccttcctgcctttctgtcaagccgagtttattggcggcaccagtttaaaaatgaaggaagacatttgtgcagtgtccctaccttgagactcaaaagtaatgaatgtatttaaaactcaaactttccttcttccattaattaaaagaaagatggggtcacttgtgtccactagtgatagggtatccactagtgatagggtaattctggagtggggttagccaaggtgggcaaaccagaacagcagccggccgcccaggagcccgactgtgtgggactccggtttatgtaaaccactttcttctgtctgatttaaatattagcacagtgacaacaatggcagcactgaaagcttgggacagcatctccagggaaggtttccctttggaagtgctgtttctttttgatctttgtggcatcttttcccatctctccagatgctctgtaaaagaaatgctccatctttctaacacggtcagcaccttagagccacagccaggggcttggcttgtggctttttagttcttccatttatcatgatgttcaatacttatcatttggtacctctttgctctgattgagacttctgtaatcgtgtttcctcaagatttaaacaggtggttaagtccaaagcaaaacccccactggttctgtctgcgtg

SEQ ID NO: 6808 - DNA, 6000 bp, Homo sapiens
ttttagctgctgttcttctgtgtctgccccagggtgtcagggaacacagccccttggtttcttgggtgtctctgaaatccaggagtgaccagtggagcaatcaaagtggtcagacctcaaaagaacttacaactatgttatggcctgaagagatcagcccaggcccaaaggtctagccagagaaatgttttaagcaatcttttagccctggcttagctcatttagggaacaggagtgaaaggttagaaaattaatctttttttagtgaagaagggaaatatttaaagatggactgcagtggaaaagagtaaggggatgtccatttgctcttcttataccagactgtagtctggagggccacactcaggtaccctcgctcgtgcagacaccccagggtctgtctgcaggcccatttctcaacctccctgctacacaagcaaagtagaggccaagcaaggagggtggtgccttcaagacagcaacactgttcctggtgtggcattgcagctctcccgctccaagtgctaggaagaggctctttggtggcagagcctttccctggggacactatcaccacgcgggatgtcctgccagcacacccagtcctctgtggcccaccgcgtcaccgctgcctggcagcactgcacagcagcctgacgggcgggcgcggccccttcccagaacagccttgtcgtcctcctgcctcttgggccaaggagagtaaggtttcagctcttctctctgtgaggtggctgaaagcagggcccagggcccacacctctcacctccagctggcaccagcgactccagcctcagcagatagcctttgctcagtggaggcctttgggagcctgcctgcaagctgcgtcatcaaccagcctgaatttagacaaagtgctttggggaaaagaaacgtgtggtgtgccttgtttttttccagtaattgttccatggctcgttctgcttgtaagattttccaaaataaggccgtagatgagaattatatcagcacattgggaaccgaaggcatgcggacactgttggcgctttgtaaaaaacacccctcaatcagacagacacacgtcatcgtcgcctgctggggctgggcccagatttcgagataggggagcggcacgtgcccgtttggtacagatgggagccaggaagccctttgctcaggatggaggtctcctctattagggggcctgttacagtaactggtgggcctctggggtaccctgcaattgactttacatatttaactctttgccattgactttacatgtttaactctttaaagtcgacttccttccccctcaagagaacttaatttactcaaagtcctccctgggtagaggagtttggccgggtagtttcagcaagttactggtaccgcttctaggacagcgtctaacagcatctttgggaagatgactgtcaccaaagcagaaaaagctttctgacttgtgtaaccccctggagattttttaagtcccccaccccacccctttccctatttcttacaggagacagactgtgaccagtaccccctgctggattgagctgcacctgaatgggcctttgcagtggcttgacaaggtcctcacccagatgggctccccaagcatccgctgttccagtgtgtcttagagacatcaagtatggtaggggagggcaggcttggggaaaatggccatgcaggaggtggagaaaattggaactctactcaacccattgttgtcaaggaagaagaaatctttctccctcaactgaaggggtgcacccacctgttttctgaaacacacgagcaaacccagaggtggatgttatgaacagctgtgtctgccaaacacatttaccctttggccccactttgaagggcaagaaatggcgtctgctctggtggcttaagtgagcagaacaggtagtattacaccaccggccccctccccccagactctttttttgagtgacagctttctgggatgtcacagtccaaccagaaacacccctctgtctaggactgcagtgtggagttcaccttggaagggcgttctaggtaggaagagcccgcagggccatgcagacctcatgcccagctctctgacgcttgtgacagtgcctcttccagtgaacattcccagcccagccccgccccgccccgccccaccactccagcagaccttgccccttgtgagctggatagacttgggatggggagggagggagttttgtctgtctccctcccctctcagaacatactgattgggaggtgcgtgttcagcagaacctgcacacaggacagcgggaaaaatcgatgagcgccacctctttaaaaactcacttacgtttgtcctttttcactttgaaaagttggaaggatctgctgaggcccagtgcatatgcaatgtatagtgtctattatcacattaatctcaaagagattcgaatgacggtaagtgttctcatgaagcaggaggcccttgtcgtgggatggcatttggtctcaggcagcaccacactgggtgcgtctccagtcatctgtaagagcttgctccagattctgatgcatacggctatattggtttatgtagtcagttgcattcattaaatcaactttatcatatgctcttttaaatgtttggtttatatattttctttaaaaatcctgggctggcacattgactgggaaacctgagtgagacccagcaactgcttctctcccttctctctcctgaggtgaagcttttccaggttttgttgaagagatacctgccagcacttctgcaagctgaaatttacagaagcaaattcaccagaagggaaacatctcaggccaacataggcaaatgaaaagggctattaaaatatttttacacctttgaaaattgcaggcttggtacaaagaggtctgtcatcttccccctgggatataagatgatctagctcccggtagaggatcaccggtgacaactatagcagttgtattgtgtaacaagtactgctcccagcagcaattagggagaaaactagtctaaattatttcaactggaaaaaagaaaaaagagtcctcttcttttcccagccttttgcagaacacagtagacagaactgccaccttcaattggtactttattctttgctgctgtttttgtataaaatgacctatcccacgtttttgcatgaatttatagcaggaaaaatcaagggatttcctatggaagtcctgctttattccaggtgaagggaaggaagtgtatatacttttggcaagtcatacagctcaaatgtgatgagatttctgatgttagagggagatggagaggcttcctgatgcctcatctgcagggtcctgtgcctctgaagttctagccatgaggtttccaggtaggacagctgctccccaagcctcctgaggacacaggaagagacggaaggagcaccttgacagacttgtgtgagtcttctcgaaggagggttgactcagaacccagagacaatacaaaacccctcacttcctctgagagggccaaatgctgtgagtctgaagtatgtgcctggtgtgaaatgatctatggcctgtttcttacacaggaagccccctgaacctcctgtacatgtgttcatgttcccagccagctctgagacccaggaaccaaatattccattttggcttctgctagagcagtcatggttcctctcctaaaagccatgggcagcagtttccgagggcctgcatgatccacctgctgcacgatcctatgagggcttcctgtggcacacagccctctgggtgcttgggaactagcttcaggcacagcctgattctggtgatccagtgatctatggaagtcgtgtcttactccaggtgaagggggaaaaaaaaagcctatactttggcaggttatgaactttgaatgtgatgaaatgacacgtttggctgcatttggatggtgtcttagaaccctcattgctcagacctgaaggctacttctaggagcatgaagtttgagttttgtgtttttccaaaggatacttccttggccctttttctttattgactagaccaccagaggaggatgtgtgggattgtaggcaaacccacctgtggcatcactgaaaataaatttgatcatacctaagaggttaggaaatggtgccattcccaccttagagtgctacataggtgctttgggcgtatgtaacattagtgtccttccttgaagccacaagctagttttcttagttttaaaatcctgttgtatgaatggcatttgtatattaaaacacttttttaaaggacagttgaaaagggcaagaggaaaccagggcagttctagaggagtgctggtgactggatagcagttttaagtggcgttcacctagtcaacacgaccgcgtgtgttgcccctgccctgggctccccgccatgacatcttcaccttgcagcttgtgctgagactgacccaagtgcagctagcactgggacacagatccttgtcttcagcaccttccaaggagccaacttttattccctttcctctctcccctccccacctcgcttcttcccaatttagtaacttagatgcttccagcacatacgtaggtagctaccccagccggtttggattacaggcctgtgctggaacatcatctcagttggccaccttcctggcaggctgtagacctgacattttgagacaagcctagaggagtcaggagcagggactttgactcttaggaagagcacacatgagggcaaggctgctggcagacgtctccattgtccttatgttgtctgtgttgtatttttttttttttattgaccatggtgattatttttttaaaccatcgttaatatactgaagtgagctatagcacatatcatgtgcttagtttgtttatttttctccatctccccttggcttcctagagtttggacatattccaggctaaatgcttttactcaagactacagaaaggtttgaagtagtgtgtgcatggcatgcacgtatgtaagtaatctggggaagaagcaaagatctgtttcattcttagcctcaggcctcatgagggtctccacagggccggagctcaggttacaccactccttcgtccttacaggagatgtagggagaagaatctgcaggctgcttgtaggactgttcaccaagggggataccagcagcaagagagtgcacccgtttagccctggaccctgtttcttactgtgtgacttggctagagttgggagttcccccaaaataaacgtgtccccattttaccagaaccaaacctcaacacagcgaagctgtactgtctttgtgtggcaaagatgttcccttgtaggcccctttcaggtaaccgtcttcacaatgtattttcatcacagtttaaggagcatcagccgcttctcaagtgggtagggaaagcagaaaaacgtacgcaagaggacatggatccaaaatgatgatgaagcatctcccatggggaggtgatggtggggagatgatgggctaaacaggcaacttttcaaaaacacagctatcatagaaaagaaacttgcctcatgtaaactggattgagaaattctcagtgattctgcaatggatttttttttaatgcagaagtaatgtatactctagtattctggtgtttttatatttatgtaataatttcttaaaaccattcagacagataactatttaattttttttaagaaagttggaaaggtctctcctcccaaggacagtggctggaagagttggggcacagccagttctgaatgttggtggagggtgtagtggctttttggctcagcatccagaaacaccaaaccaggctggctaaacaagtggccgcgtgtaaaaacagacagctctgagtcaaatctgggcccttccacaagggtcctctgaaccaagccccactcccttgctaggggtgaaagcattacagagagatggagccatctatccaagaagccttcactcaccttca

SEQ ID NO: 6809 - DNA, 6000 bp, Homo sapiens
ggaggtggaggttgcagtgagccaagattgtgccactgcactccagcctgggtaaaagaacaagactgtgtctcaaaaaaaaaaaaagaaagaaaaagaaaaaagaaaaataaataaaattcgaaaccttgctggctctcttttaataggttttctttttcaatatttaaggaattttttttttcttttaagctgctgataacttacagcaatttggtaaggcatacttttgcaaccaaaaattcaaagatttgcttttccttcctacctaattcctccaaaatctggaaactattcatgaagattcttatttttatgacaatatggttatttgcataagttcaataagaagctcttctcttcaacaaaatacaactggaaatattggttatattaccaaagctttgactgcaatgtcatattgtattaatctgttctcaccctgctatgaagacatacctgagactgggtaatttataaagaaaagaggtttaattgactcacagttccacatgactgggaatgcctcaggaaacttacaatcatggtggaaggtacctcttcacggggtggcaggagagagaatggttgccgagcaaagggggaagccccttataaaaccatcagatctcgtgagaactcactattacaagcacagcatggcggaattccctcccaccccactgccagtgctgttccttcattcattcattatcaattgaattgatgccgattcaattatatccacctagtcctgcccttgacacttggggattattacaattcaaggtgacatttggttggggacacagacccaaaccatatcatatatatatatacgtatatatatatattcatatatatatacatatatattcatatatatacatatatatgaatatatatattcatatatatattcatatatatgaatatatatatgaatatatatatatatagcaatgtcatattttaaaatgtgcatggaatcatagaatgccaattttcaagtgttctcagctttatagtgaataaaagtagtcacttccaggcaggcccagaagcctcaagatattagatattgcaggcaaagtctgatgtctgccttggtttgacttcctaacatcaagaggtttttaaaagtccagatttgttgtcacaatttccagcaaaataaatttaaaagaagcctatgtggttattcttgccgcacttatgtaaataatcaggtcaagtttgaaactaaattaattttaaaaataaattggtcttaccatgattatctttggtagaaatgggaatgactgtagagagaaaaattatgtttctgaagaaaaccatagtacacctgttactagattgcagctttgttcattgtttttgagtttttatcatctatctatagactagcctggatcctgagttcttgttgccttcaatatctgactgcaattctccaaccatgaacaaaaactgctaagctgaacaactcgatataaatttcaagggacaagtcccatgcttgatgagggagccacatagagagtttagcagaacacctgatgccacagccagagacatttaaactgcaaaccaggatgagaaattgctgacatcatgttgtggacagcgttttccaagactgtcagaataagactcgctaccatgataagactccttcccttcttaattttttcttgcttatgcccacctcttccacttggcaggataatgctgtagttaaaatttcacaattagtagtttttgtgggtaagttgataaagggtcaaacccaaacatttacaggacccaagagagcttttattccacctagtgggtaactttagcaacatccctaatgcaactgtttgttcaaattttactagtggcctcttttgtagagttagcactctttgctttaatttaacccatttctgagatgctagatgatagaattgctgcgtactaaccaaacggggaaatctgtgctgttgctgtcacttcttgttgtacataaataatctggtattgtagagactcagtttcaaaaagttagcaggctacttggtgaaaacaggtagatttctcatctggctcattctttgatctatttgattttagttggtttggtttatggcaaccctagctaagaagcatactccgaactcttggcattgtcctcctgatagtcacaattctcaattatgttctctcaaaaagttttacatatttgcatacagccaattgttgaatgtcatatggtctctcttcagctgcaatgacagaaatacaaaatcatgaggacactgtaatctataaatgatgtgttgagactggaaacacagaatgatgttaaatgagggtagtgctaatgccctcagtcttagtcacaatttcacctaggttgttaaataaaaatcatgggatgccattgttttcaaccaaattcctgcatcaggcctccagatcagactaaaaatcaaaatggtgtcacccatgttcaccaaaacaaaactgagttatctggttttccaaaaaatggtaagagagatagccaattttccaaacagaagtttcaatctttaacaggcatgataatgaaatttcctgttttaatccttaaaatagaatacctgaagtaacccaatgttaaccaatcagttttctttctactgttctgtctccacgtctccaccttaaagaaaagtgactttgatataaccaatctgctttttgttgtttctgccttcttcagtctattttctgtctctaaagttaacatcctctgcttgattcattgcaacatttattctattttgtggaatgaagttttgtccaattctaggagtgcaataatgccaatgagatcttgaatctcaatttgttttacttttgtttcttgacaatggagaggtttaggctagagagcattttcaaagtcatgagcatatagacttcaagtcaaccagttagatgagatcacctggtgataaaatagagaagaatgcaaggaccgagccctggagcagtccaacatttaaagattgagccaaagaggagaaaccagcatatcaaaaaggaggcccagtgagggaacaggactatctgtgacgtgtaggtaagttcagggggaaaagtgtttcaaatcaaaggaaccatgtcaattattcgcgattctacagagaggtcaattgagatatggatagagaattggcaattgcctttggaaacaagatcattagtaatcttgataagtgatacagatgatggaagccaaagctcgatcagggtagactgagaagtgaatgtgaagtgagaggtaggaacaagcactattggagagatcttgaaaaacctttctaagaatttatgaagatagcagaaaaatagggcagttcctagaggcgattttggagtcaaaggaagtttattttagatgggagaaatttcaatatatttatatgctgataggagcaattcaattgagagggaaaaaactaacgatgctggagggtaggtaattgtaagagtaaaatccttaggaatgtgcgtgaaaaaaatccggtcactggtaaagggactggccttcctaggcgcagggacacttcattcatagcaacccaaatgttactatgcagataagggtggttttgatggtgagaagataagggagtttatttctgatatctttcattttttccatgagttatgaggcaaagttgattagtaaaagtgggggttggggaggaggtatatagaaggctttcagtagagacgaaaaggaatgaaataatccttccatcaagtctacttaaatgtcaatttagtggataaaaccctcccagaattaagtacatctcccaaaccctttctctctctcaatgaccttttgctcctttctggtactcactaacatttgcaattgtatctttgttcgttcacttctctgattccccattagagaactacagaagggcacggactttgatttcaaaatgtatatttagccgttagcacaaggcaagcagatggtcactaaataaatacttttttaaacaaaaatgttaatgaacaccttcaaaattttgtcttacgccacctcgttaaaatacttgtttgtgcaagtcacttttcctctctgagctttcatttctgaatctataccatgggaattatctcttccttgcctacctcccctcgttatcaagaggatctgagccaataatgatagaaatgcttcattaagggccccttaaatgtaatggatttctatttttagcccactggtagcctcgcaggtagcaggtgctgaaaaagccttgcttattgggggttgggggacagcattgtttctgtgaccgtaggcgtcgaagctatgcagaagcgttccgcggaccgcagagagatggggctcaggccagcatccctctcgctccggcccttcccgggaggagctggccgagctaggatggggggcagggagaccgagggggcagtaactgtcaaacctcgccgcttggcgccattatttaaatggaacgtgcctgtctcgcagctgtacgtgcccggggcggggcttcgagcgccctgagcggggcggaggctagaggcgggctgggaaggtggaggggcgggccggggcggggccaggccggctagaggggcgggtctagcggcggcccccggcgaagttcactgcgcttgcgctgacagacgcaagatggcggacagtgcggaactaaaggtaaagcgcagctcgaattcacttctaatattcggccgcggagacggcgccgctgctgccaggggggatgggtccgaccctggggggcctctcgggcctgactccacccgggcctggagttgtagggagagaggcgcgcccggtctcagcagagggggcccgcctgcggcgggccgcgggccccgggtgcctcgggggcgctgacgggtcgtccccggcgtgttattgttgtgggcgcctctggcgggggtggcgggggaagagatagggagtccggaggtaggggctgcagctgtctcatgggctcggctttttcaccttccagttagcctccctgccccccatggggagctggggctgggggcagggtgctctcgtaggggggattgggaaagctccccgtggccgcttcctcttcctcctttgcagtcccgggctcctgtcaggcgctcttctcagacccccgggaacttggcttcggccgccccgcccctccgtggatcccagtagcccccgccccggactcggctttccccggctgctcgcttgtcaggaagcgcctggggtgccccgcttgtgggaagcgcgatcccggggcgatagggtggggatctgggggagaagctctggtaaagtttagcgagccccgggccggcgttggggttcggctgagaggtagtgagcgggacgttactctttctctctgattccgggcagccgaggggagaaaccccctcgaagagtgtgtctttggaagcagtgttgggagggggggatgcagctacctctctcccttcttttgccttagctggtgtggagggtgagaggagcctttgggggtctctgcacacaccatgatggcgatgctgtagctgatggaggtgaatggttcgtgtttatatccccccattgccttttgtttgtagggacatcttgctggccatgttgatttgaacgaaattctcccctcatgctactccaacccccgataaatagaacgttcctcttaacagtaccaattactcacgcctcacgaaattagatgaaagggtgcccccttttccccgcttttctcccaccccaatctttacctgatgatggcttctttaccgtagcagatataccactacacaagcagttgggggagggggtggtggaacccttatgactggattgtgacaaatggggctccgcttgaataattttggtttagtagcaggcagttcttaactaacgcgtattatttcgaggctctg

SEQ ID NO: 6810 - DNA, 6000 bp, Homo sapiens
ctatgaggaggaaccagacttagatggttgaggaatgggcagcaggtgggaagagaggcagctggcagacagtttttccaaaaatgtgtcagtagacgtgaggagagagtgaagaagccagaaagggaagtgggtttaggatctcactgggaagagttttcatcctcctatctcccccgatctccctgtcccctccctcctcagaggcaatgttaccagttccacgcatgtgttagaaaagacgtatacagattatttcccccggatggtggcacatgcatgcactctgcccctgcgtcttaatttttccacctagctacctactgtgaggtttctccatatcagtacctagaaagctgcttcttggccaggtgcggtggttcatgcctgtaatcccagcactttgggaggccaaggtggctgatcacctgaggtcaggagtttgagaccagcctggacaacaaggtgaaatgccatctctacaaaaatacaaaaattagccaggcatgatggtaggtgcctgtaatctcagctacttgggaggctgaggtgggagaatcacttgaacccaggaggtggaggtcacagtgagctgagatcgctccactgcactccagcctgggtgacagagtgagactccatattaaaaaaaaaacaaaaaaaacaaaacgaaacaacaacaacaacaaaagaaagctgcttctttcttgcttatggatgtcacataacttatttaactaatctgttttttggacatggaggcagttttgagccttttgccaccacaaatgatttcccacagaatccccttgtacttcagtcattttgcaaatgtaggtggctataggtaggataaagtcctagaagtggaattggtggttcatgggtatgtgcgtttatatttggaaagatatcggcaatgtgctgtccatagagtttgtaagaatgtacccacctaccagcagtggatgagaatactcatttaccacaccctccaacagagagtgttaccaaacacaccaatatttgccaatctggaagacaaaaaatgatttattgatatagtttaacctgcatttttgaataaagttaaatatattattacagatataaaagtcatttgaatttcctcttctgtgaactgtctattcatatgttttatcaattttatttgaagttgttcttatcagaactttttcttattagaggaatcagagggaatcttgaagtattggagaaactagtcttttgtctggaatatacattatacgtttttcccttcctcatttggtcaacaatttattattattattattattgctgttactgctgttttttaagaattatgagtgttggccaggcgcggtggctcatgcctgtaatcccagcactttgggaggccaaggcgggtggatcatgaggtcaggagatcaagaccatcctggctaacacggtgaaaccccgtctctactaaaaatacaaaaaaattagccgggtgtggtggcgggcgcctgtagtcccagctactcgggaggctgaggcaggagaatggtgtgaacccgggaggcggagcttgcagtgagccgagatcgcgccactgcactccagcctgggcaacagagcaagactccgtcgcaaaaaataaaaaaaaaaaaaaaaaaaagaataatgagtgttgatggaagagattcactagagaggggatctctgatatggaggtccctgaggaagcatttaggtgagttccagaatggaccagggcttgtccttaggcaggaagggagatacctcgctgtcatgacaagtagaagggagggaagacggagctgtgtgccaggaattggatggctacacgttgaaagagtgaaggaaatcgtgagttcatctagggaaggggctgtgttcacgagatggcagaagttagagggatgagagagttcaccgatgtagcaagagaatgattggactgatgaagcctggaacctgagttagatgagggaagtgagtggatggtgttctgacgtttgcttagattttgtatttgtttgtgtggcatttgttagtcacagggcaagcaatcagcccaagttgtttccatctcccctgcaacttaaaatccatgctctgaatcacttccttatctaactgggatgcaccctgccaatctttccctgcccttagtcgcccaggctgaggtaccaaatgagttgggacagcctctacgccccagtgcccacaggggttatttaaactagccattcctaacctgctcaacctgccctgctgtgcttttcccgttgaaacccaataaaggatctgaccgaggcctcacgctcactgaccaaagcctggtgattcccctgcagccacacactgggtttggtgtggcccctcctcttgggaaatgtgggtgatacattcttctttcagcaacattgcctctgttatcactcagttgcctccatcaattaaaatcctgcaggtacaattgagaccacaaaggaccctcaaacaggaatagaatgtaagggtcagtaaactgcaggcccagtgaggctccagagccatcagagcatgagtggttaaataagcaagctctccgggaagaattcctggaggaagtgggctggggagatggattctgaagaatggagatgaggagatgcgttgtagtgggaaaggcaagagcaaactgcggggtgcaggggagtgtgtgggtgtgtttgggtgtccgggaggacagcaatcagaactgaaagaggctggaggaaaatctgcaatgaggaggttaatctgatgttgtatagaggaggcaggggcgagagggtccaagaggtagggtggagcctgcagatgctttttgaaaacaggatttttctttccaagaatgatttgattttgtggtaactccttctgggggctcagagtggggcttgaaggtgcctatgatgaaggacctagatgtgtgttccaaccttgcattaggtccaacttgactgttgctatacagtaaaccccctaccctgctaccttttggttaccacattaacaaaaccccattcctggctgagctcaatcatctgactttgcccttcaaccctggcaaaagtcatcctcttctctctcttctgcttgtcacagcagcgggggaacttcgctcccatctgaagtgagcctcagccctcttggtgccttcttcctccccatgaaaaccccccttctcctgtccagtccccccgtcccccaggatcagctgcccatacctggtgactgcttctgactttccaggggcatttgacttgagaaataaaaaaaagaaactggaaaaccgaaaagtctttaaagcatgaagacttgagcaatactggttggatggtgggtgatggcattgcagtactgaagcctgaggccctgttccacactgcctcaaatcacagagactcttttttgggggtggggatttgcctgttctaataatgctggcctaggtcacagtcctatgtgctataaatcagtaaatccatgggaagttcacgaacacatgcacctattgggcgattcctcatgctaccttgggatttctcttgtatcgttgcttacacagttatttacctttttgagagtggaatttgtggggaagtcatctcatattcagcaagtgcttgcctagttctcacgaaccctgaactgggtcaggtggcatggatcttaaacctttgttgtatgtgttttacctccccagtaaagaccctgtcacgactccctgatatgccctatagtccccattgccaatgcagagaataagggaacccagccaggcacagtgtctcatgcccgtaaaatccaaacactttcagaggccaaggagggaggatcccctgagctgaagcgtttgagaccagcctgggcaacatagtgagacccccatttttacaaaattttaaaaattagctgggcatggtggtgtgtgcctgtagttccagctactcaagggggctgaggtggaaggatcacttgggcccagggagctgaagctgcagtgagctgtgattgcaccactgcactccagcctgggcaacagagtgagactctgtctcaaaaacagcggcaacaacaaccaaataaataaataaataaataaagggaacctagatgggctgtggttggcagagaagatttcttgaaaaaaggaagagctcgagcagacagtatgtctagaaaaggtaggaaaggggaaggaagagaaaaggaagtccaccagggaggccccatttccggcactctacagagccaggtgttcccgagaggaggttgagtgtcagcccttcagggtggccagtggatggcgactggtcaccctggggtgggggggtgacaggtgagcaggtgagccgcctaagaaggaaagggacaggaggcaatggagttcctgccaacagtgagggtggggatctgtgaatgttgccccctctctgccagctggggagtcctgggggggctgcaagctggatgggcagggtggggagtgggtggactcagggaccttgcctttctgtgagggactgaagttccttcacagccgcctccccaagcgcccagggaacaactgttctcccagatcagggctcactaatgcctcctgcctggaatcctggcttgctgaaagggagtgatagggagcagggagttctgagaggagggcttccgtttctgaaatagaggatgccaattgttcatttcttcgatgtctttggtacacgtcctctctagaacctgactaatcattttttacaaattgtaagtggaaaaaaaaaaaggaaattgtgtgcaggaggatgaaaactttggcttaagcgtgggcttaaccaagcaggaagggaaagtggctggcccagctgcccttctccctcctgtccctcctagtctggtttggtttaatcttacctttgtcctagaggcagttccagatgcccagttgctggaacattacttctgggtgtagcttaacaagaccatggcctctggacccgcgatcagctcgctgtgtggtcctgagcagccacccaacatctctgggccttggattcctacctggcctttcttctggatgcatcatttttgcctttaggtatctggaccattcccccccatggatgataaagtctttgcttcacaccctcaggattaccttaaaggcctgaaaagaacagaggaggagtctgaggaggtgaattccagccgtgctcttgcaggctggctgggcagtgtgctggggaggagagggagcctctggctgggcctcctccaccgggcctggtgtgctgggaacaccccgcattgtcccaaggcctcagatttgactttcaaagggaaaacagctctcctgataaaggtgggtcttgttctatgatatatggctttgttccagtgtcctgcaggtatgagaagaacagaggctgcaccgggtctctagggggttagacgactcctgctttgggggagctgaagggtttcatgtgcctgggctgtgtctgattgtgccttcagtatcgctgtctgggcgcctgctggtgccgggcactctattaaatgtgatcttacggaccactctggaggagcagtgcaggagtggtcgtctctattctctcagcctgggatgaggagactgaagggtgtgcagcttgtgcagaatcccttgggcttcccaggggacagctcaagtcagatttgaaccacgtcttaggagtccttgcccagagctcctttccccacagactgtttatggtgggccttcacacgactgcaactgcgttctctgcccttccactccgccccttctgctctcatgtgtcccctgcagcatcaatggttgccaattattgaggaaatgaattcactttgttcagggaggaagatcggggtctttgtctgaataataaaagaaaagaaaagtttgctctaataattccagtgaatccccacagcacctcccctctcccc

SEQ ID NO: 6811 - DNA, 6000 bp, Homo sapiens
gattccatacgacaaatgaatagacactgcttcctgacctcggggagttcctcctacctggggaaacagaaacacacagcaagtgagggattctaactgtattgtgttccttcactacatccatccaggtgtccccatcgtggtgccacctccatagggtttgagttaaatgtacaggaagtgcatgttgctgtccactgtctaaattaggagtgatactcccaggacacccacatcctccagatgattaaccatctggtatcctggcgggggctgtgtttgcttcatgacttgtgtgggccctggcaccaggaaggatggtagctgctctcgttgtgtctggacaacaatcagtacacgtggagaaggggcacatgtccctggttatgtggacagtcttcatttgtgcctgggattttaacgtctctgcatgctatctgatttagtatttgtcccactctccttcaaaggtgtgggttttgcataattgagaaggccagggtatctgtgagcccagcgggcatgactcaagcttgactcaccttgtctgttacttcctggttaaacagtgtttagaatccacgaacttattgcctcctccagagccttctgcatccgtcccactgatggtctctcctggtttgtgctgtttggcacctctggttcccagagctctctggatttacctgctgtgtcacttttcacacagcttgtcctggctgtttgctggtccttcttctcccttctcgatgggctccatctttcctttctgtatattcagggccttatactgtgccatggaataacctcagtctaccctttgtggagagaagtgggccttcactcctcactgctctagcatcaagaagtcacgaggttgtgaagggagccacaggaggaactgcacgctcgtcaggccactgttacctcttgccccgacttcagagctggtggcggtgtctcccccaccttgaataactcatcttttaatattttctttgccagagtctcacccactccatctctcttatcccatttttgtcttctctcctcttttgtggcctcatctccccggtttttactctttcctgagtatttcagatattttaccgtgcacatttactactgtactaatcagaaaaccctgaatatgatcacacccaggacacagtgataatgatgcttctttcacagtgttgccatgtggatttatgagcctgctcagggcctgccacctctttgaaactcagtagctatttcagcctcaaattctgccttttccccctttcatcacctctgtcccatccctgtagggaagtttgctcagctggaggtggctacaccatttcacaactgccggcttctgttcccctccctcagttctgtgttcccaattcccacgcagcctgcccacagagccgagcatttcacttaccttcgattacatcacttgcattgcttcctgatcataagagtattatattctaagtttttaaaacacagagataatagaaaataagtgggcagtaaaaatcctatgtagtcttaccattcagttattagctttgttcctttttaaaatgtatttacctacacacacacacacacacacacacacacacacacacacagagtctctttctctgtctggatgtacacatattagaggtgcgttgagttaattcagttttccttaatgctgaatggctgagcatctatgtttggctgtgattgaggctgatgctgaatcattgaatgaaaatatgacattctaacaaaaataggtattgttcttatgttatttttatttattaggattcctcacattgtaaagttaaactctaagtcagaaacagttgtatctagaccttgcccgctgctagatactcctgtgcttaccatgctgcaatttattatactaaatatagacatttgtttgcaactgagtttggtggaggaatgaactacgttggttttgttaattatgtctgcattggtgatgatttactacagatgttatggtgtgatatgggaggttttttcccctgtgaatttttgaggtggcacagttgataaacttggcaactaatttgtccttataaagatatgaaggattccaaataagactttttcttgaaagatgcatggtctaaacagaaacaggtagaaaaatttaaaatcctaaagattgtttattgttgtgaaggccagcataccaaacaattccacaaagacataatttataatatacactaataatctcttttattctgttttatagtagtatttatggttctgtacatatcttggctcagaaagaatatgacagtctttgtaaaagtagcaagcaaatgttttgcctcttttttggggtggggggatggagtctggcactgtcacgtgggctgcagtgcagtggtgcaatctcggcccactacgacctccatctcctgggttcacgcgattctcctgcctcagcctcccaagtagctaggattataggcacacgccaccacgcctggctaattttttgtatttttagtagatacggggtttcactgtgttggccagactggtctcgaactcgtgacctcgtgatccgcccatctcggcctcccaaagtgttgtctcttaatatttgtattatttcctcacttcctattaaatgtaactatttgttaaagttcttgataattgatttgcacacaaattttgcatataaaattaatagcttttaccatatggtcaaagattactgcacatttcattcttgcaataatatttatatttatacaccatctgactgggagagttcaaaatacatcatacatacaaggagctttttaatctgagtacatctagaatgcagatttacatttgaaagtgaacatgcggacttgagcaataagttcatgtggcatggcttatttgtagtattgatgttgttatgctgtagacgtagagatggtggtgacctgagtatcgtaaggccattgatcatgcacaagttcagggatgccagaaatgatcttgcaataggtatttgactgtttgtcctttcaaaggccaaggcattcatttagaagccatggccaaataataggttttgggcaaatagtgtagctgaagctgaactttgatgggtccctgataaatatgtttgcatatatgattctgtatcctgctccattaacttactcttagcattttcctataacattatctttgaaatcatgatatttaaaggttaagtaatttttatctgggagtattccataagttatgagcttttctctttatgtcagacttgttagttcatttggtttctgttcaacttccaactgcctttggacagtcaacatgcatcttggtcattcatttctttcccctacctttcatatcctcagccactgtgaagaggtctctgcagtcattgagaactggcctcttcccttttatacaggaaggtccctcaggtatctgaagacagttttatccctccttctgcctcaaggactctccaggccaacaagttgtgtctcactagcaggtcctcctcagtgaacccttcaccatcccatggttctttctcgtatttttgaatgtggagaatcagagctttgaaccctcctgtgtactcttccaccagcaacccatgccttgcactttctccttcagggtctgtcttactgcacagggctcctgattccctagactcaggtcttggtaggccagagtctaggttttggctgagactccttctaagacctcattagggacattcagttcactgacggacaccaatccttccaacctagatgttctgggctggcttctgtgtgattgatgacacacactttcttctgatggtctgcggcttctaggtttgactcaagcatgagacaagtcatgggtggatgtctcattgcagttagacctgtggggtcatctcgcacagagtggggcaggttgaatgggtcactcatccttgttgtcttgctccagaatcatatccttgacagcagcctctccacttttcttccattggaattactggttacccatcttcttgctgggtctgttttatttttactccttttacaaatttcagcacagagattacaggacttcagcccacagggtggagaaggaagctggagttagtgggttcggacactagtgggaacatggggagtgacaccatagtgtgctgtagtgcagtgcccctgttccagaggagagccagagctctacctgagccagcactgttagctgaggtgggagggcatctccccgggctgccttgggactggtttcaattccctaatgccaaaacctgcctgcctactagaaggggctcaggcaggcatccagggctcggtatccaggctggaagcaccagccagaggagacaggacctggcctcttcttgctttcccaggtccagtggccatcctcttctctattgcagagaccttggcccagcctgctgatcagaaaagaatgtcttacagaggatctcacggctggttaaagccgagcatggatctgcagtcagagttctctgattctcagtctaatgattttctgtacattgtgctataaaaatgctaccccatggaggccctttgggaatcatgtgccctgtcttcattccagaagtaagagggaccctcccttgcttggacttcaagaaaaatcctttattatctctcactaaaatgtttggataagaatctagatttttcaaatatgcatttgttatggtttcataggaaatccaagtaaccgatttttcagaacctaagcagttaatgctagaaattttgctgcaaataaattgatcagtatgcaagacagttgtcacggctgaatcatggtccacagttaaggtaaacagatctgtgatgacattttctcagcagaatacaaatgcagctacatttcctcccagaggtttctgacatttcttctacacggataacagattctcctaagaaggtgttggtcacaaggaagaaagatctttgtttaatccctctgaaaaggtagggctgtgatatttgatgtgctttctgtgaagagaattgttctaagagagatgaatattgagaagagcgtttttctttggttagttgcctgccctcacccccctcccagccatggaaagagccttttggtttttcatttatttgaatggccattaaaatattgtgtgttgtcatgttgtgaaagtttgcatgtaattgattttttcccaatgtaaagatcaggggatatttttcttacttggattcacatgaaatgtagggagagcaagatgtctttttttccatttcctcctgttcctttcatctgtaatgctctcaagttccacgttttttccaggttttcgctgcctacactgtattataggaattctacacagtacgtctgcatctgaaatgtgaaatagtctgtagctagatgctgcattataagccagatatgttttctgtgttacggtgaaccttacaaaatctttagcttgtactgatttttaaatgagctccaaacctcattccaactttgcctaagagcagacagtcatttcccctctgtgtgtaatgggaaacaatttcctgaggggatatttgcatttggagtcagactgctgcgaatacagatatttctgtctatttgtgcatttgccatcggttatgatcagggatctgagcagagatctagacaagagcgttgcatttgagtgggggaataactctcgatctgtagggagttgcagttgggataaaagaccagaaatctccagggactggaaatgaacaagaaagcatacccctcagagggggctaaatgactctgctcagaaattctggagcagtcaaaggaacgctttttaggaaacggcatctttcccatcgtacttcgttcctcccagagcattttttgcagtccattgccaggttagcataggggtggtgtcctccaggaagccttctc

SEQ ID NO: 6812 - DNA, 6000 bp, Homo sapiens
ttacatgtgtgttaaatttctcagtatgtgcttctgacaaaataagaaatttggcaggctgctttgttctcctctagaggctacaaaattcagaaatagctttttaatatattacagtgcatcacaattctgaggtttttctgtctgctcattttaaaacatacagaagtgaagctgcagaaagctttagatgggcctgttccagggttccttgttactgttccgtatggtacatatacagtaatacattaaagcagtttctgtctttaggcctttgggccatagaccaggtctggcttatcaaaaagtggtggaggaaagcagccaatgagactttttcctcaggccactcaatagtcttatactaagctgtgagttcctagctattttgttttatcacatgaagtatccctgaagatattagcttaagattccataaatattatctgttttcttccccttcaccctttgtccaagcccttgtttcatacctggattatttcctttgccaacccaagactgagattagagcccccttctttgagcaccatatagcactgtgtgtgcttaaggcagtattgtaattgttgatttacttgactattgtcccatctttgtatctgactccagctctcacatagtgcctcacatatagcaggcactcagtaaagatgggctcagcatgataggtgtaagttagaacccaggcaaatttatgtttttgctctggaagtcaagtaggttagttgtattaaggttgatgtttagctctcatcacaatttgcatgttagtggtaaagggcagctaaaaaaaaagcagtagtcatacttcatgtctctctgtgaaaaatggaggaggtgtggagtagggatatgcattttaagtaataatttctagtgagtttatttctttcattactctaatatttatatttttaccttaatttttggtaaactgctctagttcaaataagtatgatttaaattcttgcagaaacacttgttctaaataacagaataccaggaactgtaaataatagttttaataactataattatgggggggttggtttttttgtttttgagacagagtcttgctctgtcgcccaggctggagtgcagtggcacaatctcagctctctgcaacctccacaccccgggttcaagcgattctcttgtctcagcctccagggtagctgggattccagacacctgccaccacaaccgactaatttttgtatttttagtagagacggggtttcaccatattggccgttctggtttcaaactcctgacctctgacctcaagtgatccacccaactcggcctcccaaagtgctgggattacaggcatgagccaccatgcccagccaaattatgtgttttatttataaaataatttaagcaagtgtttcacctggttgttccattagtaaatgaaagattttatttcactgagtctgggacttcccaaatagcttaatattatattagtcttgatggttctttattagaaccagaatggttcaagaaagcctgaaggcaggttcttttttttttttttttttttttttttgtgagacagtctctgttgcccaggctggagtgcagtggggcaatcttggctcactgcagcctccacctcccaggttcacatgactcttaagcctcaacctctggagtagctggagttacagatgtgcaccaccacacccagctaatgtttgttttttgttttttttgtttttttttagtagagacagggtttcgccatattggccaggctggcctggaactcctgaccttaagtgtttcgcctgccttggcctcccaaagtgttgggatttcaagagtgagccactgtgcccagtctgaaggggggcttctcggctgttgacttatgctggaactcagtacagagactatttcatctaattaatattcctgtttaaattcttttagaccaaccttatacggacagtatggggttgcatcgacatcttaaatcagtaattgctaagctctaatctgaattttttttgtttttacttatagcaaaaatattttgattctggggattacaacatggctaaagcaaaaatgaagaacaagcaacttcctactgcagctccggataagacggaggtcactggtgaccacattcccactccgcaagaccttcctcaacggaagccgtcccttgttgctagcaagctggctggctgattaagaggctgaactgcatgaatctgctaaatctcattatttctccttaatatgttacttatctactttttatttcctttcattcactagtcatttgagactgacagctttgcaggtagcagtagtgtgtgctgctattgtggaatatacgtgtgtagagtttttgattagtttaacagtgcactggtgaagaggacatgttagagcaacataagtaaactacttgaaaatagttgtatatattacctaacttctagtgtagtactggttctaacaagtaacaagcaagttttaaaattttaatgttttggctttcattacttcatcttaattatagctttgtatgttactcttatttaatataatctctattgtattgatttcttctgtatttaccttttggattttgtaaaacagaagtttaagaccacaagttagaagaaaggtcacatatttcaaacacaactagatggggctctgaaagatttgtatctctgtgcttgaacttgaatggccttaaacctgtttcagctttaacagtagaattttacttgggcaatatttgcccattctggtgtaacttatgtgactctagtgcttaacagctgccgttgaagctaatattcagttctgtagagttagaataccttttgttgttgaagatgtgaatgaagtatgcatgtgcattaactgttgaattcacttttgtgccatttttgtaaatacagtagttttgcacaacctctcacaaatgtctgtattaatttcacatacttaaaaagtagataatgtgccaaccagaagcacaagagttcctacacaaaactctgtaaatcattatagcttttgtataataagagtagtttacaatctcgggcttatagaataccaaactgaaatcttagttcaatctgccatagacttaagcttttcatttgttactaatatccatgacattcagtggccttgtgcaaatacgatatgttgcttaggcatatcttttgtcctatgcagaacctttcattttgatttttatgaaagttgcaattcatgtaatttatataaactttttaaatgtagaaactttttacttccacactcagttttggagaccctagaataaaaggcttcaatactctgcattccatgccctctgccacctgcttttttttcccctttgttctttgactcaaatggtattgagctgtttgttgtatatggaagcataggtgtctatatccttactcttttatataacacaataatggcgttttccttctaatttctcagttgttaacttctttctcttttttttttaggatagggccttgctctgtcacctgagctctagtgcagtagtgcaatcacagctcactgcaaccttactcctaggctcaagttaactattcttgatcctttattattactaatattctacaattgtttaaataaaaggaactttataatgaaacggttcggaatactggctcaagaacctatgtcaagatgagctgaattttggtaaattattttaggaattatgacaagctaattgaattaggcttgtgacaattagagtaatttacatgacaggtaaaactcctattaaaaatgtttagatgtttgcttctgtagatgtcactttagtaaaataccaatttagttttacttgtggcttatctagttagaacttagcagactttactgggacaagtttactgctcttgtaggagctcctctcacaagtagttgtaatgctgtagcatgatactcaggatcagtagcttgagatgctactatttttctcttcatctttgacttgcagagagcctcccgtttttggatccaggcatcttttctgaatcctggttccatcagtatacctgctctcctatgaccccaaatcatagtcaatggtgcctcaaacatagcaccttaagttaaaggctgcctagtgctctgaggaaagcttgctgattatcttcctgatctactcaccccaaaaggcagaaaagcaacacagtcactgctgtggtcatttgtaatgtaaagatcagttatatatatatatttgtaatgagagcaagtatatactcattatagaatcaatttaagaagtttaaaataacccagagtagaatttctatatctagtcttggtttttttcatgaatatttgcaagtaattaccattaaattcacacatgaaagattaatctgaaagatcagagaccatgttattcctgaccacgatagaactgctcctgtggtttgggacaagtaataaaacaactgcttgagttttgtttgtaaaatacataattaatatttgacctacctcaaaatgtattgaggatctgtgaaatgctaagtgcccaaaataaaatattgctgattgtctttttattaaaagtaaatttcctcattaagccaacctgccttctgtaagtcacagtgcttaaatctcaggatttttcattaggagagacctgtcgttaaggatttgtaggtataattgcttagcctccattattggtgcttgggatagagaggttttagatttttgttttttttttgttctgcctcaaagctcagtttattgaagacatttgtaagctattggatcatcacttgaatcaagattttgactagtgagcttaattgtccatttcttacaatttcaaagttacagtctcagaaatggttaattttaataactgtcctatcataaattaatgttggaataaattgaagttgttgataaatacttcatgaaaactaaagtctgaaataaattacttgttttatgtccaatagctactacatttgatagaacagttttgaggaacatttcattcttgaacgcagcatctgacatggttctcagcaagttggaatagtaaggattattggcttgtttcgatgagtggaagcggcatgtttgtagcatacaagttattcaataatcttgtgctgatgacctaaaaatatgtcttaactattcatcaaggaaagcctggtgaagcctttacttgttactacttcaacagttggaattagttgctctttttacttgatgaaacaaaactatacctctgaatatttatggatactttttactaaatcaggcttgtgttcttaatccaaattagtaaagttttatggaagctgaaatgtaatacagtagtctccccttatctgtaagagatacattccaagacccctagtggatgcctgaaacctcagatagtactgaaccctttatcaactatgttttttcagtctgacaaccaaggcggctactaagtgactaaggggcaggtagtatacagtgtggataagcaggacaaaggggtgattcacatcccaggcaggacagagcaggagatcatgagatttcatcactcaggatggcttgtgatttattttattttattcttttttttttttgagatggagtctcactcttgcccaggctggagtgcagtggtgcgatcttggctcactgcaacctctgcctcctgggttcaagcagttctcctgcctcagcctcccaagtagctgggattacaggcgtccgccaccatgcccagccaatttttgtacttttagtagagatggggtttcaccatgttggccaggctggtctcgaactcctgacctcaggtgatccactcgcctcggcctcccaaagtgctgggattataggcatgtgccaccatgcccggccggcttatgatttaaaacatgaattgtttatttctggaattttcca

SEQ ID NO: 6813 - DNA, 6000 bp, Homo sapiens
gggaaccctgcattttctcgggccaacctacacctaagtctatctgaccctttagaaaatacataggtagtgaggccgggcgcagtggctcatgcatgtaatcccagcactttgggaggccgaggcgggcagatcacgaggtcaggagatcgagaccatcctggctaacacggtgaaacccccgtctctactaaaaatagaaaaaaattacctgggtgtagtggcaggttcctgtagtcccagctacttgggaggctgaggcaggagaatggcgtgaatccgggaggtggagcttgcagtgagccaggatgcgccactgcactccagcctggacaacagagtgagactccgtctaaaaaaaaaaaaaataggtagtgaaacatgaatttaagtagctactacacataaatagttattaataaaatactctttcggttctcttggggctttctagttttcttgtctacgtgtgaaatatttagattattgggttcttataaaagtatacccaccttctattaaacccggagaagagtaaagcgagttaacttgcccctggttggcttaccttgtaaaggagttgatagccagtgtttacaagcaggccctgccaaatcgccccagcggcccacctgtgagctggcttttcagatgctgcggagtaattccctctaacccacactgaagctccaggatctgaaagttcgcgggtgagaagtgaggtaagccaggagcctgtgaggttgcccttagccgtactgggcatgcggacagcacacatattctttgtttcttgttttcccctccgatgttaaaactaatacaaagttaaaagctctacattttttttttcagtattctacctggcaaaggtagagttcccccaccttactgcaaaacaaaagtaataataaaactgtcaagtagtgtcagcaacctctccggtaatatttgcagggaaattactttccacctacaaagttgacacctattttctgttagggaaatgaattgatatgagctggagattggcagggaagtaggagtctgggtcagatacctggtgtgcatttccttaaaatgcctaggaatgtggatggtgttttttcttttccttgaccacctcaaggttgttacagaagtaatatgagggggaaaactgtgaacagtgcttatgggagcaaaaatcaaaatgtggaatcagaggcagttttagcggtcagtcacatagccccagatgggctgcttaagattgggaaaagaaagctgggttagaaagtctcatgctgctggccgggtgcaatggctcacgcctgtaatcccaaactttgggaggccgaggcgggtggatcacctgaggtcaggagatagagaccatcctggccaacatggtaaaaccccgtctctactaaaaatacaaaaattagctgggtgtggtggtgggtgcctgtaatcccagctactcgggaggctgaggcaggagaatcgcttgaacccaggaggtggaggaggttgcagtgagccgagattgtgccactgtactccagcttggtgacagagcgagactccgtctcaaaaaaaaaaaaaaaaagaaagtctcatcctggcccaaatgccatctaccagtgtgactttgggcagtttgtgttgtcctctgcccatcagtttcctcctttgcaaatgaagggcttggacaggctaacacctgggctgtcttagccctatatctctaaggaggtacagaggagaaaggagttcctgagctgtatatgagactcacccacttacctgctgggacttcaaaggctatagatttgaaataacaaagacacgctccttggtttcttggtctgaccttcagaaacacaagtgcagccattctttttgccttccactgcccacccctaccttgtcagaagatggttggttggaccatgtgcttggtcgtcccaggagcctggggagctccactgctaatggttcccttggacgctgtacacacaggtcattgttatcttcctttttcaaagctgttacttaggttggatgaaaaatagcagagttcagccatcgtgattatttatacgggcatacaaagacaagacacaccactctttctgttactaaatcatactctggagtctgagtttctttgccatatgctttccgaggcttttcccactgggctagttctagacagaatctgtataaaacactgcccttttggtcagcagttcacaatgaacttggatgggaaaatatatactttccaaatcagggaatgtatattctgattctgtcctttgcatcagtgtagaactcatggtggaaaagatcaaagatttctatggggttctttccattctgagccctgaagctcattatctcatttttctaggtttcctcatgtgatggctgtccatttttatagcccaatagccaaatcataggtcttccattttatctttgtcattcagaagtattcaccagagttccctttttcttcttgggcttgtgacaacaccatggaagttaggctgggttccacccttgcctgccaacagcttttgtgttactttcattcatggaatacattctcagtgttgatttatgtagacgctcctatagcccttgcccctcccttgacctcagttattcctaatccccccatctttgtcctgtgaatgctggctggcctttccaagatggaaaatcactggatgacccgtacatctgtgcagcccacacctagtacattgctggcctttgcccaaattatgccaccccatttggtatgacctgacaccattgtgatcagtctgatgacctggcagcatcccatctgcctacccagttcactcttgctccatttcagggcctcttacagcaactcctcacatatcttcttgtcactgtctcatgccttctcagtctcagctaacatcagcccattcattgatacagcaagacaatttgagaaccactatgtgctctgccagagtgaataacaaaacgcagtacttgccctcaaggagcttagactctaatgagaaagacagacaataaagaataaacagtcatcctggccaacatggcaaaacctcgtatctactaaaaatgcaaaaattagctgggcgtggtggtgcatgcctataatcccagctacttgggagactgaggcaggagaatcgcttgaacccaggaggcggaggttgcagtgagccgagatcacaccactgcactccagcctggcaacagagcaagactctgtttcaaaaaaaaaaaaaaaaaagaataaacagtcaatccttataaacatcgaaaagctatgaagaaaacaatcggagtgctgtgagacagagtggcaggtggagcctatcttagatagtgtaggtctgcagaggtcacatttaagccaaggcctcaagaatgagaagcctgccagccatgagagaagaggggtagaaatacctgtggacttcaggctcagcatgtgagcagatcctagctcagggaaaagctccttgtgcttgagaactaaaacgggcctctctaaacccaccccctttccagacacctctttcacacagatgctgacttcacctgctcattctgattaattcatctcttgagctgcaataggtcattctctgggttctccttacttgacatttgggtgcataccgtcttttattattcagctgtgtggaagatctttacgggacttgagttcctttcttcacctctccaagggcatcagtcaggcttctatttatgtggaagatgctgaagaaatacttgaattctattcagttcaataaacattaattaaatgcctggtctgtgctaggtggtacctgctgggtatttaattcagtgctggtgtttaaaaataaccaagcctggcaagatggcaagaccctgtctgtatttaaaaaaatgtaaaaattagctgggtgcagtaaacatacctatggtcctagctacttcagaggctgaggcaggaggatcccttgagcccaggagtttgaggcagcagcgatttatgacagtgccacagcgctgcagcctgggtgacaaagcaagaccccatctccaaaagaataaatacataaaataaacaaaccccagtctaaccatgagaaaaacatcacacaaacccattaagggatattctacaacactgctgaccagtactcctcaaaactggcaagatcatcaaaaacaaggaaagttcgagaaactgtcacagaccagaggaggcaaaagagacatgacagctaaacataatgtgagatcggatgggatcctgcaacaggaagaggacaccaggtaaaaactagcgaaataatcagtaacataccaatgttgattccttagttgtaacaaacacaccatagtaaagcaatacgttaaccagataataaagtatacaggcattatctgtactatttttacaaatttctgtagctctaaaactatcctaaaatagtttatttaaattaaaaaataaataaataattaagacatgttccctgctctctataagcttatactccaggagaggagacacacatctaaacaaatatttgcaactcagtatgataagggtaacaataaaaatgtatgccaagtacaaaagtagtccatatgaaggcatgattatctcaaatttagagaagaaatcactgaggagggcaatgcctggagctgggttttgagggattaataagagtttgaagaatgtgaaagacgcttggaaaaggttaatttgagcctaggaaagggcatttgacaaagcctggaattttttcaaactatttggtattgaaaaaagggaagaaagaaaagaaaagagaggagcccagctttggaatttagtcaacaattatgggagaattgtaagtacctcattctttgtggctgggattccactgcccatggcagcagattcacagggcctctgagcattatcccccatactcctccccatcattctccacccagctgttggagccatctgtctgatcaccttggactccatagtacactggggcaaagcacagccccagtttctggaggcagatgggtaaccaggaaaaggcatgaatgagggggccccaggagacagtgacttagagactgaggcaagagtgccgtggtcaatcatgggtcattgtcttcgaactggacaggccagaatgtctgccacacccacacctgcaggtgaaggagccagaaggtaagagccactgagagcaagttctttgctctgctgatcactgtgtaccctccccccaccacccacaacccaatgtctggcttaaagtcagttctccaagaatatctgacgagtgaaggaaaagatgaagcccatgaggactgttacccttcagccacagaggaatgaatcaaaatgggaacccgaggtgggatgcccaagccaaaggtcaggaggtgaccagtgaagtggctggcctccaacagaagggtgatctctcaagtcctctcttggggaaatctgaacaggaggaggcaggtaggcagcagctgaagcacagagatttgaggtggagaaggtcgtgaatccctctgtagaaggtgctgttataagtaagcaaagtctatgaatgagcccaatggtggtgagtgagtgagtgagtcagttactatcagaactgagaggcaaacatccagggaaaggcagtaaccttaaggcagagaaactgttctgcccacgagagggacagcaagagagcagcagattttcccgatcctgtttctgtgcggcccacccactctggtgacagtgacctctacaagcccaaatgtcctatcaaatgggggtaataacagcgacagcctcatgggtttatgatggggttgacaggagacaatccacgcaaagcactgagcaccatgctgggcagctaagtagttcatcaatgatatttttgaggttgttgttttataattcttattaaattccatgagaacgcg

SEQ ID NO: 6814 - DNA, 6000 bp, Homo sapiens
ttttgttttgttttagcttaaatgcatttcaagccttgtattggtactcaaattgtcctacagtgtcttttaatttgtcctatagttattgatagttttataaacacacattcatgtgtgcactggagcacacagatatcatttttgcttaatgtttgctaaatacttattctgggtatgatactgctcttgaaatttaccctgtgttttaaacatcaggttagggttttatctcattctttgaaaagcttacaattggaatgacagatgttggtacaaaaaccagtggcaacccaacagaaggggaaatttgttggggtgtttcttagaagaatttttatcgttgaccaacataatttaaaaaaaaaagacttataaggagaaagatttttggttttgccctattatttctgttttggacagtaggatgggaagtgatgcctgaagccgaaacttgtgaccaagaaacagcaagcatgaggaccaaaagcaatgtgtggtggatgaagaagtagtagatcagaaagagcctggtttgcttttgagtttctcatacacttaccatatgatccagcagtcctatacctataaacaatttcatcataagttgtgtaagaagagagatttagaagcctggcaatctctcttttgattattaacaaaaacccagggtgttttgactttgaaatttaaatatttatgtacctcacttttgataaagccaatatatgagaatctgaaatatacaaacagtaaattagtgaaactttttttgatgcttttataatatgacttaattttcttttagacttcatgtaacctcccatatactgttttacatgaatttaagtagagttcaaatgataagccaaagagtttgtaattgagcagtttataattgagcagttgtaattgagagtgataaagaaacaggattttaaaaaacttagtaactttaatttcttaagtgagagatgccacataaagtagcattgaatattattcatctttcgttttctttccttttttttttttttttttttttgaggtggagtttcgctctcgttgcccaggctggagttcaatggcgtgatctcagcccactgccccctccgcctcccaggttcaagcgattctcctgcctcagccacccaagtagctgggattacaggcgcctaccaccataattttttttgtatttttagtagagacagggtatcaccatgttggccaggctggttttgaactcctgacctcaggtgatctgcccacctcggcctcccaaagtactgggattataggcatgagccactgctcctggcctcatctttcataattatagattgaacaatgcttatgtcccatgcatagattagaaaattgacacagcacctttagtgtcagtttttgtcatggttgtgggaagtaaagtgattgttctgttctacaagtaggtgttatgaacattttcccccagctgagtgagatttttggctttttttttttttttttggacagggccttgctctcacccatactggagtgcagtggcacgatcatggctcactgcgtccttgaacctcccatgctcaagcaattctccaacttcagcctccccaagtcactgggaccacaggtgtgcgccaccatgcccagctattttttttttttttttcttgagacggggttttgctcttgtcgcccaggctggagtgcaatggcatgatctcggctcactgcaacctgtctcctgggttcaagcaattctcctgcctcagcctcccaagtagctgggattacaggcatgcacaaccacgcctggctaatttttttgtttttagtagagatggggtttcgtcatattggccaggctggtcttgaactcctgacctcaggtgatccacccgccttggcctcccaaagtgccaggattataggcatgagccactgtgcccggccctaatttttaaattttttgtagacatggggtctccgtatgttgcccaggctcatttcaaacttctaggctcaagtagtccttctaccttggcctcccaaagtgctgggattacgtggatgagccaccatgcccagccaatttttggctttctatagggttttttttttttaatttaatttttaatatttttaaatttaatttttaattttttttttgtttttttttttagagacagggtctttctgtgttgcccaggctagagttcagtggctatttactggcatgataatagcacattccagccttgaactcatgggcttgagcagtactcccatctcagcctcccaagtaactggagactataggcacataccattgcacctggcttctatgggtttttaacctgacaaatactgtgtgttcttctaatacatacatgtaagtaaacatggataatgagggctatgtgtgattattccatctaatgttatactagtctaagtgcaatggaagaaattagtgcaaagtattataaaaataacatccatctgttggaaaaaacagtgagcaaaaatgaaaaatatgaagagaaataggcaatgtaatatagtttccaaatctttataaatgaggctattgtagtgataatttttgaaaatgtgtgagttcattgaatacttataaattgactgaattgggccaagacacattctgcctctgtcctcatattaacttataatggaaggaagtatagttgacagtctcacgtatagacatactcccaacaattatgatatttttttctctttctttctaatatcatttgagggatttaggcaaaagacaaggataaccgggatagtggatatacttgaaaataggagaaacaatgaggaaatatgaattcttaatgttgttcatgtaggaagttcagtagttgctgacctcctttgatcgctttgatttttttttcctttacagaatatacattataaatgtaaatctattgtaaagcaaagaaaacaaaaatgaaaagcagtttatttaaactataataaagcaatcagaggccaggcatggtggctcacgcctgtaatcccagcactttgggaggctgaggtggttggatcacctgaagtcaggagttcgagaccagcctggccaacatggtgaaaccccgtctctactaaaaatacaaaaaattagctgggtgtggtagcaggcacctgtaattccagctacttgggaggctgaggcaggagaatcgcgtgaacctgggaggcagaggttgcagctagccgagatctcgccattgcactccagcctaggcaacgagcgaaattccatctcaaaaataaataaataaataaataaagcaaacagattgtattattggattatgtgcccacttgtacagtcagctgacagctttttacctgttactttagtagggaattacaggtcctcaggaagtttagagtataggtgtctttgctttgttgtataattggtgataataaccaaacatttgacatttgttctaattctcttaagttttctttctttctttctttttttttttgagacggagtctcactctgtcactcaggtgggagtgcagtagcacgagctcggctcactgccacctccacctcctaggttcaagctattctcctgcctcagcctcccgagtagctgggattacaggtgcctgccaccacgtccagctaatttttatatttttagtagagacagggttttgccatgttggccaggtggtctcaaactcttgacctcaggtgatctgcctgccttggcctcccaaagtgctgggattacaggcgtgagccaccacacctggccttcttttcacttaagttttaaggaaaacatttatgaaagtgaaatataagtgtgtgtttagtatgtgattggtgatagcagtatttttttttttgttaagaatactcacatggataatcaaatatagcatcaaaattatctcattgcaaacatttgtgttgggctcagtcctgaatttggacactgcagaattctggtagagatgaatgttacgcttaagattttttttttttttttgctttattttcactttggggttctgcaaaggatctctttttggcactctgtcattgcatactcagcatacagcaaaaaccaccaaaagtttagcttttcagaactttaggactacttaataccaatagagttttggaagttccttcatagaggttgtctgtgttgattggtaactgaagattacataattcttgctagtgcttggtaaatgcttggataggggaatgggggagtgaatagtctaatttcttataagttttggcgaaattaaaaggaagagcttaaaattaaatcatcctcagtttctttaacttgattttagcactgctctgtatttctgttagccagtgatgaaaaacaattgtctttctttttggtcatagatacattactagaagaaagcattctatattaaaggcttgtgtgtttctgtagcttctatggtttgcagcctactgagcttatgatactatgtgaataactaatccagatggttaaactattggaggatagaaaaccaaaacccatttcagaagctatgcattttgctcacctttggataggattcattctaattggtagtgactttctgaatttgtttcaaaatttaatttttaactacatgttttcttgatttttacctaggttacaagatgttcacctaagattgagacctagtgactacatttcctacgggaacaaataaatggtttttcatctcccggagatacattacaaacaaatatggtgctaaaagaactccttacctttctctgactacaatttatttggacatacttttgtattgaagagaggtatacatactgaagctacttgctgtactataggagactctgtcctgtaggatcatggaccatcctagtagggaaaaggatgaaagacaacggacaactaaacccatggcacaaaggagtgcacactgctctcgaccatctggctcctcatcgtcctctggggttcttatggtgggacccaacttcagggttggcaagaagataggatgtgggaacttcggagagctcagattaggtaagcacttggttatgtcagtgacttctactaacaacaatacctatgataagctttggtgtgtttcaagacaagccgtttatagttttacaagaaatttttcttaaggagaacctgttgttaagaaataatttgtgaaggggcactatagtcattatcaattatttgttatccaaggctcatctctctttatgtgtgtgcgatgggcttttaagttttctaccagttctgagattttctgatgaacatagagttgcatacagatatcagtaaaatgcagactctgatttaggatgtctgaggtggagccccaaattctgcatatttttacaaattccaggtgatgcagatgctgttggtcttttaagaaggacataaggccttggtttaattcagactctgcccctgaaaagaaaagagtaaatccttactcagtaatacccaggcttagtctgcaaggatatacagtacatcctgtttggagaaattttccaaaagataatttgtttgcgtttcttcctggagtttccagcattagaattaagttagaactccaaggagaagttaggcaattttatttcccaactaaggcaatggattttctatttcaattatgaatttatgggtgagatggaaaataatgacaaaattaatctgtctaaaaatgtgagattgggaagaaggtacattgggtatttatatatatatataaaatttttttttttttgagatggagtcttactctgtcgcccaggctggagtgcagtggcgcgatctcggctcactgcaagctctgcctcccgggttcatgccattctcctgcctcaacctcccaagtagctgggactacaggcatccgccaccacgcccggctaattttgtttttgtat

SEQ ID NO: 6815 - DNA, 6000 bp, Homo sapiens
tggctgtaaatgttgatggcaaagggaaggagaggtaggtatgtactttaaggaggaagggctgagggcattgatttgtgatgggcaagccccaaggaaaccatcattgcagcagcatcctgggtgagcctgtgtggcagtcatcttcctgaatgcataaggacattcccccagtctaccatgcccttccttcagcacaggtggctatgtccctccacccttctgccaagcaacatggacccactgaaggccccatcttgtgctcagcctctgcaggcttccagaatgggacaggtgcctgtcaggtgggaatttcctcgtagctccagctggcgatgctactgttttaactttgccacagttgtggacccagccttccctctgctaagccaattaatgaggccagtcgacacgattctatgaaagagttcctcctggcccttggggtcttgtgtgggatcattaggaaaagacatttcacataggcagatgaattttttatagcagaatcctatgtgcacagtagatttaaatctctcttatgctaaggaggggaatgtaccctgcctcaattttatagaattccttaccaactattgtcatcatgtagagtttgaaaagcaccaatggtaaggcattaaagggaccttatgcattttattaaagccctttatgtctcaggcattatatatgggtggatgggtgggagagagagcgagggagagagagagattcttctccctgaacactttctaacctggcctcacattaacgcagtgcccaggctgggggttgggtggggcctgaggcttccccgtggccagcatgatcgttggaaagagtagtatgggacaagatggggcttctcttgccacccagagcttgacagagagcccattatctccaaaatggtactgaatgatttgaaacaagaaaaaaagcttctaagatttttgatgttccttaaaggtatcttctctgaaggtatttttttaagcctcctctttggttgaatctcaaaaacgtttttagacaaaattccacttactggatcctctttggttgaatctcaaaaatgtttttcgacaaaaaaccacttactggataggcacagtggctcactcatcccagcactttgggaggccagagcagggggactgcatgaggccaggagtttgagaccaacctgggcaacagagccagaccccatctctaaaaaaaaaatgttttttaattagtcaggcaatgtggcatgagcctgtagtcccagctatgagggaggctgaggctggaggattggttgagcccaggatttcaaggctgaagtgagccatgattgcaccactgcattccagccagggcagtggaataagactctttctcgtatgtaaaaaaccaattccacttatgtttcctattttttgttttcttccattggctgtttttttgtataaactgtagacagaagcaaagtggctctcatttataaatgaatttgctgattcccacagaggaaccttatcttgtctgaccagtgcccaaatttcttcccctgcaaacaaactgacgcaaagaaaacactctgccaaagagccaggcaggaaaagactgtggtgcttggccctgtagggggaccttgtataatgcgtgtgtggcttccgaggagttgctcgggggcagaggctgaggttgggaatgccaagatgaggcttttcctctagcagggccagatgcctttcaagagcattcggtggaccgagagggaatcaggagcaggggcaggtgtgtcttcctcctcatgccaacaccatactgctgaggacagaccctctctcagcccacactctgcatgcaacagatatgccccttgccccccagatgcccgcaggaggcctttgtgcacagtcaccaagtgcaaggagcactccaaggcttaaagcacctagtcacctggcaggtgacctcaggaagagccatcctctctggccaagtacctgcaccattgggcaaagggctcctgtgtctcttatccactccatttatgatctgtcagccagtgagaaagacgaggatagcaaacacattccgccagctctggatggaacgtgcctttcagaagcgggaggccctccagccgcagtggttcttaggtctcacagaaccacgggatggcttttaaaggaagtgtcctgtgtgtcgaatctttcagctgaaagtggacaaagtagcgggcagttccaagggcggccctcggaagtctggtcgcagtggcaaagccagcaccatggccagcagagcggtgagcagcactcccaccagcagcccggtcagactgaagtgttccaggtaaatcgagcgagcaccgccttctcgtaggtaccggcgccttctctctgcttcctttccccctcggtctctgccgcaccaccgcctgcccgatagccgtcgtgagttctggcccagcctgggctcgagggagtccaggagtagaaagccccatcctacccagccagaaacgtcaggtgcatgtgggaaggagaaggggctgatgtagccttcgagctaagccacacaatagaggaggctgcagttggagatgcttcccagactccagagctatccagggtagaggcacaaaaccaaggccaaagggggtctctcctaagagctgcaggcacccccaggcttggctgtctgtcactggctgaccctctttcttcccaccgtagcccccaggatgtggaggacatccccacccaggcccttgctcagtgccagccttgccctggctctgctctcctctgtggttaagctcagggagagtccccgattgaggatacctgggcaccttgaaactctccattatttgagacctttctagaccatccctcgtgtctaaggcagactgtgtggctggggatggcactgctgcagccccacagagcaggcccctgccctttgtgggcttccttggctcaactttcagccagaaacattcctactggaaggcttcaaatggaggtacgagcccattaactccccttcagccatccctccaggtccttctaacaggaacccaggcacgtcctgcatgccccaggcctgccctgcaaagcaatgataggggcaggaaccacatcgtgggagggttctgagactcccaggattgcaacccctccttctcaagaatcagtgctccatataccccaccctcatcccaagcccctctcctgccggggtcagctgtgtcttcacagacaaaggcctgggactcagatgtcactcagggcagcattctgtgaatgtacaggggaacggctcacccaggccttcgcctgcctcccctgactgcagccatctcctccttcctccttctgtaaggccttgttccttgcccattctgaggccccacagcaaccctgtaaggcagaatttcctgacatggatcttcatggtcacgatgctaaaaagaattcttggccaaataagcttacgaaaaactggttaaacaaagttattgagtttctttattgcaggacgtatcagagcttttattacaccaataaggactggatttctaggaggtaggcaaagtgtgccttgtttcccaaacttatttgtccacagaattcttttctcacagagtatcacatgggctgagaattcaacagaacacatgttggggaattggctgtaagaaactaaaatagtgctattcccgttttctggatgggtcatctgaggcccagaggactggaaagacatgttgaaactgaaatctaaccattcagggattcgtccctgcgctaagataaacatggaagacaggccagccaggtctccacatacatcttccttccactccactctgcgttgcatttctcttatattttggccatctgctatctgttaggtgcaccttgcttggggccagcctggggtctccccgccagtggggttctcgtctaccctgggtccctgactcaaccttagatagacaaagggcatgtcctaatgccgtttacctgctgtcacaacagctccctggggagaacagtttccccgggtctcagacatttgaggacccttgcagagcatcccgcagaaggctggggaggacctctgggctgcccctttagggatggccatgagggtgagtgcagactgggctcctgggacatgcccagtgcacggacagaggagctgactcccctgtggctctcttttcctctcctctgcaggacatgctgcccatgccaggagatccaacccaggggactggcaactataacatcgaagactttgccgacctgggcatgtttccaccgttttctgagtagctgcggccagagtgaggctcctgctgtacagtgccacccatactgtgatgtcgatgcccatgtgaatgaggcccaccctcgccctgcttgccctgccgcaggccccccaccagaagccatctcccccgctgtgtgtccccaggcgcatcattgctccactctcccctgcagccgcggctgctcggccactgaccaggggccctggcagacattaggggatcagttgtatttattgtattttatctgtgtgtgctcaggaggtgagcctagtgggtccttaagtttggttgtgaataatctcttgatagacaatttatacccatgaaagttcagccaatgcccagagtgaccaagcagcaccagcaggcctgcccaggatgctgaaagcagatttcttcttgatttcacttctgatggatgcatggggctctgggggaatgctgggaaaatgggcaagcagagtgcacagccctcgttctgccagctggagccaagaagcacagagacacagaggcgcctgcccctcagctccgctggtctgtctgtgcatccactgtgccgtgggacatatgtaatttgtgcagtgtgacatggacttgctgtcctaatggatgtgttgtgccttgtgtctgtcatgtgtggccagcgtgattgtatagaatccagagtatgtagagagccaaaatgtgtggccctgtccccaagctcagcaccaccggccatgaccagaggttgctcggcccagggtctgggagctgggctaacaggctgacacttcggcagggtcaccaggaggcacagctaggggcatgctcacatgggtaggtcagttctttggtccaagcctctggtgcagattcaagctcctcctcttagaggaagcagctccttcctcccacaggagccccaagggagcactcaccctcctcccaattggatctgaatagctgtgttcctgatcccacataagcatgtctcatccttgccccactggtgagaggaggaccttgtgcctgcccagagcctgcaggacagcacgccttgaggtcagaggcctggcccttctttacagatgtagatagcagggtaggacgcccaggccttctcacatgggcaccatgaaacactttcttccaggccacctgagccttcgttcttcagcccgactggaggaacagcagctctgggaggcacagagtgcaggtctcaggggcagaagacatgggttccagttctggttctgccacacacccaccggccttgaatttctctggtggtctcaagacaagaacaagagctgactctagaatcttctgcctggctgacctctgagcccatgatccctggcttgctgtgcttctcttggatttgaggagagtttatgaatccatccccctgttttcagggacctctgccttctcccacaccccttacactagtgaggactccttcggcctcttgtgtttccttccttttgtgaccattacgccccctccctgtttcttatcaccagcccatcagcccactgactcccatatggtagaaaaggtaccgtggctgctgcagggcacatggagggacctaccctctgggaaagcccttgtgtccctcccagagtccttcaggtaggccctcgcagatgctgcttgctcagaaacaa

SEQ ID NO: 6816 - DNA, 6000 bp, Homo sapiens
gttagttaatgtctaaaatacatacagaaacttttaaatatatgaaagggaacttttaagtgtacaagaaaaacacttaaggtgctcctggataaaggattttaacaggaaatataaaaaacagagaaatgtttatatattatagacatcagtgaaatgcaaattacatcatagtatttatataactaaattgcaaaaatgtttaaaataatacctattgctaaggttgaagttgaatgaaactaatatgctctttgttgtgtttaaacattaaaaattattactcgtttcagaacagggtatggattaaggtttataaaaatgttcttcaaatcaataatctcttatttattaatctaagagtataattcagtacaaggaaagtcttccaagttggaaggtcctccttatagcttataactataattagtagcagcaccactattcaacagcagagaaatgattaaataaattgaagtaagtcaataaaatagtattatgtggttattttagaacataaagatcataatataggggataaatagaagaagtagaatgacaactgtgtttttagttatgagataaattatttaatctttggctattaaattattttgatttgattattgtttaggaaatattttctttgctaatctccagcataaccttggctaataggctttcttccaacattgggccaattgtcactgtaatttttctctagcttgaactatttatttttaagtatcttcaagtcagatttcatatacattgtatcttggagttggtgttgtagatataaatagttgagaatgaagaaaatgctactgaatcaagaaataagtagatagaatttgagaagtgagctctttaatgattctgtattataacagaatgtcagtgaataagttattttatatgaagttttgattttttttaaaactctggatcacaggttctgggttttaattttcctctatcactagttagcaaacttgacaaattaccttagcatctttaagtagcttcttaatttgagaaggtttgattagatattatgattattataataggtctcttcttgtgttgtactcattaatgttattatgaggttaatgttattattaggcttttaacaatatgactgtgtacacatgactacatagattatcagagctgggagggatatcaagaagctgtgtggcctgtttttacattttttatttctttttgctttttgttttgttttttcatatttgtaggggttgtgaagtccctagaaaacagagaatccagttgtaagaaacatggctttaaagttgaacattaccactttaggtgatcacttagtgtcagtgtagttgtaaatgctgatgtaagtatggcccataaatttgtgtgagaggaggcttttataagattgtcatctagatcataattaatttttaaatattttcattacaaactcatgaaatttagagattgttaaagacatatcatcatcgttgttatctgtggatcccaatttgataaacattagttcacttctctatcttaaagcattagcttctttctctgacatctttgttgttttattgtctttgctgaatctctgccttttgcagtaaccttttcctttttagggcaattctaattgtcaggcattgattttagttttatctctagtcacactaaatttaattcctttcccccaagcagagtagcctaatctacagttaattgagacccccttgtgatgaacttttgcttactataaaattacttacattagaaactgcgtttattacatagggggaaaatctgcctaaaatttacatgtgtgttaaatttctcagtatgtgcttctgacaaaataagaaatttggcaggctgctttgttctcctctagaggctacaaaattcagaaatagctttttaatatattacagtgcatcacaattctgaggtttttctgtctgctcattttaaaacatacagaagtgaagctgcagaaagctttagatgggcctgttccagggttccttgttactgttccgtatggtacatatacagtaatacattaaagcagtttctgtctttaggcctttgggccatagaccaggtctggcttatcaaaaagtggtggaggaaagcagccaatgagactttttcctcaggccactcaatagtcttatactaagctgtgagttcctagctattttgttttatcacatgaagtatccctgaagatattagcttaagattccataaatattatctgttttcttccccttcaccctttgtccaagcccttgtttcatacctggattatttcctttgccaacccaagactgagattagagcccccttctttgagcaccatatagcactgtgtgtgcttaaggcagtattgtaattgttgatttacttgactattgtcccatctttgtatctgactccagctctcacatagtgcctcacatatagcaggcactcagtaaagatgggctcagcatgataggtgtaagttagaacccaggcaaatttatgtttttgctctggaagtcaagtaggttagttgtattaaggttgatgtttagctctcatcacaatttgcatgttagtggtaaagggcagctaaaaaaaaagcagtagtcatacttcatgtctctctgtgaaaaatggaggaggtgtggagtagggatatgcattttaagtaataatttctagtgagtttatttctttcattactctaatatttatatttttaccttaatttttggtaaactgctctagttcaaataagtatgatttaaattcttgcagaaacacttgttctaaataacagaataccaggaactgtaaataatagttttaataactataattatgggggggttggtttttttgtttttgagacagagtcttgctctgtcgcccaggctggagtgcagtggcacaatctcagctctctgcaacctccacaccccgggttcaagcgattctcttgtctcagcctccagggtagctgggattccagacacctgccaccacaaccgactaatttttgtatttttagtagagacggggtttcaccatattggccgttctggtttcaaactcctgacctctgacctcaagtgatccacccaactcggcctcccaaagtgctgggattacaggcatgagccaccatgcccagccaaattatgtgttttatttataaaataatttaagcaagtgtttcacctggttgttccattagtaaatgaaagattttatttcactgagtctgggacttcccaaatagcttaatattatattagtcttgatggttctttattagaaccagaatggttcaagaaagcctgaaggcaggttcttttttttttttttttttttttttttgtgagacagtctctgttgcccaggctggagtgcagtggggcaatcttggctcactgcagcctccacctcccaggttcacatgactcttaagcctcaacctctggagtagctggagttacagatgtgcaccaccacacccagctaatgtttgttttttgttttttttgtttttttttagtagagacagggtttcgccatattggccaggctggcctggaactcctgaccttaagtgtttcgcctgccttggcctcccaaagtgttgggatttcaagagtgagccactgtgcccagtctgaaggggggcttctcggctgttgacttatgctggaactcagtacagagactatttcatctaattaatattcctgtttaaattcttttagaccaaccttatacggacagtatggggttgcatcgacatcttaaatcagtaattgctaagctctaatctgaattttttttgtttttacttatagcaaaaatattttgattctggggattacaacatggctaaagcaaaaatgaagaacaagcaacttcctactgcagctccggataagacggaggtcactggtgaccacattcccactccgcaagaccttcctcaacggaagccgtcccttgttgctagcaagctggctggctgattaagaggctgaactgcatgaatctgctaaatctcattatttctccttaatatgttacttatctactttttatttcctttcattcactagtcatttgagactgacagctttgcaggtagcagtagtgtgtgctgctattgtggaatatacgtgtgtagagtttttgattagtttaacagtgcactggtgaagaggacatgttagagcaacataagtaaactacttgaaaatagttgtatatattacctaacttctagtgtagtactggttctaacaagtaacaagcaagttttaaaattttaatgttttggctttcattacttcatcttaattatagctttgtatgttactcttatttaatataatctctattgtattgatttcttctgtatttaccttttggattttgtaaaacagaagtttaagaccacaagttagaagaaaggtcacatatttcaaacacaactagatggggctctgaaagatttgtatctctgtgcttgaacttgaatggccttaaacctgtttcagctttaacagtagaattttacttgggcaatatttgcccattctggtgtaacttatgtgactctagtgcttaacagctgccgttgaagctaatattcagttctgtagagttagaataccttttgttgttgaagatgtgaatgaagtatgcatgtgcattaactgttgaattcacttttgtgccatttttgtaaatacagtagttttgcacaacctctcacaaatgtctgtattaatttcacatacttaaaaagtagataatgtgccaaccagaagcacaagagttcctacacaaaactctgtaaatcattatagcttttgtataataagagtagtttacaatctcgggcttatagaataccaaactgaaatcttagttcaatctgccatagacttaagcttttcatttgttactaatatccatgacattcagtggccttgtgcaaatacgatatgttgcttaggcatatcttttgtcctatgcagaacctttcattttgatttttatgaaagttgcaattcatgtaatttatataaactttttaaatgtagaaactttttacttccacactcagttttggagaccctagaataaaaggcttcaatactctgcattccatgccctctgccacctgcttttttttcccctttgttctttgactcaaatggtattgagctgtttgttgtatatggaagcataggtgtctatatccttactcttttatataacacaataatggcgttttccttctaatttctcagttgttaacttctttctcttttttttttaggatagggccttgctctgtcacctgagctctagtgcagtagtgcaatcacagctcactgcaaccttactcctaggctcaagttaactattcttgatcctttattattactaatattctacaattgtttaaataaaaggaactttataatgaaacggttcggaatactggctcaagaacctatgtcaagatgagctgaattttggtaaattattttaggaattatgacaagctaattgaattaggcttgtgacaattagagtaatttacatgacaggtaaaactcctattaaaaatgtttagatgtttgcttctgtagatgtcactttagtaaaataccaatttagttttacttgtggcttatctagttagaacttagcagactttactgggacaagtttactgctcttgtaggagctcctctcacaagtagttgtaatgctgtagcatgatactcaggatcagtagcttgagatgctactatttttctcttcatctttgacttgcagagagcctcccgtttttggatccaggcatcttttctgaatcctggttccatcagtatacctgctctcctatgaccccaaatcatagtcaatggtgcctcaaacatagcaccttaagtt

SEQ ID NO: 6817 - DNA, 6000 bp, Homo sapiens
attagaggtgcgttgagttaattcagttttccttaatgctgaatggctgagcatctatgtttggctgtgattgaggctgatgctgaatcattgaatgaaaatatgacattctaacaaaaataggtattgttcttatgttatttttatttattaggattcctcacattgtaaagttaaactctaagtcagaaacagttgtatctagaccttgcccgctgctagatactcctgtgcttaccatgctgcaatttattatactaaatatagacatttgtttgcaactgagtttggtggaggaatgaactacgttggttttgttaattatgtctgcattggtgatgatttactacagatgttatggtgtgatatgggaggttttttcccctgtgaatttttgaggtggcacagttgataaacttggcaactaatttgtccttataaagatatgaaggattccaaataagactttttcttgaaagatgcatggtctaaacagaaacaggtagaaaaatttaaaatcctaaagattgtttattgttgtgaaggccagcataccaaacaattccacaaagacataatttataatatacactaataatctcttttattctgttttatagtagtatttatggttctgtacatatcttggctcagaaagaatatgacagtctttgtaaaagtagcaagcaaatgttttgcctcttttttggggtggggggatggagtctggcactgtcacgtgggctgcagtgcagtggtgcaatctcggcccactacgacctccatctcctgggttcacgcgattctcctgcctcagcctcccaagtagctaggattataggcacacgccaccacgcctggctaattttttgtatttttagtagatacggggtttcactgtgttggccagactggtctcgaactcgtgacctcgtgatccgcccatctcggcctcccaaagtgttgtctcttaatatttgtattatttcctcacttcctattaaatgtaactatttgttaaagttcttgataattgatttgcacacaaattttgcatataaaattaatagcttttaccatatggtcaaagattactgcacatttcattcttgcaataatatttatatttatacaccatctgactgggagagttcaaaatacatcatacatacaaggagctttttaatctgagtacatctagaatgcagatttacatttgaaagtgaacatgcggacttgagcaataagttcatgtggcatggcttatttgtagtattgatgttgttatgctgtagacgtagagatggtggtgacctgagtatcgtaaggccattgatcatgcacaagttcagggatgccagaaatgatcttgcaataggtatttgactgtttgtcctttcaaaggccaaggcattcatttagaagccatggccaaataataggttttgggcaaatagtgtagctgaagctgaactttgatgggtccctgataaatatgtttgcatatatgattctgtatcctgctccattaacttactcttagcattttcctataacattatctttgaaatcatgatatttaaaggttaagtaatttttatctgggagtattccataagttatgagcttttctctttatgtcagacttgttagttcatttggtttctgttcaacttccaactgcctttggacagtcaacatgcatcttggtcattcatttctttcccctacctttcatatcctcagccactgtgaagaggtctctgcagtcattgagaactggcctcttcccttttatacaggaaggtccctcaggtatctgaagacagttttatccctccttctgcctcaaggactctccaggccaacaagttgtgtctcactagcaggtcctcctcagtgaacccttcaccatcccatggttctttctcgtatttttgaatgtggagaatcagagctttgaaccctcctgtgtactcttccaccagcaacccatgccttgcactttctccttcagggtctgtcttactgcacagggctcctgattccctagactcaggtcttggtaggccagagtctaggttttggctgagactccttctaagacctcattagggacattcagttcactgacggacaccaatccttccaacctagatgttctgggctggcttctgtgtgattgatgacacacactttcttctgatggtctgcggcttctaggtttgactcaagcatgagacaagtcatgggtggatgtctcattgcagttagacctgtggggtcatctcgcacagagtggggcaggttgaatgggtcactcatccttgttgtcttgctccagaatcatatccttgacagcagcctctccacttttcttccattggaattactggttacccatcttcttgctgggtctgttttatttttactccttttacaaatttcagcacagagattacaggacttcagcccacagggtggagaaggaagctggagttagtgggttcggacactagtgggaacatggggagtgacaccatagtgtgctgtagtgcagtgcccctgttccagaggagagccagagctctacctgagccagcactgttagctgaggtgggagggcatctccccgggctgccttgggactggtttcaattccctaatgccaaaacctgcctgcctactagaaggggctcaggcaggcatccagggctcggtatccaggctggaagcaccagccagaggagacaggacctggcctcttcttgctttcccaggtccagtggccatcctcttctctattgcagagaccttggcccagcctgctgatcagaaaagaatgtcttacagaggatctcacggctggttaaagccgagcatggatctgcagtcagagttctctgattctcagtctaatgattttctgtacattgtgctataaaaatgctaccccatggaggccctttgggaatcatgtgccctgtcttcattccagaagtaagagggaccctcccttgcttggacttcaagaaaaatcctttattatctctcactaaaatgtttggataagaatctagatttttcaaatatgcatttgttatggtttcataggaaatccaagtaaccgatttttcagaacctaagcagttaatgctagaaattttgctgcaaataaattgatcagtatgcaagacagttgtcacggctgaatcatggtccacagttaaggtaaacagatctgtgatgacattttctcagcagaatacaaatgcagctacatttcctcccagaggtttctgacatttcttctacacggataacagattctcctaagaaggtgttggtcacaaggaagaaagatctttgtttaatccctctgaaaaggtagggctgtgatatttgatgtgctttctgtgaagagaattgttctaagagagatgaatattgagaagagcgtttttctttggttagttgcctgccctcacccccctcccagccatggaaagagccttttggtttttcatttatttgaatggccattaaaatattgtgtgttgtcatgttgtgaaagtttgcatgtaattgattttttcccaatgtaaagatcaggggatatttttcttacttggattcacatgaaatgtagggagagcaagatgtctttttttccatttcctcctgttcctttcatctgtaatgctctcaagttccacgttttttccaggttttcgctgcctacactgtattataggaattctacacagtacgtctgcatctgaaatgtgaaatagtctgtagctagatgctgcattataagccagatatgttttctgtgttacggtgaaccttacaaaatctttagcttgtactgatttttaaatgagctccaaacctcattccaactttgcctaagagcagacagtcatttcccctctgtgtgtaatgggaaacaatttcctgaggggatatttgcatttggagtcagactgctgcgaatacagatatttctgtctatttgtgcatttgccatcggttatgatcagggatctgagcagagatctagacaagagcgttgcatttgagtgggggaataactctcgatctgtagggagttgcagttgggataaaagaccagaaatctccagggactggaaatgaacaagaaagcatacccctcagagggggctaaatgactctgctcagaaattctggagcagtcaaaggaacgctttttaggaaacggcatctttcccatcgtacttcgttcctcccagagcattttttgcagtccattgccaggttagcataggggtggtgtcctccaggaagccttctcagatcttcccagccttccccaccacatggtatccagcatccctcacagcatgcatttctcagtgtgaaattactaggctctgtgcctccatcacacttaagctgaacttgtcagaggcaggattgggtcctttcatctctgaccatcgttcagcttctagcacagcccctggctcaaaagaagagctttgcaaatgctgcttataattgaaacagagaccactttctcacagcaacctctgcaaaaggaaataatgtcctgataaactccatgtcttagctgaggagaaactgaggaaaatagtgatgaagccagagctagaagtaggctgctactgaatgtgtggccccctgattcaatgaaccgaggaatgtgtgagcacttgtacctctactttgctgcgaaagtcctcctgtattgagcatgtgtggcatggtagttgtaaatatgcaactggcccaatcatatttttcttctgtctctaaaattttttttgccctatacagtgtaggaggatcaggtgaccaaggttttttagaattttccctttttgggatctgacgccgacacactattttgaggcagtgacatcatctctttcctctggcgtgccctccttgcggctccatcattcaggccttgtcatctctcacctggactgctgtgaccttcattcattcccaggagaagtccaggtacagtaagaatgaatcaccagggaccagacctggactgggtaggggaggggttgttcagagacaggcctccttgaggagtgatatttgagcaaaatctaaatgactgtaaggaactaatgaggtgaagagagagaggagagctttcttgccagaggacatagcatatgcaaaggtcctggggtcagaacggaacatagtgtgttcaagaaactgataaggcagcatggctgcagccagagaggtaggctggagaggtaggcagtggcctgatcacacaagaacaagttgatgatggcagggaactccaggtttgggctaagaggaaagaaaatgtgttagaagacagaggcaagggctggccttgtctgatgtggcttccgagtgtggaatgagtgggaaggacaagagtggaatgcaggaaggtcaggggcgtcctgaggcaggccagcagcagagcccagaagatggagagacctctcggaggtagcagcagggcttgctattggattggagaagcagcagcggaggcagcgctgctgccaggcacctggatgagttcacctaggaggacacatatgataggaggctgcacaagatgccctgaggtctggaagaggaggaagaacaggcagaggaggcctaggaagaggggcctgaggcaggaggtgaaggacgtggtcctggaaaaccaggcgaaaatgcttgagacagagcagggggccacatccccatagaaggtcaggggcagaagagccactgtttgccttcacaagagtggccttgtgacgatggcagctctctagtggggtgacagacgagagaaggttgaaggaagcatgggaggcgaggaaccagcaaggggaagcagctctttggtggttttgcttcatgaaggggagcggattacttttccttgtgtaatggaaaattcggccttggcttttgagattgatttgaattttg

SEQ ID NO: 6818 - DNA, 6000 bp, Homo sapiens
gtatcttcaagtcagatttcatatacattgtatcttggagttggtgttgtagatataaatagttgagaatgaagaaaatgctactgaatcaagaaataagtagatagaatttgagaagtgagctctttaatgattctgtattataacagaatgtcagtgaataagttattttatatgaagttttgattttttttaaaactctggatcacaggttctgggttttaattttcctctatcactagttagcaaacttgacaaattaccttagcatctttaagtagcttcttaatttgagaaggtttgattagatattatgattattataataggtctcttcttgtgttgtactcattaatgttattatgaggttaatgttattattaggcttttaacaatatgactgtgtacacatgactacatagattatcagagctgggagggatatcaagaagctgtgtggcctgtttttacattttttatttctttttgctttttgttttgttttttcatatttgtaggggttgtgaagtccctagaaaacagagaatccagttgtaagaaacatggctttaaagttgaacattaccactttaggtgatcacttagtgtcagtgtagttgtaaatgctgatgtaagtatggcccataaatttgtgtgagaggaggcttttataagattgtcatctagatcataattaatttttaaatattttcattacaaactcatgaaatttagagattgttaaagacatatcatcatcgttgttatctgtggatcccaatttgataaacattagttcacttctctatcttaaagcattagcttctttctctgacatctttgttgttttattgtctttgctgaatctctgccttttgcagtaaccttttcctttttagggcaattctaattgtcaggcattgattttagttttatctctagtcacactaaatttaattcctttcccccaagcagagtagcctaatctacagttaattgagacccccttgtgatgaacttttgcttactataaaattacttacattagaaactgcgtttattacatagggggaaaatctgcctaaaatttacatgtgtgttaaatttctcagtatgtgcttctgacaaaataagaaatttggcaggctgctttgttctcctctagaggctacaaaattcagaaatagctttttaatatattacagtgcatcacaattctgaggtttttctgtctgctcattttaaaacatacagaagtgaagctgcagaaagctttagatgggcctgttccagggttccttgttactgttccgtatggtacatatacagtaatacattaaagcagtttctgtctttaggcctttgggccatagaccaggtctggcttatcaaaaagtggtggaggaaagcagccaatgagactttttcctcaggccactcaatagtcttatactaagctgtgagttcctagctattttgttttatcacatgaagtatccctgaagatattagcttaagattccataaatattatctgttttcttccccttcaccctttgtccaagcccttgtttcatacctggattatttcctttgccaacccaagactgagattagagcccccttctttgagcaccatatagcactgtgtgtgcttaaggcagtattgtaattgttgatttacttgactattgtcccatctttgtatctgactccagctctcacatagtgcctcacatatagcaggcactcagtaaagatgggctcagcatgataggtgtaagttagaacccaggcaaatttatgtttttgctctggaagtcaagtaggttagttgtattaaggttgatgtttagctctcatcacaatttgcatgttagtggtaaagggcagctaaaaaaaaagcagtagtcatacttcatgtctctctgtgaaaaatggaggaggtgtggagtagggatatgcattttaagtaataatttctagtgagtttatttctttcattactctaatatttatatttttaccttaatttttggtaaactgctctagttcaaataagtatgatttaaattcttgcagaaacacttgttctaaataacagaataccaggaactgtaaataatagttttaataactataattatgggggggttggtttttttgtttttgagacagagtcttgctctgtcgcccaggctggagtgcagtggcacaatctcagctctctgcaacctccacaccccgggttcaagcgattctcttgtctcagcctccagggtagctgggattccagacacctgccaccacaaccgactaatttttgtatttttagtagagacggggtttcaccatattggccgttctggtttcaaactcctgacctctgacctcaagtgatccacccaactcggcctcccaaagtgctgggattacaggcatgagccaccatgcccagccaaattatgtgttttatttataaaataatttaagcaagtgtttcacctggttgttccattagtaaatgaaagattttatttcactgagtctgggacttcccaaatagcttaatattatattagtcttgatggttctttattagaaccagaatggttcaagaaagcctgaaggcaggttcttttttttttttttttttttttttttgtgagacagtctctgttgcccaggctggagtgcagtggggcaatcttggctcactgcagcctccacctcccaggttcacatgactcttaagcctcaacctctggagtagctggagttacagatgtgcaccaccacacccagctaatgtttgttttttgttttttttgtttttttttagtagagacagggtttcgccatattggccaggctggcctggaactcctgaccttaagtgtttcgcctgccttggcctcccaaagtgttgggatttcaagagtgagccactgtgcccagtctgaaggggggcttctcggctgttgacttatgctggaactcagtacagagactatttcatctaattaatattcctgtttaaattcttttagaccaaccttatacggacagtatggggttgcatcgacatcttaaatcagtaattgctaagctctaatctgaattttttttgtttttacttatagcaaaaatattttgattctggggattacaacatggctaaagcaaaaatgaagaacaagcaacttcctactgcagctccggataagacggaggtcactggtgaccacattcccactccgcaagaccttcctcaacggaagccgtcccttgttgctagcaagctggctggctgattaagaggctgaactgcatgaatctgctaaatctcattatttctccttaatatgttacttatctactttttatttcctttcattcactagtcatttgagactgacagctttgcaggtagcagtagtgtgtgctgctattgtggaatatacgtgtgtagagtttttgattagtttaacagtgcactggtgaagaggacatgttagagcaacataagtaaactacttgaaaatagttgtatatattacctaacttctagtgtagtactggttctaacaagtaacaagcaagttttaaaattttaatgttttggctttcattacttcatcttaattatagctttgtatgttactcttatttaatataatctctattgtattgatttcttctgtatttaccttttggattttgtaaaacagaagtttaagaccacaagttagaagaaaggtcacatatttcaaacacaactagatggggctctgaaagatttgtatctctgtgcttgaacttgaatggccttaaacctgtttcagctttaacagtagaattttacttgggcaatatttgcccattctggtgtaacttatgtgactctagtgcttaacagctgccgttgaagctaatattcagttctgtagagttagaataccttttgttgttgaagatgtgaatgaagtatgcatgtgcattaactgttgaattcacttttgtgccatttttgtaaatacagtagttttgcacaacctctcacaaatgtctgtattaatttcacatacttaaaaagtagataatgtgccaaccagaagcacaagagttcctacacaaaactctgtaaatcattatagcttttgtataataagagtagtttacaatctcgggcttatagaataccaaactgaaatcttagttcaatctgccatagacttaagcttttcatttgttactaatatccatgacattcagtggccttgtgcaaatacgatatgttgcttaggcatatcttttgtcctatgcagaacctttcattttgatttttatgaaagttgcaattcatgtaatttatataaactttttaaatgtagaaactttttacttccacactcagttttggagaccctagaataaaaggcttcaatactctgcattccatgccctctgccacctgcttttttttcccctttgttctttgactcaaatggtattgagctgtttgttgtatatggaagcataggtgtctatatccttactcttttatataacacaataatggcgttttccttctaatttctcagttgttaacttctttctcttttttttttaggatagggccttgctctgtcacctgagctctagtgcagtagtgcaatcacagctcactgcaaccttactcctaggctcaagttaactattcttgatcctttattattactaatattctacaattgtttaaataaaaggaactttataatgaaacggttcggaatactggctcaagaacctatgtcaagatgagctgaattttggtaaattattttaggaattatgacaagctaattgaattaggcttgtgacaattagagtaatttacatgacaggtaaaactcctattaaaaatgtttagatgtttgcttctgtagatgtcactttagtaaaataccaatttagttttacttgtggcttatctagttagaacttagcagactttactgggacaagtttactgctcttgtaggagctcctctcacaagtagttgtaatgctgtagcatgatactcaggatcagtagcttgagatgctactatttttctcttcatctttgacttgcagagagcctcccgtttttggatccaggcatcttttctgaatcctggttccatcagtatacctgctctcctatgaccccaaatcatagtcaatggtgcctcaaacatagcaccttaagttaaaggctgcctagtgctctgaggaaagcttgctgattatcttcctgatctactcaccccaaaaggcagaaaagcaacacagtcactgctgtggtcatttgtaatgtaaagatcagttatatatatatatttgtaatgagagcaagtatatactcattatagaatcaatttaagaagtttaaaataacccagagtagaatttctatatctagtcttggtttttttcatgaatatttgcaagtaattaccattaaattcacacatgaaagattaatctgaaagatcagagaccatgttattcctgaccacgatagaactgctcctgtggtttgggacaagtaataaaacaactgcttgagttttgtttgtaaaatacataattaatatttgacctacctcaaaatgtattgaggatctgtgaaatgctaagtgcccaaaataaaatattgctgattgtctttttattaaaagtaaatttcctcattaagccaacctgccttctgtaagtcacagtgcttaaatctcaggatttttcattaggagagacctgtcgttaaggatttgtaggtataattgcttagcctccattattggtgcttgggatagagaggttttagatttttgttttttttttgttctgcctcaaagctcagtttattgaagacatttgtaagctattggatcatcacttgaatcaagattttgactagtgagcttaattgtccatttcttacaatttcaaagt

SEQ ID NO: 6819 - DNA, 6000 bp, Homo sapiens
aagggctcctgtgtctcttatccactccatttatgatctgtcagccagtgagaaagacgaggatagcaaacacattccgccagctctggatggaacgtgcctttcagaagcgggaggccctccagccgcagtggttcttaggtctcacagaaccacgggatggcttttaaaggaagtgtcctgtgtgtcgaatctttcagctgaaagtggacaaagtagcgggcagttccaagggcggccctcggaagtctggtcgcagtggcaaagccagcaccatggccagcagagcggtgagcagcactcccaccagcagcccggtcagactgaagtgttccaggtaaatcgagcgagcaccgccttctcgtaggtaccggcgccttctctctgcttcctttccccctcggtctctgccgcaccaccgcctgcccgatagccgtcgtgagttctggcccagcctgggctcgagggagtccaggagtagaaagccccatcctacccagccagaaacgtcaggtgcatgtgggaaggagaaggggctgatgtagccttcgagctaagccacacaatagaggaggctgcagttggagatgcttcccagactccagagctatccagggtagaggcacaaaaccaaggccaaagggggtctctcctaagagctgcaggcacccccaggcttggctgtctgtcactggctgaccctctttcttcccaccgtagcccccaggatgtggaggacatccccacccaggcccttgctcagtgccagccttgccctggctctgctctcctctgtggttaagctcagggagagtccccgattgaggatacctgggcaccttgaaactctccattatttgagacctttctagaccatccctcgtgtctaaggcagactgtgtggctggggatggcactgctgcagccccacagagcaggcccctgccctttgtgggcttccttggctcaactttcagccagaaacattcctactggaaggcttcaaatggaggtacgagcccattaactccccttcagccatccctccaggtccttctaacaggaacccaggcacgtcctgcatgccccaggcctgccctgcaaagcaatgataggggcaggaaccacatcgtgggagggttctgagactcccaggattgcaacccctccttctcaagaatcagtgctccatataccccaccctcatcccaagcccctctcctgccggggtcagctgtgtcttcacagacaaaggcctgggactcagatgtcactcagggcagcattctgtgaatgtacaggggaacggctcacccaggccttcgcctgcctcccctgactgcagccatctcctccttcctccttctgtaaggccttgttccttgcccattctgaggccccacagcaaccctgtaaggcagaatttcctgacatggatcttcatggtcacgatgctaaaaagaattcttggccaaataagcttacgaaaaactggttaaacaaagttattgagtttctttattgcaggacgtatcagagcttttattacaccaataaggactggatttctaggaggtaggcaaagtgtgccttgtttcccaaacttatttgtccacagaattcttttctcacagagtatcacatgggctgagaattcaacagaacacatgttggggaattggctgtaagaaactaaaatagtgctattcccgttttctggatgggtcatctgaggcccagaggactggaaagacatgttgaaactgaaatctaaccattcagggattcgtccctgcgctaagataaacatggaagacaggccagccaggtctccacatacatcttccttccactccactctgcgttgcatttctcttatattttggccatctgctatctgttaggtgcaccttgcttggggccagcctggggtctccccgccagtggggttctcgtctaccctgggtccctgactcaaccttagatagacaaagggcatgtcctaatgccgtttacctgctgtcacaacagctccctggggagaacagtttccccgggtctcagacatttgaggacccttgcagagcatcccgcagaaggctggggaggacctctgggctgcccctttagggatggccatgagggtgagtgcagactgggctcctgggacatgcccagtgcacggacagaggagctgactcccctgtggctctcttttcctctcctctgcaggacatgctgcccatgccaggagatccaacccaggggactggcaactataacatcgaagactttgccgacctgggcatgtttccaccgttttctgagtagctgcggccagagtgaggctcctgctgtacagtgccacccatactgtgatgtcgatgcccatgtgaatgaggcccaccctcgccctgcttgccctgccgcaggccccccaccagaagccatctcccccgctgtgtgtccccaggcgcatcattgctccactctcccctgcagccgcggctgctcggccactgaccaggggccctggcagacattaggggatcagttgtatttattgtattttatctgtgtgtgctcaggaggtgagcctagtgggtccttaagtttggttgtgaataatctcttgatagacaatttatacccatgaaagttcagccaatgcccagagtgaccaagcagcaccagcaggcctgcccaggatgctgaaagcagatttcttcttgatttcacttctgatggatgcatggggctctgggggaatgctgggaaaatgggcaagcagagtgcacagccctcgttctgccagctggagccaagaagcacagagacacagaggcgcctgcccctcagctccgctggtctgtctgtgcatccactgtgccgtgggacatatgtaatttgtgcagtgtgacatggacttgctgtcctaatggatgtgttgtgccttgtgtctgtcatgtgtggccagcgtgattgtatagaatccagagtatgtagagagccaaaatgtgtggccctgtccccaagctcagcaccaccggccatgaccagaggttgctcggcccagggtctgggagctgggctaacaggctgacacttcggcagggtcaccaggaggcacagctaggggcatgctcacatgggtaggtcagttctttggtccaagcctctggtgcagattcaagctcctcctcttagaggaagcagctccttcctcccacaggagccccaagggagcactcaccctcctcccaattggatctgaatagctgtgttcctgatcccacataagcatgtctcatccttgccccactggtgagaggaggaccttgtgcctgcccagagcctgcaggacagcacgccttgaggtcagaggcctggcccttctttacagatgtagatagcagggtaggacgcccaggccttctcacatgggcaccatgaaacactttcttccaggccacctgagccttcgttcttcagcccgactggaggaacagcagctctgggaggcacagagtgcaggtctcaggggcagaagacatgggttccagttctggttctgccacacacccaccggccttgaatttctctggtggtctcaagacaagaacaagagctgactctagaatcttctgcctggctgacctctgagcccatgatccctggcttgctgtgcttctcttggatttgaggagagtttatgaatccatccccctgttttcagggacctctgccttctcccacaccccttacactagtgaggactccttcggcctcttgtgtttccttccttttgtgaccattacgccccctccctgtttcttatcaccagcccatcagcccactgactcccatatggtagaaaaggtaccgtggctgctgcagggcacatggagggacctaccctctgggaaagcccttgtgtccctcccagagtccttcaggtaggccctcgcagatgctgcttgctcagaaacaacccgtgcatccctgcccatggattctgcaggacctagaagagtggcattggttctaggaacctgagagtggagtgaggccagcatgcaggaaggagtttggagagagtgtttgctgtgatccattgaaagctccacattaaaccccagccctgtctggccagggagatccatgtgctcaatgttgctgggggacctacaaaagtcaaacattgctcagtaaaatgcctttggctggtcgccagctgtgcatgactgcagttcctagactctaacttaaccccaactttgcagtttctagagctttttgtctgtaatggtgattgggtctccactgtagatgcatgcagtgttcactccaacctcagaggctttcttgcttctggggaaatggcaggtggttgaaaccctgcacatcctcccagggccagccccagaatgggcctttctctgcctgccctgcccttggggccacctctgcctccagcaggcttgagcttgccccaggccttgggcataattatttccccccaaaaaaggcacaaaaataggttttggatcaaagaagtgtttctcagtgaaatgaaaacagtctttttatagcctttagcttgtgagtttggaagtttggggggtcttatgtttgttttgcctcttctgtttcttggaggagagttgaggcttttcttaggtgcatacacagacccaggtgaacacgctgactgtgaacctgccctgtatccggagctgtgctgggcactgaggggatgcaacaaaattaggagaggatccttgctcccaacgtctacttctcctacctcaacaggggtccagggtgcagtgaactcagttcttggcccttgggtgaggattcatggatgaatgaaagctagacctgatggggaggcattatgactaaataggcccagcctccttcccttccagctctgtcctaggagcataggcgggaaatctgagtagagtctgactgcagtttttgcttatgatttgtaaaagccgtcatggggtcaataagaaaataggggtgatggagggggagaagcccaggactgggagaatcgcacatgccccaggggttttcaccaaggattttcaagacaaactggagtaagaattaaagccccagaggatttaattatcctggtttgcaaaagagcctcccatgccagtaccgcccagccttggaggccggaatgctcatggcccctgtggtctgcttgtccttcagcccatgcccagcagatacctctctgactggagacgggctcaaagctggattagaaaggggagaggcacttgtgactttgtttgactctgtgactcacttcctcgctcacaccttgtttgaactactggactttcaactggctttccttaggtcaggcaagcagacagctccccactgaagaggtctgtacagtgacaacccgggccggcagcaaggacacagatgcagccacagtaaggctccatcaggactgggtcagtgatggcaacaggatggccaaggatggctctagaacactctgtccatgcgtcactccccccagttttatttttagctttggcttcagggagtgacagccatcacaaatagccacattctgctctactctccaacataccagattctacactgttgttatttcatgagacgtgaatgttgcagagagtggggggattctggttgttaaggaacttacactggggagctttactcttccgtgtcaacaatgtgactacatgttctccagattagccacacatgcaaacatcagtgtccttctagctttagccgagaaagaaaccagtcccagggaatgaatggtggtctccccactcccggcagcactttaggcagcccataagctatgcgagaatgtgaacgctcaccttgctccgtcacggttctgacctaccacataaacaggaagaagccagtgaccggaacagctctaggaataacaagtcagaatagaagtgtccttta

SEQ ID NO: 6820 - DNA, 6000 bp, Homo sapiens
caggtcaggaaggatacgggggtcagcacttcctggcagttgagtctggggaagggggacctcacatgccagcagcgtgagaaagatgatactgtacagtggtgaaggacacgggcactggagccagaccacttggcctgaatactggttgtgccgcttaccagcttgtaacctctccaagcctcagtttccccatctgtaaaatgggaagtataacatcatctacttcaagtcattattgttagggctaaatgatgctttagcacagcttttggcaatcaatcattatggatggagcaccatgtgtggacctacatcccctatctgaaggagcatgtcctcatcagaccttgactcaaagtctagcgcctagctgatggtggctgaagtgcctccccacccccaccagcactggggtactttcagagggagagtcggggtggggccctgctccccagggcctttccatctaggtgattccctgagagctctggggcaggggtcacagggaggccgccagcctctgagggcccattgttcttcttctctgagctgggaaagatgtattctccccacccttcctctccacaaccacatctgcatgcttaggggcagactttagataaacaaaccttgccagctagccttacccagctcacagagagctcttactgcctcacaatggccctgtgatgtccagcccttggagcttattgtccctagttcacaggaagttgaggcccagagagaggaaggggctggtttgatgtcccatatagagaggtggcacagccagggctgggtatcccagtcccgtgtcgtgtccagcattttagtgcagactcacatgcacatcaaatgcacaaccatgcaatgacagacaagcagctccacaggaggagtgcacaaccagaggggagaggagagagcctggacagcctctgtcctcacctcctcagtggccatgtggtgacggctgggttttttatttttttctccctagatgagcttcacatctcaggtaactggagaagtcttcagcttgtcttgtcctctccacaggtggggtgcccactgcttcaacaggggccagaacagtctgccctcttccatagctgtaaacctctgcttggcccagcaggagtgagggtagaggggagtagggctcaaggtgccctcgctacctagtagatggtaggagagcataaccaaaagccaaagagctgtttacatgactgggttctccctgtggccttctgagattgcaggagatggaaagggggagaccggatcctaggggaacccaatattcaggttttcctgggttcctgagatgcaagatttccaattttaagacatgggaagttgtaggcagactgggatgagttggtcacctgggtcttccatagctcccagtctgagaaaatgagactcacccagtaataagcagaagatttggctgggtgaggtggctcatgcctgtaatcccagcactttgggaggccgagacaggcagatcacaaggtcaggagtttgagaccagcctggccaagatggtgaaaccccatctctactaaagatataaaaattagccgggcgtggtggtgggtgcctgtagtcccagctactcgggaggctgaggcaggaaaatcacttgaacccgggaagcggaggttgcagtgagccgagatcgtgccactgcactccagcctgaagacagagcaaggctccatcttaaaaaaaaaaatgcagaagatactatggaatgggccaggagaaaaaggaaggatcagggatgggagagacacagtgagccacacagtagctggcattctgcatggtgggcctgggcagcctggctcttcatttgcatatgggtctttcccaccccagtcaaatctgctggagccaattctgcttccttccaacaaagatgcccagacacctggcggtagtgtgttacttcctgctcccagctcctctaacacccctggagagctccatgcccacaggtcttaccttcacccactttcccaggctcttagatcaaacatcaggcacagtgcaggcaatggggccatcctcccaagtcccaaaagccttctgtttccagtagagatgggagaagcctgaactaagcaggtttctcacttccttatggaggaagaagagctaagagaggtgactgattttagtacaaagggcacagggcacagaaacatgcaggaatacattagctgcgtgcactccagtgatacatagcctctgtaaacctgtttccttatcctgaaaatggggacattgttcctatcttgtgattgtattaaggatcaaatgagcagctgctcaacagaggtttctggagaggtccttctccacacagacttgggaggagatgcttgtcctaggtccaaatctcatccaggtttcccgattttttcaggtcttctgctcaactcaggtaccagctgacacccacccagtccctggtgttgccttcaggagcagtggcaagatgggagctggttggggaaggggatcctagcgcaggggggaggaggagagaatggaatggctggactttgagatgagaagacagttggatggggaggaggcaccatttgctggaactgaagggttctcagtaggggctcgaggcaggatgtatctgtgatatctggacctctggagtcccttaagcacaaggaggcaagtgtgtggcagtgaagacattctgccttgggcccaagcccaagacaggtctccctgagccctgggcagaccatccgacctatggtcattggaaggacccacctcctccctatcccaggcctgtgtaaacgccaggaaggcaggtccctttctccatgcaggccctgactggggcagtcagcaccattaagttcttcctctctgaggctttcctgggtcaacacttcgaggctgtgtagttggagggcagggagcctgagccaggagacgtcttcctgttcaggctgattccccccacctgacgctggtgcggggcccacgttggcatatactgtggccatggagagatcatccactttgagggtgagtgcctccagcagaaacacaggcccaagtctgcggagaggctgcccagccaagccacgccccaccagtgagctggctactcggggataaagactgaagtcccaggctgggggtacgtttctctgaaaatggggtttgggcactcagggtccctgaggtctcaggaaatgggggtgcgggatcacagggcataggacctaagcctggctctgatccgcacccctctggcgatccccgcaggcaagaactcaggaggctgtgggctcctgggaagtttctgggctcctggaaaggcatcgtatccaaacaggggcagcgcccgctgctgcgctcctgctggcgcgtgctgcgcagagtgagcgaagcgacggacgcggacccaccatcctatcactccatgcgcagcaactgtgtgcactttgcactgtgtctgctcgtcccaggtcccagcctggacccccggcaaatagacgggagctccagcaggtcggtgagcgtggcccagctacctgcacaggacccatcccacctcctgagcagactagccaaagcgccttataaacgcgcaactgcaaaatccaggcccttctcttcccactccccacccaggccagttttctccaaattcaagatccacttttctctggcaggcacaaagccaccggaaccaagcggacccacccacttgtctaggttatcccaacagaaccttctcattaccccaatagaaccttaccccagtagaattacccccaatagaacttttctactgagccaagctccacctttctgggccccactccttcccaggtaggcccgccaattctgcccatggagacttcgggatgctagttacagaccaagactcaggccttaggaactcctccagtccccatgcccagctaaaagactccagccacctcaactgatgcccaactggatcctacctcttcccccagcccaattcactactttccatcggatccaagccttccttccttgggcctaggggtcactcgggctcgggagctgaactggagggctcacatgactcaggagccctggtggtcacaccagacccttctcttccttttcaggtgtcaatggacgtggacgtgtccccggattaagcatgaccttggccctcctgggtggacgtggaggcttcagaaagattcattaaactactttccaaagcttaattagatgttcaccgtcctctgtatcctgtttcccatctctctaagcccccaagggctcctcggagctccctgaccttaattccttaaattccgccacctccaggaagctcctcggcttcctgctgccaagccagattttgtaggaaaggtggggcgggaaagggagcgtccttaggtatctgaggccggtcctcgggtgcggtgaccccttcccgctctagaacccccagcctgcgggcacagccttctttccagttcccgctttccctccacggcgtgggtgagcatccgcgcgtgcgtctggggagagcggagccccagaggcccgtcccgccgaggccaggtggtcgggggtgggggcagctattccacatcccctgcaagacggtcccagcgtccgtccagcagactcgcccacctttagatctggagacgagccaagtcgctttaaagggcagaagacgccctgaagagggcatttcctagggatgggcggggccaggccctgacgcaccgcccctgtcgcctcctcgcggacacgccctccgctcggctggcgccggtgcctttaagacctcagcgcgcggccctgattgagaaatccgcgcgcagcctccgccgctgcacactgcagcctctgctgaacccctgccgcgccgccgccttcgccagcccggaccggaccggcccgccttcccttcctccgctccagccggcctccggccccgcaacctcctcctcggcgaagtctccctggccgccccatgtcggccgcccccgcctacagcgaagacaagggcggctccgctggccccggggagcccgagtacggccacgaccccgcgagcggcggcatcttctcctccgactacaagcggtgagggagcccgccaggaagctcgcgggagggttggggccggggaccgggcgaggcgcgcgggcaccatggacagcgcccggccccagcgccggccccgccccggccgcgccgaccggaagcccgcccggccccctcctgcggcctggagccccggcccagcgcgggcagcgctggcaccccggctccaggggccggcctaggacgcggaggggggcagataggggctggcgggggatgggccagctcagtttcgagaggagaaaccctccggttccaggtgtttctccggtttgcggcgttgcgttaggggttcccttcctttttcgtgctaggcgggttggcttcccaaaaatgtgggggaggggtctgagtcagcgaacttgagcttgagcctggggcctcttcaggaaggcgggccctggatgtacttgcacagcctcccagcttggccctgctgcaaattcatttcccctccctctggtccccatctccatctgaccctcacatccctgctcctggcattgcccctgtagttcagctccaccttcacaccctcccccacctttgattcgttcgtttgtttcttcatttgtttattcgtaaattctgcaacaagcatttatgaaaagccaactgtgtcgagtcctgaactagtcacggaatacaactgtgaacatgagacccttcttgtcctcacgatgctctagaggggagcacagatgaagaagcagtcagggacagtcgagtgtaatgggggcagtgggagcagggagaggacctagtctctggcgccggagagaaggaagacaggagcgtgaggtatgttccaggcagaggaaa

SEQ ID NO: 6821 - DNA, 6000 bp, Homo sapiens
ggtagaaaggaaagaagcagaattttacatagaatgtgcttgaggttctcaaatctgaagttttgttttattatttatcacacaaaattatatgtaatcagaaatgcaactgggaaaaacaagaacaaattctattttctctttaatttgctcctgggcttgtcacttgattagaaacagaattttgccaaacatgacggctcatgcctgtaatcccagcactttgggaggctgaggcaagtggatcacccacctgagttcaggagttcaagaccagcctggccaacatggcaaaaacccgtctctactaaaaatacaaaaatgagccgggtgtggtggcatgtgcctgtaatcacagctactcaggaggctgaggtaggagaatcacttgaacccaggaggctgaggctgcagtgggccaaaattgtgtcactgcactctagcctgggtgacagaagagactctgtctcaaaaaaaaaaaaaaaagaaagaaagaagcagaattggaaaacataggcaagaaagtcgacaaagcttctctttcacagagctgtgttatcatgggacttagggaaacagagttttctgaaaaggaattttctgcctctcatactaggctttctccccataaggctcatttaattgtattatattctttatatgccactaaaccctgaaattaaatatcatccttattaaatttctctagttttctagtttctagatttgagaggtttggctttacttctttaaaaagaaagaagggccgggtgtggtggctcatgcctgtaatcccagcctttgggaggccgagacaggcaaatcacttgagctcaggagtccaagaccagcctgggtaacatagcaaaacctcatctctacaaaaaaatacaaaaattagctgggcatggtggtgcatgcctatggtcccagtcagtcaggaggctgaggtgggaggatggcttgagccctggaggtggatggaggctgcagtgagcagtgattgcaccactgcactccagcctgattaccagagtgagaccctgtctcaaaaaaaaaaaaaaaaaaaaaaaaatttaaaagaaagttctcctcatattactccccacactaacattcttccacagcactgcactattaaaattcttcatttatatttaaaaccttcagtatccaactgcatcccactacctagaacaatgttcaaccacatcttcacatttaaccacaaaccctatcctatagccccatctatctgtcatttcctatcttcttacctccatgcttttaagtttcctcttagtatgccctctgaccctctacatatctagatcctaattattctttgaggcccaactcaagtggctccttctctttatttcaaagtctttctagatcccctcagtcagagactagtatctccctttctctgaatttctgtatctcttattcagtctacagccttctattacatactctatttttgcatatatgggtttccttcaatatcagtttgaagactagagtcactctcttccaaagttgtatctccagtgccctaccatccctagattatgtggacagagatctggcaggacagggatgtggtctgctttgtggagatcattttactcacaattatcatctgcctggaggctgattaggtaagtcctgcctctagtaagagaggtcaaccaaattagctcccagagtatttcctaaccctggcttccttctactggcctataatccttacttgaattatatttgtattctatggttagatctctcaatattatatccagtcttttcggttttcaaaaacaatacaacataattaaaaaaacaaacaaacaaaaagttgtaaggcaattgtgaagtggtggaaagtgcattacggttagaaccagtaggcacagcctttgctttttggctctgttccttactggcagtgtgacctccaggtagttctttaacctttgtttcctcatttgtacaataaagatggccccaagggttaaacagaaaatatttaatatgcaacatggaagagtgtgtatgtgtgtgtgtgcgttatgtgtgtgtacacaaggccttgctacaagaagccaatctcgttctcttctttcggggacctctgcttactgactttgccggatagagtggctgtgaccttgggccagtccccaactcgactgtcacccacaagcgccctcagcggtagcaagagtgcgtgtccaggagctagagaacgaggctctagtagtgcaatcaggccagctttgcttcctaaccaggcaccctagacttgtggtctccccacaagtcttggaatggttactaagacgtaggccacacgtggagaatgaagcttttaagacctctgggttcggcttgccccaggtttacgaagagcccagttcccagaaagacccacaccccccacgtgacttaggaccccgaagaaagcgcctgctacgccccggacaagatctggccaaaaacaaacaaacaaacaaacaaaaaaaaaggtctcccctcccagccctcaggtgaggccatcatccccgcacccctcagctccggcctgcacctataacgccaaatgctgtgctgggtaaaattaattaccataaacttctagcgctttctcttccatgatccggggctgccgggcagctcccggctcagagaggccggagagccacaggactctgctcagcgtccaggagagcagcccggacacccgctgcatcttcacgctcagccatccctggcgactgtcccaatcgcgccaccgtctctcagcagcctcgggattgatcaacttcctggtcttcaaatgggccgagacaagcctaaaggttcaggagagcagagaaaaggcggggccagacggagtagctcgaaggacctagggaaggggcctcaaggactacaagttccagcgtgctttgctcgatttcggcgggacaaaaacaatcttcgcggctcgtcagcacattgcatgctgggatgcgtgagctattttcttcggaaggcagcgaattgtattctgggacttgtagtgtccgcctggtagaagtggatgtaacggtctgttaaccgcgactgactcactcagtatccgtgataagttaaagatgaatcctgaaggggtaggggaaaggagatcttgagttctccagcacggagactctttacaattatttctccgcgggatccgctgacagccaacgtctttcttacttcctgatcggacaggaagtaggtttcagttgctgtgaaaagggatgtcatgggaagccagtgaggtagtcaggtatggcatggggagggctttttggctttctcgtctcctaagggactcagtccagcacagcttcccacctttgaacgaatatttctgctaatggcctccaaagacaacttagaacataagttttcccgtgtctaatgtgtacagtggtgacataatggagatcgccatccttaaaagtgtatcttggccgggcgcgatggctcacgcctataatcccagcactttgggaggccgaggcgggcggatcacctgaggtcaggagttcgagaccagcctggccaacatgggcaaaccccgtctctactaaaaaatacaaaaattagctgggcgtggtggcaggggccttaatcccagctacttgggaggcagaggcaggagaatcgtttgaactcaggaggcagaggttgcagtgaaccaagatcgagccattgcactcaagcctgggggagaagagcgagacttccctcaaaaaaaaaaaaaaaaaaaaaagtgtatcttaagccctctggtgttcgtgggtgtgatggatgccagtaacaaaatcgattttattttatccatccatccctccgatcaaatttgtaggtactaatttgccataggtgatccataggcatggaagatacaaagataaaacgctgcccccgccttcaaacagctcacatgacctgtgagggagtccatccctgaatttgcagttacaaccaaactaactaaacctcttgtcaaagttggtgacaaatgccatttctattgagaagataggattatcttgcagaattgtcccatgctaacatgcccatttatctttaaactccagtcttgtttgtctagttaatgtaggccttaggatcaccagacaatgaattgcttaggtcccaaggaaattttggtcagggttcaataatttccctgccgtctattccactccacttactccacagcaattgagaggataatcctaacatttttccagccaaatctaggacactgaggcctcacttcatctgtgaggcctccctacttctccaagcagaattgattatctctttccctgtgctcccacagggcaccatagcattgaacatgtcgaactgtcgattaaatacctgatttctgtatctgaaactcacagcaaggtgccaggcatacagtagatgctcagtatctgtatttcttaatgaattaactgaatgttgctcaaggaataagtggtgaagctttcttctagtcttgttcagatacctcaatcgaaatatttattgactctctgtgagggcattgtgcttggcatgggtagatggcatgtagaggttttcaaacattttagtgacactccttcattcagacgaactcttagaagcctgttggataaagctatccagagcacaaagggccctagaaacctgagcagcccctaactcctacttttctgcccctttggccccactcgttaatatctcagcatcgcgaaccaggcctcggatttgctgcgcagcctcagctggccgggtgccgccccgcccccagcgcctaagccccgcccctaggtctccgcccctcggatcccacggggtcccttgcggccctcccactcctcgcaccgttggatcgctttgctcacggcgctatctctcgataaagttgttgttgcggcttccgccgcgggtggaagaagatggcgtcgggtggtggtggctgtagcgcttcggagagactgcctccgcccttccccggcctggagccggagtccgagggggcggccgggggatcagaacccgaggctggggacagcgacaccgagggggaggacattttcaccggcgccgcggtggtcgtgagtttgcacccctcggggtagcaggcgggagggcaccccgaaagggaagagaggctaagcgagaatcggggaggttgggcagagtgggcccggtgagaccttgcctcggtgtcagcagtccgggccccggggaccctggatgtgctcgaagcggtagagcttggcttcccggcccccaggcgggaagagtaaagaatgagggttgtggtgccttcgtcggctagctccctaacagccgagaaccgccgacgccgtcctttgaccctgcagtgtggtgacactccacggatccacggggttattttgcaggtcgtgtcctgccaaggcagattcagtaggacggaataagcgaatgggatgcagacctttcccccgtcttactgcttctaagatgaatagcgttatgtggactagcctggggtggtgacccgcccaccagttctttctttagcccagcatttaccgataataaccaaaggccctttctggatcttagtttacaaaagttatgttgattcttctgatctctaggaaaatcaggccagaggctggtggacagaaggcactgccagataaatcactacatagatcagaaagctttctcctttttaaagggatgtgttcaagtgcccacgtacctcactgggagcaaatctgaaatgtgatgaggaaatggtgtttcccgtaatgttaccggtaggaggcccttgagtgtaggttgtcgaggttcttggcattttgaacaaataattggacaaaacgcacaaaataacaaaggaatgaaacacaaacgaagcagcgaaagcaggaatttattaaagcgagaaagcaccccaca

SEQ ID NO: 6822 - DNA, 6000 bp, Homo sapiens
agccttcttaaacgggtaataatttacttttcccatactctttttcggcctttttttctaatacagctaatgatctcaaatgcataaattcagagaaaacaaaaaaatgaggtaatgaggctccattaattcaaccacatttgtagagcatttgccatcaagcactgtgctaggcatacaaacaaaagtagggaattacagaatagcggtcatagaaataagtaaataatcacaatattatatgattttaaaactaatatacatatgtacgaagtacagaggcaacatagagggacagagtgttgaaagaggggaagagagaaggtcttttggggaaaaatgacaaatttacaaaagtttgtaaggagaggaattctaggtatggtatcataatgtgtttaaaatatataattcaggatcataaagttttaagtgagaaagcagagggaaattaagttgaagcaagtatgcagtcatttagctgatttttacacaggccaactgaataataagcaaatttttatattatgtatacaccacatctatataaacaaacattagatggcttaatattacacagctttccagtgcttccatttatttctagaatgttttccaattttatatatatatatatgtgtgtgtgtgtacatacatatacatacgtaaaatgtatggggtgaacatatgtttatttacacttatcaaaaataactcaccactgggtatattttttatgaggcactaaatgatataaccataaaaatttgctttctatttacggaaaaacagttcaaactcagattacaacatagtacgtttatcatacatggtctaattctagttaacctaattccaaaatctaatataatcccaacttgctattagaaagcctaatactgacacaggaagtgtttctggctaacgtgaacctaataagccaaatgcttattatttcagctacttcacttctccaaatgttttggccaaattgacaaaaggacatgcagtgctatatacactcaataccaaaggacaaagactcttaagtattatataatatgcctttaaatgtttaaaactctatttagaaggctaattcaataatgtaaaatatggtacagttatatctatcggaaacatttgactggagtattaaacagtctctgtgcaaattacctacaaaacaaacatgtatgtggctatttcctctactatttataacacaaattcttttgctctagagtatgtttactatttttgaaaagtaagatttttaaacataaatgtgaaacaatctaagaaatgctttattctaatttatttcttccttacttggtttggcattaaagcaaagccctacacataacagatcccccactaattcttgattaaatatattctcacagtcagcctaggagttatccatttctctacataaaactttaatttcaaataataagcatgtactcgaggatttcagaatgaggccctactggattttaccacaatggctatctagaaagggttaatggtttcccaggaaactggtgattttcacttttcttgaaggttgaaatcaggtgaaaaagaaactaaagaatgttaaaaatagtccctactgtaattaaatccctatgagcaatggctttaaaaaagagaaaagggaaaaaaatgtaaggcccaaataaaatccatgttacagggcagttttaaactgtgctaaggccttaatggcttctgccatgatacgtatctttcttcataatgactataaataataaatttccatttcaaaacggttcacctattaaagatgagacataaattactatattaaaagctacattccaaataagttcactctgtggtttatctaatgcacaagcaaacaatgctggctctagtaaaactgattatcagatgaacacattattttctaatataatagagttttttaaagtaaaacccccaagattttgttcccatgaagagtttaccaaaatattatgctaaatattattatcgccctgcccaaacttaaaaagtattacaaagctcctagggaataatttattaataaagcaggataaatttgtgaaaaaacgattttaaaagtctgggtgagtgagataatttccaagttgtcccatactaagtacatttagatgaaaaaaaaatatttaaagcaatcctctcactgaagattgccatcggtgtttcaaatatcaacatcttggggattaaatcactgggagtattttctcaatttactgtaatagcagtggaacgcactatcactatacaaaaaaacctgttgtctcaatttatttatggcaagtatttaaaaaaatggccatttagaaaaaatatattttacttgtgttaattcacattccatcatctgctttttttattagctgcaaccagaaggaaacaaggagatattcactgctttaagaaaaaaattaaactggtaagaagtcttttcccatctctaaaagaaaacttaacatttttaatccaaactttttgaaagataccaataaaagttaccgtcattcggttcagcatttttagcagttcttctcctaaataaccattatctgagatagacttcttgatctccctcaaagtaggtctaatctgcagaaggcagggagagactgtactgcactctgaatggacagccaggtattttatgaatggaggcgatcacgtgatcccagcacctccccgaactgatatttcccacataactgtgtcaacattctcagaacaggggtagttgtttgtgtgtgcgtatgtttttaaatttaacctaaaatttcacattcttcttaccttctgaactcaaaaatctacacacagacaaataagccgcgaattttttttcttgggaaatcctttcaagatgtccaaggtgatggatgtttaattattttttttatgaatgaagagtgtgctatgcaaatgagggcgattcacaaaaagagacagaacatggctgccacttctgcttctacactgcactgacactgcagcaatgtacctccttctacacccgctcagcagaagcgtgtgttttggggtggggagggagtaagggaggaggaaatgttgtttggcctttctctagctattttacgttaaacaggactcggtacagactttaaaaagttatttcaaaaaggtctgactttagtaatgcactgtatttaaaggaatgcatccaaatgactaagtcctaactcacttaactctttccaaccctccgaagataaacaaaagttgaacttaattacaagaaaacggatgctaatattctgcttggaattaaatcccttctcaatagaaaagtgttgccaaccattatttctccacgcagctgtcacgttaaagcaaaacatttaaaagacgaagtatttcgtttggaaagcaaggagaaagcccaaataagctaaaacttaaaccggaatgctctaaaagttaatgaaatcaccaacatattcagcaatgtaaattcggttacatcaacgtaaatcatgtgttttcacatagctgaaaggtaaaaattagcattcaaaattcttctccgttcctgaagacacgtccaatattcacaaaggtaaactctagctcaacatcgcccacactccaggtgtccttaatcctattaaattctaaaaatgtttccctaaccctattttttacaagaatcttacaggtcataagtttaaaagggggaggggggagagggtgaaggcttaatcggtatttaagagtcactgactcatcgaattaagattcaagagcagtttgctgcaggaggtgctcccacacattagtttccaagtgaaacagctataaaggaagtaggatggatactgaaggtatggtgactggtatgtgagtgaaaaaggacgggacaggggtctcacaggcaaaggggtagtttctactccacttccatccatccacattattccctctcatagacgtacaattgccatcctctcccaacacttaatcccctaccccaaaagaaagcagctaaatgtgggaggatggggaggggtgctgccactaaaaatggctaaagaaatcagctatctccagaagatgcaccgaactctccagggtcgcaagctttccggcacccaagtttcggatgggtctgggggagagccgagggcggatagggggagggggattagcaatcgagatcaatgaggcgcttactcgttgtcagaagtcgccgtctcctcgctcatctttccctcaccgtgatccgatctggagatggaggagcaacagcaggcgggggagcaacagcagcaccgaggggcaggaggcagcggcggccgggggggcgcgggggcagcggcacaggggcctcaccatggtggatgcctcacccagaacggtacccccccagccgggaaccccggccacccccgcaggggggtggcggcagcaacctccgccgtggcgaccccagcctcttcccccgcctcagtgcccagccaagggatccgaggaggcccggtggaaagggaaaaagagaggggctgcaaaggctgactggagagctgctcctccagccactggggtggagcgcagcggggtccggccaggaaggagtcggcgggcggagaacccgggagcagaggcggcgcttccctcagggatgcggcgaggaggaagcagagctccgctcggtgggggccggcgggggggtgccgagcccaggctccgggcagcggcggcgcggtcctgccggagcccaccccaccatctcccgcctcgccgccggctgcccctcaacccccggcggcgtctgggtcggtcctcaggcgccggcagagcagggctaggggccccgcggcggcggattcctccagacacgctccagccgggactcctcctcaggggggtggagggggcggcggggagcgtgtgaggcgaggggcaggcaaaccgatcgttcccacccggccggagaagagcgggcgggcccgggtccggggggcaggatcccgagaagcggcgggagaggacaagagcggctgcaggttccccgccagccagtgcccaccagcagctcagcgggccagctcctcacgcccgagagaggggagccgcgaggggggcggcggaagcgctcacgccgcccgctccttccgccgccgcagccgctgcccgaaccgggggcgcccgcgagagaaggaggcgaagtagtccctcgcgacttctcccggccgcccgctttccccggaggccagagcgggcgcggggtggggctgccgagcggggtgcccaggctgtgagggtgtgtgggtaggactaaaagccgcggcctccgggcgaatcactgcaactcgaagtcatgtgcagcatagcaagtttcaggaaagtagttccctcctcccttcatttcccaaatcgttgtcgagccacttagcggagaaagggggagggaggcggagggatatcctccctgcaccgtgctcggtgtgcgtgcgcgcgctccaaactcttggcacgccgcgaaagggggcgggggtgggagctgcgaggggagctgctagggaggttgcattgttgtggcgcgttactccccgttactctgcttggaatatccgggttgcttgaacgaagaggctagaaagacagtgtgctcagaggggaaatctggaggctactctcttctgccgtgtgtgtgtgtgtgtgtgtgtgtgtgtgtgtgtgtgtgtgtgtgttttctttgcagagcaaagaatggaactggcatgagttcatctttagttagtgggggttagaagcagggactgcaaagagagctcctcctgctgtccccctggttgcactgctgcagtcccctagctgcatgcacgaagtgtatgtgtgtgtgtgtgtgtgtgtgtgtgtgtgtgagagagagagagagagaatatgagaatgtatgtgtgttttaacacctcgcctcgctgcctggat

SEQ ID NO: 6823 - DNA, 6000 bp, Homo sapiens
atttttatgccataaagtcctaacttctggatctctattgagaaaaacctgggagtgataaagcactctaaattcaagccagtcttctattatttaagtatttattgagcaggctaggtgcggtagctcacacctataaccccagaagtttgggaggccaaggcagggggatcgcttgagcccaggagctcaagaccaccctaggcaacatagtgagaactcatctctacaaaaaatgattaaaaagctaggcgtggtggtacatgcttgtagtcccagctactcaggcaagggaggcaggaggatcacttgagcccaggaggtcaagtctgcagtgagccatgatggtaccactgcactccagcctgggcgacagagcgagaccctgtctcaaaaaacataaataaataaataaataaataaatagcacaagtattacaaaggtataatggcacactgttaggctaaagagggaaacgagtggaaacaaattattaagacccttcaaaaggctagttgaagagacaagcaataataaaattaggaatgcatgtcacaaggcaatattaacaactgttaaatggtgttaaatgatgatatacataatagttccactgagagcaaaattgctatctcagaccttgaaagatatcaagatagaacagaaagagcaatgaacgaaaagcaaacatggctgtggaaggtagaaatagcaaaagcaaagataagagtatcagattttttttttcaaagcctaccttaaaagaggcctcaaggaagctcatgttatcatggaagcttcataaagctcattaaacacagtttggaacacagtattctaatggatcaagacattattctgaagacttgggagggtaaatctgactatatgactgattagctggaggaagtcagtattcgcttttatctttgattctagctatgaaaggaaaaatatactaaagactccctactttatataaatgtaataataaacatgacaaaaataaacatgactgcatttaggaatctacttttcattcataacaaaagaagcaacctaattataagcttcctttttttttcttttaaactgttttctcaaactaatttttagatgaccaacacattttcaaaggactctattagaatgttcaaaaatttgacctgttggatagaatttatggaaatgataaaaagcaattgggctatgaactattcaaaataatccatacagggacaggattaactaataaaaagccagtaagaacacatcccccaaacaggagacttgtaaggaaatttggcagcaaaaatactgctgtttatgttacaagacaatatttagaactttaaatgaaaggctttaagagacaataaggtcgggcgcggtggctcacgcctgtaatcccagcactttgggaggccgaggcgggtggatcatgaggtcaggagatcgagaccatcctggctaacaaggtgaaaccccgtctctactaaaaatacaaaaaattagccgggcgcggtggcgggcgcctgtagtcccagctactcgggaggctgaggcaggagaatggcgtgaacctgggaagcggagcttgcagtgagccgagattgcgccactgcaatccgcagtccggcctgggcgacagagcgagactccgtctcaaaaaaaaaaaaaaaaaaaaaaatggtcccagctattccatggaaagctatataccatcccccaaaaagtacaaaatcaaagacaactggtaaatatgagaaagcacagaaataacaaagaaaaagataatgttaaagtgtctcaggccgggcacggtggctcacacctgtaatcccagaactgtgggaggccaaggcaggcagataacttgaggtcgggagttcgagaccagcctggccaatatggtgaaacccccacctctgctaaaaatacaaaaattagccggcgtggtggcacgcgcctatagtcccagctactcgggaggctgaggcagaagaatcgcttgaacccaggaagcagaggttacagtgagccgagatcgtgccactgcattccagcctgggcgtcacagcaaaactccgtctcaaaaaacaacaacaaaaaataaagtgcctcaaatcctccaaaaacaatgaaatataaacacttcaaaatacgcagttagggctgggcatagagactcatgcctgtaatcccagctactcgggaggctgaggcaggagaatcgcttgaacctgggaggtggaggttgcagtaagccaagatcgtaccactgcactccagtctgggtgacagagtgagacaccatcttaaaaaaaatgcagttggtttaacttggcaaaacaccactagatcaaactacacgagaaaaaaagactggacctaataaaagaataaaacagcaaacaggctgtcaagctattccaaaagacaagggttactaggttacccagtaaaccaatctcacaaggccagtgtcagagtagatttgatctaaatcaaatataagtcactggtcaggagactgattacatattcatggatacagtatatattcttcagagaaattctacctgctgttttcactcccactagaatgtaagctcgatgagggaagaacatttttctattacttccccacagtctatgcaataagtaataattactcactaaacaattgaaaagaataaaattatccaactatgacttaaaattttgcacttccgtgaagacagtatgcatagaatcacacatctatcatcaggatttttatccctcatctagaaataaagctgcccacgatcaatcgttctctaaattaaagccggtttcagaactaaaaggaagcttttactgaacacacaatgggatactttagattcagatacagtcatttttccactagacaaactagttttgttctacataatccctatttcttgataatatctgagcttcctcttccaaagcagtaaaatactccttttgtaaataaaggatctactaaatatattccttcacagccaacggcctgacaaacctaggtcatgtttgcagtaaacatttaacaagcacacaagagtaaaacctctttaatctacacagaacagattaaaaccaccatgcagggaatcaaccccaacataatcacagtcattcactacataacatttcagtaaatgaaagactacatatacaacgggggtcccataaaattgtaatatcgtatttgtactctactttcctatgtttagatatacaaaaacttaccattgtgttacaaccacctatagcattcagtacagtaacatgttatacaggtttatagcctaggagcaataggctgtaccatacaaactaggcgtgtagtgccatccagttttaagtatactctatgatgtttgcataatgacaaaatcacctaaggatgcttttctcagaaagtatcaactgtaaatgtaattcgactgagatgtgactgaatattcaatgtagtatatacagcatatatattaatatatacattatatatactaatatataatgtctacatagtgtatatatgcaatgtaaacaccagaaaaacaagagaagaaaataaagttcacacgagtactttgaagatgattcagtaaaaggaccttagtaatactaaaaatatttatacctagataatgccagactattagatttcagaacttataaaataggtaatttaaaacattacctataaatttttaaaattcaaattaaaacttcatgaaattcaaaaactcacacttcaggaagatagtggtatttctgaagaggatctttccaaaactaaaataatttttcccctgcaaacataaaggaaagataattagcctcagatggcttcaattaccaaagcatcatataactatctaagactgctagaaattccaacttaacttaaatctttatgggacgtaccccttaatcagttcattccctttactcaccaatcactgctcagaataaccaatcattttttctaatgaactattctgtgtgcaaataaccagagttttattttcaaatctaaaaagacttaactattaaccattttagtaacaagtaaaaacctaactgaacacctgaaaatcttcaccactgaacaaaaggtataacgtttaccataataaaagcccaaataagatttggacattacagtcagtgagcagagcagaatgaaacaaaaaggccaacgtaggtttaatggggctaatgcttttcagcatttcctccctgcatctggtttttgtctgctcacaggactatacctgttactgaaataaggtttaaaatgggtaaggggcagaaagggtcaacccatgtagttaattatccaaatgaaagactagccttaccacattaaattttaagtactatttcttcaattttaaccattcccatgttaaaacacatttcttaaatctctatgctttctagtcacacagtaaagcttagaatagccattccaaagttgaagcgaagtcgaaccatctcgtaagcagaattacccagggaccaagaagtgcagaggaagaaaaagaaagaaagaaatgaagactcctatttacatatctttcttatccaacccggggacactggattctgtgaaacatctgaaagataaacaactctccgtttgtacatcaagtttacatctcaagtcaggcactgaaagttctgtttttctgatgagaagccgctccaccactcctttctgttgctgaagtggcccttacattcccgctagcctaatcacagaagtgcgcggctttccactccagggaggtgggtcccagttggctagccacacagaccatcccagcaaccccaccccttttgaagagacttttgcggaaccttcatggaccccttgggccgccgtagccccaccccttgctcctctaggttcagacgttagtgaagtgaatactcaccgacggtatcggaatgtgccatttggaccggtcggcagcagctacggttgccggtcccgcactgaaaaacgacagtggtgacgggtgagctcccagaagcagaagaatgacaggcaacacctgaagccacgcagccgccgccatcttcacagccgtggagtgcctaccgaaagcatttcaccctcttccggttcgtcccgccttcttccggctctgctctaagggcgggattatccgggtcctggaaacgtcgcggagcttgtttgctgtgcggcgtagcggcccctctctcagacagtcgtctgtgcgccgtgagactttggacctactgcgcaggcgtcatcctgttggaacctggtcagctgggttagagagatcgctacatgccagcctggcctgagtcttttctgtctcccagccgttaaaggttttaggaccaggcaggcaccccgtgcaggatttggctctctacttccgctcgccccagcccttcatcccttctaagtcaatgtcagactttggggccagaaagtctggaaaagccctaagcctggctgcccaagtggcgtctagtagtgagttctccggtttgggtggtatttaagcaaaggctggaattcggcggtggtggagtacacgcgattcctagactgggtagtgtaacaaccttcaaaggccccttctagccctgaagagtacgatgctgcagtacaatctggctggagacctagcctccagcaaagacccggccggcacttcccacccttaaccgaaaacggagacagagagggtcagttttcaaaatctgtggcgtgaccccgccactgagatagatctgcagatgcttcgtcccagtcagggaggccgtctcggcatttccaggttcttaacgctcttgatttttaccctctaggactcattgcgtacacgccctcaccgccgcccagtttcggttcctaacaaaagcacgttcctcatcagccacccataatcaagacaaatttgccaaataaatcattg

SEQ ID NO: 6824 - DNA, 6000 bp, Homo sapiens
catgagccacatgaagaagccactgttcctcccacgggggtcctgggctttgactggctgccatagaatgtccctcacctcaaattcctgttatcctgtctctgggctctagactcagactaaaaaggcatgtgagatgggtcaggcccacccagggaggggtaaaatgtatttcgtgtgtgggaaagaagggatagttaacacccttgggtccatgctatcccttgtcttctgtgcggcaaccagcacattctagacagaggctgctccatcaacctgctgtccccaggtgcctccctatggacacgcagcatggccagaaataaacctttgagctttgcagtgtggcccagcctctcctgactgatacagggactctgttcattctacctcttgaagacgtgttcctggagctgccgatctgctccagcctgggctgctgacactctgcacctggctgggcagctatcacctgggacttactttcccttccatcctgcaatgacttccctgctttgtggatcacgtctcctgctttcttggtttacatctttgttttgatgaagtataatctctggtggcttcctactatgagaaaggatgcatgggggataaattttttgaaacctcatgcgtctgaaaaatacttggtttatagtttggctgggtgaaggctggaaaataattttcctttacatttatttcccatggctttgttcccttccttctaacttcaactggttgttgtggagaggcccacagtcattctgacccgactatccgtaggtgacctgttttaatgttaggacacttttgtcccctgcattctgaaactcaccaatgatatgccttggcgtagagctattctttcccactgtgttgggctctctccctttcagcatatgtcgtgaaggcctctcttggattaataattcattgacgattttctctcttgtgttttctctgatcacctgtttgggtccctactcattgatcaataatttttttggttggtccactaatttagcttttctctactttccattttttaaaaaaaattttggttctactttcaaggaggttttttacttttacatttctgttaccttgtaaacatctcaagaacactttttttcccctgaatgtttctttatatatgttctcccttcacaggttgtatgtcttttaaaatttaatgacattattgatggttttgttgatgtttctttctttctgcatagtctgtttcttccaacttgctttttaaaaactctattgtggctttgtatttcatgacacagggtttcctgagatgccggtcagctctggctccctgcttgtccttggcctgggagggactgagaggctgatgagaacttctgtgcacatgagtggcagtgttaactgtggccttccctatagggtgagctggctgtttaattgggcagccacaaatgttagaatgtctgggtgtttccccttggcatggttggctaccccaggaaagacccttctagtctcctggctgcttgcattctgaaatcccaaaaaggggtttgtgggtctcagcatccagtatccatgtgtgtatttaatcccctgatcctattaccgtacctctgtccttaattgtgcctggtgtccacctacccaagacgctgccttttagttttttcaggtcataaatatccagcctttcgtcagaacaaggaaggggcagttgtcaggctgcatgaaattggggtgcagatatgggcatctgagtgctcctcaagctgacgttctgccaatcttattttcacccccgtttactctcacattcagaggtacgtagtgccacccattagtgaaccttctgggggattccatggagtatgttcttagctttccttcctagctactatctcagggtttcattttcttggatctgctaagtattttagcttcaagaactgcgttgctgttacttcctctcttgttctccctgtctttgtggatttctgccttctaacaaatgctccagaaggaagttaaagtcaatacatactaaccatccaccaactttacccagaaactcaaccaccctttcagccttcagtctctatacgccccagacacacctgctctgcttttctgttgcttccatttgaaacgagacgacccagccctcacatatacatatgccatctctgtcaaaatcttacttagaaaagaaaacatggactcttagctaagaggagattttctttggggaagagctgtctgtccggaagacccttccatgtaggtttgggataaagtcagtgaacaccacgacaatcatcaaatgagtggatttttgagaaaccagccaaggagctcagttttctatacagaatgccacagagcacagtcaaaattctttgggacccacattcttggaaaactcttaggggggtgcatcaatgcagaggacccttgaccacgtagggcatcccctcacccaaggcaggcctgttttgttcatggctgtagtagcctaatactagaatagtgcagactctagacggcctaccattgtgtatgccggctggggtgacccagtggggagacgtggcaccttgaagattggggagaattctgctggctggaaaggggccaggagggtatgggtggctgataagctggtgtaggaccactccttccttaagaagtgactaattgtgacatgtggtgggaatagaggaacattccgaatcattacttggtcaggacacacgtctcttattaaatgtcatcaacacaatctgcctggaagaaacacgattactttctaccaagcacagaccctcctaaagggaccagacccagtccagcacctttagtctccccagagggtagcaactcaatcagcgagaccgcatttcagggttttagttacagatactgagggtgctcaaacatccatgcagtttgctgttcaccgtaacacgcaacccagaatggccgtttcggtccctcgtcggttacctgaaaaccagtcttactgagctccaaccccaaattaatttggtgagaactcgaactcggctattaaccttaattctgagagaagaatgacacccccctcccactgcgagggtccactgagggtgagtgcccgggctccttcattctccaggctcctctcagaacacagcaagggtggctgactccttcgaacgtccattaagcacaatgcaacggggcgaggcagtagggggtttgctgagcccggttccgcggcggtgggaagttattcaccggcgtctccgaggacggcccaggcctggagaatggctggggccgcgggctggggtaggggttaccgtgagagtcaagggcaaggtggcccagcccgggctgggaggcgcgggctgggcgcagccgagcatttcctccgggaggcccagacagcgggcgggtggggcgcggtgggcggggtcctcgcagctggtggcgtttgaagcccccccgaccgcggtgggagaggggcagcctagaagagttggcagcgggcctgcggcgggatggggaggaaggggccccgcgttccctcagcagcggcgccggccgccctggcacgtagttcgcttctggaggcacaggccgcggtgggcgcgccacccgggctgccaggctcaccgccagccgaggccagtcctgctcgggctgacccgagctgaagggcagcgcggccgcaccccggaccccaggaacgagcccgagtctgtccctcccgcgggagctgccccgcccggactcccggagctctgcaaggcaggggcgtggggagggcgagcggcctgaggctctaggcgcggccacccggcaagccggcggcggagggcgcggcgcgagtgcgttccgcccctaggcagccccgcgcccggccgggcagacacgcctccccgccggcgcccatcgcgggaggaacaaatggcgccctccagaaaccgctcccctccatgccgggggccaaggctgtcaccacataaaagctccggcagagaagtgctcgctgtgtccccgccgcggggggtacaagcagccgctccgcgccgcgactacccggcccgccgcccccggacgtcatgcgtcagcgcgccccgctccagtttccgcccctcctcccaccggcccaggggacacgcccactggcgcgcgcagggcccgggaccgggcacgcccctctaacggctcggattggcctggccgtgcactcacggaccaatggcgtctgtcccggccctcggtcacgcccccttgcccaggcgcgggcacgcgaccgctccgttccgccggtgcgcgctctggggtccccgccccctccgcgcgcgcagctccccgcagccgccgccgcctgtaacctgcgccgccaggatgtggctgggggctgacgtcgggtccagatgtggccccggccccgcccacccccggggccgggccgcccacacggagccgcggcgcgcacggcagctgtcccgcctgccacaatgcgcggcgaagctgcggccgcgacttggcgaggtggtccctaacgttgccgctcggcatccttagaaccggccgcccctgacgccgcgcggggaccccagtcgcccgcgcgccccatgcgctcactcttcggtgcccggccgggccggcgcctcgcagacgcggagccgcgcgggtgacggcacaggcggctgcgcgcccagcccagcccagcccagcccgaggagagggcgcgccgcgcccccgccccccgcccgctctcccgaggccgtgggtgcggatgcgcggctgacgactcgcagcaagagcaccgccgccggccccagcccgcagcatggcagccgccgcctatgtggaccacttcgccgccgagtgcctcgtgtccatgtcgagccgcgcggtcgtgcacgggccgcgggaggggccggagtcccggcccgagggcgcggccgtggccgccacccccacgctgccccgcgtcgaggagcgccgcgacggtaaggacagcgcctcgctcttcgtggtggcgcggatcctagcggacctcaaccagcaagcgccggcgcccgccccggcggagcgcagggagggcgccgcggcccggaaggcgaggaccccctgccgcctgccgccgcccgcccccgagcccacctcccccggcgccgaaggcgcggcggccgcgccccccagcccggcgtggagcgagccggagcccgaggcggggctggagcccgagcgggagccggggcccgcggggagcggcgagcccggcctcagacaaagggtccggcggggccgaagtcgcgccgacctcgagtccccgcagaggaagcacaagtgccactacgcgggctgcgagaaagtttacgggaaatcttcgcacctcaaggcgcacctgagaactcacacaggtcagtggggcggcgcgggcgcccggatcgcgcggacggggtcggcgcgagctgcccgaccacgcccccggagtccccgatggggcgcgaggtgggggccgggcgggccggaacgcccggggcctcgccccttcccctgccgctccgacccgcggctggccccgcgcgtcgcgcgaggcgggtcttggctctcggagccggcgcccgccaggcgaccgcgcccccgccgggcacgccccctccccgggcgcgctcgggtggggccgcgggggcggatatagtcatctgggctgggggcggggacccctcccggccgggaggcggcgcgggcaggtgcgggcggcctgggtgtggaccgcaggcggcactcgtgacggtggggcgcccggagcgggggcaggggacgctctccggggtccctcctcgtttcctcccccgctgcccgggcgcgcgctcaggaggggaggggccggccccggcgcgcggcgggcgaagttcacgcagggacaaggtttccttcgccactcggcacattcttcgctctcttcttcctgtaatttttccagcgctctaa

SEQ ID NO: 6825 - DNA, 6000 bp, Homo sapiens; identical to SEQ ID NO: 3260

SEQ ID NO: 6826 - DNA, 6000 bp, Homo sapiens; identical to SEQ ID NO: 2819

SEQ ID NO: 6827 - DNA, 6000 bp, Homo sapiens
ctggaatgattgtatagcacatggtctatattttttaaacatgtattgaatgctgtattaattaatgaattatcctctttctggtgcctttccagtttttcccctgtccttctacaatgggttcttctgtaaatctacaaatacgtttaagtctttttccaatgaaaaaaaaaaaagactcatattttctcttgactatctttttaagatatttgctatgtctttctgtctaccatcaagcttcttttaagttttaagccacatcttcatcatttaatcttttaccacatttttttgtttgtttttgttttcttttgttttgagacagggtcttgctctgtcacctaggctggagtgtcttggtgtgaacatggcccattgcagcctcgacctcctgggctcaagggatcctcctacctcagcctcctgagtagctgggactacgggtgcacaccaccactaatttttaaactttgtagagatgggttctccatatgttgcccaggctggtgtcaaactcctgcgctgaagtgatgctcttgcctgagcctcccaaagtgctgggattacaggcataagccaccacacctggtcccacgttaatgttcaacactttgaaatgtggtttcctcctaaaaactgccttctcaaaatcacaagagacctcctagaccctttctcacatttttatctcctctgatgctttctgtacatcacttaagacaaaagaacactcactacttcttagaattcttctccttccttgattccccaaaagatgtgttcctttatttcctataaataatcacagcccttatcatgctatttgtagctatttatttgtcactgtcctgtactagacttaacaatttcttgaagacaggtgtcatacctttttttttttttttttttggtgggggcagatagggtctcactccaattgcccaggcgggagtggaatggtgcgatctcagctcactgcagcctcaacctccctgggctcaggtgattctcccacctcagcctcccacgtagctaagaccacaggcacatgccaccacgcccagctaatttttcgtacttttagtagagacaggttgtcgtccaggctgttcttaaactcctggagtcaagtaatccacctgcctcagccttccaaggtgctgggattacaagcgtgagccactgcgcccagccaggtgtcatatcttaattagtgcattcccactatatggcactgtgattgctctataaatatttgttgaataaatgaatgaatattgccatcagatcaatgcctaaaagagttctaggaatactggagaatgggagtattggttaaaataacgatggcagttgacattctaagggaaaagggcaagtaaaagtagtatgaggggaaatggactatcagaaagcagcataattcatgtattcactcattcattcatttgacatttactatgggcaaggcaaataagataatcaagacatagtacctgtcctcatagatctgtcttataatcaaaaggtgaaggtttgggggtggagtgttaagaactggtagaaaataggagtaagatactgtgtcactaaagagtaattctaaatctattgttaaaatataaggacagtttggaagaccacagccagctgcttctggtctactcacacctttataatctaggtctattagtggcatttctcaaacttcagtatgcataaggagcacctggggatcttgttaaagatgcagaagtcccaactctgtggatcccagaagtcctgattccgtagatccacgaatctatattttaataagcatcacaagtgattatgatgcttttggtctgcagagcatgctactgtaaagtcctcagtcattcatgttttagttttgccatatctgagttctacctataatattactttcttaataattcatgtaattgctatatgtgtgttaataattcatttaaattgctatatgtgtgtatttatacacatatgtatcttagccttatcctaagcaaggtatttggtgactcttttaatacatataaaataaatacacaaccattaaaaaggtctgtctctatcacatcagcagatgggaaacagtttgaaaagcactgctccagagtttatgccctgcaaacaccacatcctgcatgcagtctgatgatataaattacattaaataacaaaaagctccagggcaatgaagttcagcagaatggtgcttcagaagagctaatcataaaatattccaaaaaattttttaatgaatgttctaattattacaaaatgacattaagaaaattctccccataacataaaaatactgactttttattttaaaaagtgttttgtcttttattctggtacttaactctcagaatattcttgagctgacaccggagccaaccccaatagctacgccatagaacttaacagcagttggaacaaaatgaagatatatctgtgttcttgacccacaataaaacactcatccattttatttagaattaaatttgattaggactgataattcagttcaaaggtataaacttgatagctctttcttttcctttaaccccaaaacaatttataatagtaggcaaaattatacagcacaaatatcaggggaataattgtatctcaggaaggtctattccttaaaggctttggcaactcacaaccacaaacagaaaaagacaattaaaatatttcaccaaattaaaggttgtgctgatattaagcctttaaaaacaatattctctaaattatgttttctcttaaatggctaagaaaatcattttctaccaaaatactcttgagtggatgtcttttggattgtgtgtcacaagctagttctatacatgtttaatttctagtcacattgaacaaaaacaaaaatgaatgactgtggtccttcatctctacatcacttaagtcagccggaaatttaccttcctacttactgatttataaagcattttaccctgtttaccctgtttggatgactattgcaatcacctccctactagtctcccctgcttcagccttttctctacagtctattctccgcacagcagcttaagatgccctgtttaaaatgtcagatcactcactcttatgctcaaaactctgcagaccttttctcagagtaaaagccaaagtcttttaaatggcacaccaggccctctaatacacaatcatcctatagccggcagcattaagactactgaacgactgtaattttactattaaaatgctataatttaaaaatgtactcttaatgatatctatcacctttgctcacttttcaagaatcaaataattcttgatcctactccttagcccctgtcacaggactctttccttgctcactttgctgcagttacaatagcttctttgctgttgattgcacacactgggcatattccagacacaggggctttgcatttgctgttgcttttcagagactgctcttcccacgtgaattcatatggccctggctctatcatttcctttaggtctttgctcaaacattatctaccaggtgagccctttcatgatcaccttacatacaatccatacttcccatccccacacatatttcctctcctctattcctgttttgttgtccaccataccacctacgatttgacattctgtatctactgtttatcatttgtttatcccacaagagggtgaactcctactggatgaagattgtctatctgctttgttcactgctgtatcccagtaacaagaacagtgtctagcacatagtagatgttcaataaatatttgcttaatgaacagtgagtactactccaactctagaactttcagtcttaaccttattaagagctaaaaggcatcccccaatttccgggtggcatttgacttttgtgaacttatatgcagtatcttttgtttgacacatggttccctctgatttttcttagatgatagtaacacgaaaggaaaattcctaaccagtgcgcaagaaagaagaaaatcaaccatgcataacactgattttagataatatcttatccataaaccaacagagaaaatgccttctgaatttgtagcttctcctcttaaacctacggaaaataaactgaatatttgttgcctttgccggggtgggggggcgagaagggggccaggagagacgtgaaagcccaggagcccttcttcaacagcatcaactcttgtgtactccaacttactttttttgagggggtgggcaccgttcgaggtctctgccagggggtgtctgtttttcaccctttgaggtgcctattgtgctgtcttgagaacgaggagaggtgggtgaggagggggtaagaaaggatgctgcttgcggctccaactgcctccgaacacaaagtcgggaggcgagggatccgcgcggatgtctcgggggccagcgggcgcccgggccgcgcgctcggatcgcagcctcggccccggggtgccggcgggacgcgggctgcgcggacttaggcccggacagagccccatggcctcccggcggccgggcacggggccccgcgcacctcactcaccccggttcccccaatccggcacccttctcggttacctcgaactctcttcagcgaaatgggatccttctcctgttctgctgacattacagaccgcaaagcatgactcccccccaggccgcgggaattcggtctctttgatgctgcggcggcggctcctcctcctcgcggggccgctgcggctgcgaggcaagcctcggagccgaggcacggccgagggcggtggggacgcgggccgactttgcaaagtttgggaggaggacgaggcctcggggcggcggggcggcggggcggcgtgcgggcaccggcggggctcagcggcggtggccgggagcgcggcctgggggcggccccccacccggggccggcatgtgctgagggcgagtgcgccgccgccgccgccgcctcctcccactccttcttcttcgccgccgcctcaggagccgctgacaggggaagcaggaggctcgcggcccggccctggcggcacactcacagcgccctctgaggaggaggtctgctctctcgccgctcccgagtcgcagacacaaaagcccccagactggagccgcctgtaaaacccgctctggggcgggcgagggacgtggcgcggccccgcggcttccccgccctgagctccccagccccgcgcggggacgggcttcggggggcgggggccgctgcctcgtcccgcggcgcctcccgccaccgccgccgcctcgcgctccgcctcggcccagcccccacggcccgcgcgcgcctcttgctccaagccggggctcgcgggcccgcggctcttgcagcccgggtgggcagcgcgcgcctaggggccgccccgccccgcgcccggcgctccctcgccgaccgccaggcccgagaacgcccgaccccgcggccgacgctaccgggcccagctttcgcaaggaaagggcatctccgaacttcgtcggaggccacagcagcaggcgtctcggcctcgcagctagggatcggaaagatgaacgtaccatgcgaggaaactttgtaagcgggagctggagagttctcggcgggcatgtggggatccagattccccgactccgtgtccgcgtggccgtggtgtggacacctgtctgtagaatgcctccacttggtattttaacgacttgactcttcaagaaagagcgacgtagaataaataccagaaaggacggtgggcgggggaggggggagcgtgggtagaagcggtgacgcggctggatctcatttagacgttaaattttaggaggaacacccccagtgtgattgtaaattagatgtgatcaccggtccacattcttcagttgggctgtgtgaccggaggcgacttaggtaacctctctgggtctcagttttcttgtctataaaaggcagtggggctacatctcgaaggtctctt

SEQ ID NO: 6828 - DNA, 6000 bp, Homo sapiens
gaatatttgttaaacacttagaatagtgcctggtacataatgggaactatatataaacatttcttttcttttcatccaaattattggcaaaatcagtagaaaaacagccctgtggcacatcagcagaagccctttcctactttaattggcatgttataaatatcacagtccaaagagtcaactaatctacttagcggcgctggcccagcttgtacttttctactctgttctcatgagaggattcctcaaataccactttcccctaacttatcagtctagtaagcctttcaaaggagaaaatggttacctttcagggcctgttcttgtaaacctaggccagcctcactgatcacaactgctgctttaagaaaagtcacgccctcatagccctagattcttgcctggaatcgccatttagacttctggaaacaaaagaccactttatttcccttttggtcacgtttcaactcttggacatcagggagaaatcagagcattgcaacataaaaaccaatccaacttgtcgtattcttaaggttctgactaaattgctgtttggatcaactcttacctaacactttcccccggggcctgatttcagcaagagtgctatctttaggggtccctaaattctctcaaaagggacaggtctgttttctcagaggctggaggctatctcgtgggactgaatgtggatctgaacaggattctcgtggttgacttaaagccaagtcagaacactggcactaagtgaaggcacatgagcctgaagtttgtaacatacatctaacctgggaatccttcacctctaagttgtcagctggccctggcagtttgttagggcatcaagaagtactcatgtgagaacctaaaagcattctgtgaaaggtggttgcaagagccattccagtttttcaggagacttagtaaggagctgctgctgcagaggctaggagcctcaactcaccacctgagcccaccctccacgtggcacggcccagaccagagccaggcctcccgattcctctgtgaagtgaaagggctggaagcagatacctctctgccacgttggcctctgtgatggcccggggtggcaccttccaagggcagttgatgcgcccaccaggcaggcgtttgaaatcaaattggcagcagatcttgggatctgggccacaggtatgggggacgtcatagctgtagaagggcatcatgtgacagaagatgtctgtgctggagtccgagtctgcaggagacacaccacgtggtcaccaccagcaggcagcctctggacgccaggggggcaaggatctgttcaggctaaaggcagccctgatagaccgcgaggctgtaactggacctagggctggagagagtgtgtaggccagggagaaagacatgaggggctccctcaggggacgggcacacagggcacgctgaagcccttgggacagcaggccctgtagaggccagaggtcaatatggccctcccctaaccagagggtgcgaccatttctggcagtccacaccagtgcctgcaggtctgctctgaagaacagtgggggtcttagttctgatatccctgctgttccccagtgaagactatgctgcagtaaccccctctaccctacccggccttaccccatgtctgcctccacatgaactctaggctgtgggtggcagcaaagtgcttcttgatggcatagtgcactctctgaatcagcatgctggtgaggttggcacggcgcagcaggtaaggcatggtggagctgtatccaaaggggtccactgcccagccagagcggggggttgcacctgggcagggcatggaagccagagaggccctgaacacacctcaggggctggccccccggccttccaggtgctgggaccccagctcttgtcctggtagtgagtggagagatgatatcacaccaggcccacatggtgggatctgcctagaaaggaaccaccccctgccgatccctgtgccttacagcccctgcctgtgccttacagcccagggggcagacccccatgcctgggcctggacttaccaagatttctctccagccactggtgtccttcgatgagctggtcaatcaatgcaaagtagtgggaattggcctcatctggcatcacccagcctcctgtcgcaatctccagctgcccgtttcccaccagcctatagttaaggactcacactcaggacggagcaggacactctgcccagtcctgccaaccagcaaatgtcagggcctgtgtgcactggcctcactggaccagttctcccaatcccaggaccaagagaacacacacttgccctcctttccttacagccaacctccaggctatcctggccccgcttatctcggaacctatctgtttttgccttccctccctccaccatcactcatctcttccacagctctctgggcctctccctgccaccttggcacccatagcttaaggtaagacccgtccacccagcctggggctcagacaatgccctcccatgcctccccgcctggtactggccttcggactgccgctctcttttggacattgatgttgtcccaccacttggcgaagaaggagacctctgcccagaggaagcgccgccgggggtcctcctgcagcttagacaccatgctattgaggatgtgttgggtctgctctgtgtagtacttgtcaaaggtcttgatccagcctagggagccaatgtagggtcccctgaggatgccaccatcttcttcgacgtccctcccttgtattggccatcagaaatcccactccacactccagctcccaggagtctgcagggccctcacctgggtcattgtgagagtggggcaccacaaacacctgcaggtcttcagcatcccagtcgtgcgggtcgtaggagatgtcgaagccttgcctccacacaccaccatccacgttgtcaaacggcagctcctccgacacagtgagcatctgccaggtgaactgcagctcagtaccccagtcgtggccactgtacgtccctgccagctctgactcttacctgcagctctggcttctgaccccggccccccaaagcaaactggcagtcctgcggggagatggagaagaagctgggccggggctccggtggcaccacccaggagccattgaccgtgtagtagggcagcatggcgggcgggccctctgcgttggctgtcagctccagcacggagtccttgatatggctgataatctcatggttctcctccaaaagctgctccagctgctcaatgcggttctgcagcacagaaatttggctctgccaaaaaaccagaaagcaatcacacacagctccttatgccacagggagggtctctgcttggggtctaccagctgaggcctgagtacaattcttccctcatcagtcaaagccagaccatgagcctagagggatagatgacaccgttcagataaagggagctgtgcagatcaccactgaggactacactccacttgggttgggagaaccatcactctctagctcagggatggcaaagatttcctttcacctacctattctcaacaatcggtgttgcctgtgctgaggatttcagcggggcttaatggcaaagaatgctgcaatcaattagcaatgtctgccaagaattcaggaggggctgggcgcggtggcccacacctgtaatcccagcactttgggaggccaaggtgggtggatcacctgaggtcaggagttcaagaccagcctggccaacatggcgatacctcgtctcgtctctactaaaaatacaaaaattagtcgggcatggtggcaggctcctgtagtcccagctacttgggaggctgaggcaggagaattgcttgaacctgggaggcggaggttgcagtgagccaagatcgcgccactgcactcaaggctgggcgacagagcgagactctgtctcaaaaaaaaaaaaaagaaagaaaagaattcaggagaacagagtgacaatactcattgccattgacattttttcttccttccttcttttcgccatcactgtttttagctgagggtttctacaaaacctgactattgggaaggaaggctcctgtcctgtactgacattaccctccagcggggggtgggaggggaggcggcggggtgggaggtgcataccctgagcccaggtgacttgtatacaaagaaattagcaaccaggcacgactcacccgggggaagttcccaccattctggtgtcgggtgggatcgtgttgcactcggtccagcatgaggtagagcgagaagactgccacacagaagatggcagccccacacactgtcacctgctttttcagcttcatactggcctccacacacacctggcaggaaggacaccatctgtagctccaacatgcaaaatgcccgtggcagtctttccaccaaataccccagtgagttcctgagggctgttccaaaggaacacccatttgcctggctccaagtagcacaagcagcacatctgaggctggcccacctggtcctggtagcagctctgccgctagggtggagaggacgctctcctttggctggtgctatgaaaaacgggcccaggataagagtcccagctccgactggagcgcaccacacaagctcctgattacacagcttccctgcctagataggaggtgcctgttcaggctcctcggccatgtgcttctagtttcaggtgaataagctagtctctattttgtttgatttaaaagtttagccagaacccaaagagactgataggaaagcctttctcagtgccctttcgggtcaaactggcactcaccagaaacagtgcctggcacgatcctttctcagaaacacagaatgagtttctttctaataaagaagaaagatgcttgtgtttctagcataaagcaagccctgtgtgttctccctgtttctctactgttcactgcagtgggaaacttccagccgcggtttgcagagcacttaggggacccctaggaagcctgcagtgacgccgaaggccccctgggaagggagagacggggcccagtgctcagctgcgaggcaacttcaggggacccgtgccccccgccgccaccgccctcgggctccgcttgcctgctcaggaggaaggaggacgctaactgcggagccgagcgtgggcgggaccgcgctccggagtctgctccgcgggccctggggccgaggagctttgtcgcctctgcgttgtgccctacttagcgcgatctgattctgctcgggagcttccgggcaatattttcagcccttagagactgggtctaggccaatgtgggtggagctggggagagagttggatcacagagggcaggcacctgccgccaggtctctggccgcccgcccggctccctccccacccgctccgacttcgtcggccccggggaccgcagagacaggcgccaggtacgggcctcaggcagcctcctgtcccttcctggcccctctgacgccgcagtggcgctcgcactcccgccgcccgagcccggcctctgtcggggcagccggagccctcccgcgcgcgcacccggcccgttaccgtcagcgcccggcctccgcgccgctccgggcccagtcggccgagctgccggctctcacacgcccggggacggcggcccgcgtgcaggcagcgacgcaggcgaaggcgggcgcccgcccacccgtagccccctgctccgcgcgccgctgccgcgctcccgctgggccccgggccgccggcgcgctccgctgcgccggccccgcgcgggtccgccagcctctgaagctgccgggcccagcagcgtgcggggcggggacagccgcgccgcccgccccggcctgcgtgtgcccggcggagctgacaggagctctggccgccgcggtccccgcccggctcctcccgggcccgctccgctgggctgcagtgcgcagccgcaccagcccgggccgggcctggccagctgcggaacctcaggagggacgcg

SEQ ID NO: 6829 - DNA, 6000 bp, Homo sapiens; identical to SEQ ID NO: 1850

SEQ ID NO: 6830 - DNA, 6000 bp, Homo sapiens
taaaaatacacattgtatgttacccaaaaggaactctaatttttaaaaacaaaaaacaataatttattatttatacacatgaaatgagaaaaaaaaagtcctgtagttacactttcattaggattgagttaattttaatggattaattaagtatgaagtaatagcgaagtgcaagttaaatcacaggaattatcattactatcactagagtctgaatctagttttatgtccctaataccagatagttaatgaagtaaaaagtaagtacatgtaacttctccaaattaacagatcaaacaatggctcattttaataaattttttaaaactcatattttaaaatactgtttttaaattaaaaatccctaattgttttgtttttcaatattttatgtttcctatacttgcaaagtttttcccatgtgttgatctcttcatctatctactcaacacatttattgttccctagaaccactggtaagcaccaaaattataacacacacagtaattttcagcagacagtgttattggacatacgcaatctcacttatagaaatatacaaactaaatctcaataattatctagccgtgtataatttttatagattatctaaaattttaaacaggggctaagagaaacaagagggaagttacacaaaacaaaattttctttgacaagtatcaggtcaactaatttttaaaaaaaaagaatgtacgaaaagaaacattaaaagatttagaaaaaaattggaaatgcataactccactatccatgaagcaagctatggcaaaaccaatgctaaatattaaaacattcaaatcccttcctagattgtttccacaaaacaccaaaatgaatgatgagatatgcatttacatgcttaactgatctatatatgtgtttatttgagatcagagacattttttggaggcatcatctacacaggctaccagtagataaggactggagtctacaattgtttaaagcaaaaagcaacaacagcatcattgttgtgtattatctgttactgttctctgcaatcacactaaaaaaactcttgaacaaatgcatacacatctctccccattttgagatacgtgtgtttttcaaagtccttgttttgaactttggtgaatttgtatttatttcactacatacacgttttcaaaaatgcatctatcaaaacctgaggagaaaatttcaagaaagaatcttccaagatcagttatccctcattcattctacctcaccatcgctaatcctctatctaaattaactttttggccaaaatagtcatcttacgccacatctcaaatcatgtcaattacctgctttaaaacctttaccatttataggctccttatttcctgaaattatcatgtgaagcccttggcctcctgcagaacggcctaggtgcacaggggtttgtcttgcttttccaacttcgtctctggaatctccccttctaaatctctgatcctgctcatccacccattcgtaactctgccattttctttcctaacccagaatatcctctttcaagtaagccagtcagaattctattcatacccctcacacaatttaaatataatttatttcatgaaagtttccacatcaaatacctccttcctcccagccagcttctctcgtccctcctcctccctccctctctgttctgtgtgcctctgtcacttgttcctctaatgggacttgccacatcctacctgtgaacaaccgtttgtcatatctgctctaagagttacaacacacttaaagtgagaccatttattattgaatttcataacttaccacacttagttttgtgtgaccagtaaggtgattaataaagctcatgaatagattttactgttctcaaacattgactgagtggcagctctaatcctatgcttatatattttctgttcttcccctctaaaacgtgagtccctaaatatttaaccattgctctatttgaggctcctttaggaacaggtgaaataccatagctattatcatgcacaaatattttaaggaaaatcagatttttctaaaacatgacgtgaccaatctgcttgtgggaggaagacattttaaatggctgacattcacatctgcccaatagccttcagtctccaatcctactgggatcctcaatatttgtttataataggtgtgtgtttacagagccagaaaaattactgtcataagaatgcaaaaaaaatgcgtacaagtatattttggcatgctatgcatacctgttggctatggaatatacacttaaagattgttcaatacaatggcctgtatcttccatttgtctttctcttactgggttcagagaaaattgagacacttcaaatcatagactacaaattaggcaaacactgatgaagtttttaaacgtaccaactatcagcatgatgccagaacaactggaaaactaagtttaaaaaataattcaaacaaatatgtgatggtgtgcaacagcacactctcctcactccccgaattattttactattgtgtagagttcttaaagggccaaatcaatacattttctcttccacctgccatcctctgacataattatttttgacataataatccactaaataatcaattaacttctgtactaaattgtcttctctagagaatgtgaagtccccagttgagaaaatcacagatcacacagtgtggatcttaaatgtattaacttgtttccttataaacataaaacaaacattttgagtaaaattatttttatagtattacataaaaagtaaaatagacatgttaatttttactgtaaggtaatttatgcagtcacattccttctgtgttccttgctaacacttttactgatacaatatttgacttacaaatgtcctaagtgatatactttggaaaaaagtacatttttaaatacatgggattgtaaatttaaaagctttagattaacagtgaaaaattaatgagaacagcttggcgtggtcaaaagtttcttcctataagatccttagtggtaggtattttaaaagtatctcactaacgtctatttttaaaaatagttttactttatttgtatatattcatatatctgtgacttactgcaaagtttctcaaaatattgtccacaaaatacccgcttcaaaatatttgaagaagtagttttaaatgcagggaccccaagactccagcctatcttgatcagaatcccttggagtgaggaactagcaggcacgcatttaaagcaagtttgcccacgtgattccgacgtacacgagagttaagaagcctacagagtggatctaaaaccatgtctcactgtattctcaatgttgtatgtccgaaagaaaagttgccaaacaatttcttccaaaaaacaaatattgtttacaaatgctccttccagagtgtccctccgcagaaaactaaactagttttcaaatcccacggcgtttcagctcaattaacaaatgaaagggccatccttctcctgattccctggcgtcctaaagcactcctggcaaaagcccgcttcgcacctcggggtactgacctccgcttcccacaggtcagaatattgaatccagtctgcattcacagaagacctaagtgacactgtgtcaccagcctccgactctcccggtagagcggctcctctgagagcccgcctaggcgcggcctcccgctctctgaagcagcggaagcctgtcagcacctcggacagagactggcggtgccgggcccgggtctcccagtccaggaggcagccttggaaaaaccgcagagacacccctggaacgcacagaccactgtcttcgttcccctttcctgcagccagaatctctttccaaacgacaacaaaggaaaccttaagtacctcttacctagaatataggagccacccccacatctcgcctctcccggttccccagcgcctgttgctaaggaggcgagacagcgctcgggaaacctcgggaccaggcgacagagcgctggaggagctgggagcccacgggcagcggcagatgggagcactaggccggccaggactcccccgcaggaagggtgcgccctcgcggctccgacgccagccaggcccccgagcgcccggggcgggtgcagggagccgggcaagcgaggggccggcgcctgggagcgcggctccctctgcggaccggggaaactcggccccggccgaagaggcctccggcccagcactgtggacgcctgtgatcccagacagcgggccgggggctcagggaccgccctgggagggcgggcactcaccatgttgacttcggaaaccatgtcgatgctggcgatgtcgatgttcatccccacgcagaccgggggacctgcgggaagcacaggacacggcgatcagcccagctccggcgcggggcgcgggcggctctgaggactgggggctatcccaggaggggcgcgggcgaagggcccccactcccacccgccgctgctccgcggatgcggcccccgcctccctccgcccaggccgccgccgccgtgggtcgcgcttcccgcaacggccgcgcgcagcccacttacccccgaagtcgggtcttaggcgaatgtcgtagcctttcaacagcttgtccaccgtctccttcacaaaggacatgttcccgggatcgttcacactgggggagggacggggagcacaaagagcggggtcaggggcggctcagccgccagcgccccgcgcaccccgcgccctgcccgccgcccgccggcccacccgcgaccctacctctgggcgcagcacaccacagccaccagcaccggggccgagaagatgccgaaaagccttcctcccgcaaggccccacatccctccgccgcgccccggcacgggggagggggcgccccgccgccgtcgcgacccgcagccggggctgctcctgctgctgccgccgccgccgccgccgccgcgctggcccggagcggaggagggcggagggggaggggaggagggggaggagcgggcgctgggagaggaaggaggagcggggagggaggagcgcgcgcgggcgcggggcgggggaggaggccggagagtcggaggcggagccgccgcgccgcgcaccctgccctcccccacgctcgcctcggcccgaggccggggccctgggcgctcccctcccgcctcggcggccgccgcacgggactcggacctctgggaccgcggagtgcgggggcgacctgggccggacgctgcgagcggagccgcggctgcgcggagtcgggaggggcggggggtcgtcccctgagccggctcctctgggctctcggcggccgggcgagtgcggggactgtcggcagcctcggcgccggcataagcggcggcggaaacgctgcccgcctaccccggccgccgaagttggccccgcacgacgaccaccgcccgctgcagcgcagcccgagagcccccgggtgccgcgcctctgcccgccggactgcgggccgccgcctcccgacggtgcctgcagaacgccgggaagcccccgcctcacctgcggggctcagagcctcgggtccccagggtccaggagagccagatgggcagcaggagctccaggagcccggagcacatggcgctgttcctccggcctaacctgctgggatccgctctcccccctactctccgagcagccaaacggcgacgcagggatccccgcccctacccccacccccacccccaggctttcccgcctgacccgtcttccagcccctgccgtggcggccctatttttcatttatacaattggaccttttttttttaacagctgctccttaaactgcacctcttaccctcactcctgaacatttcttgggagcactgagccctttctgctcacatatatacaaatgtaatggatggttaagtgaggactgaatatgtgttttgttatcagcaaactggaatcccagccagacttggagactggattgtcattccaggtaaaatacgtgcctt

SEQ ID NO: 6831 - DNA, 6000 bp, Homo sapiens
aggttcatcaattgtaacacatgtactactctgctggggaatgttgatcatgggggaggttgtgcatgtgtgggggcaggggatatatgaggaatctctgtgccttcctttcaattttgctgtgaacctaaaactgccctaaaaaaggagcctttaaaaattaactttttaaaattcattaattaattaaaataaatatatactgaaggaataaataaatctcttttttcaggtatcacttcttcctttttttctttcttttgatgaaagccaaaatgccatcagctcatttttttcttataagtccataaaagaatgatgtgtcctgcaactgatgggctcgtagattcaatgaaggacaggatatagagaaattgggctcaactgtatgtccagctggtttggctgttccagccctactcaaggcaggacagcttgcaagcatagcgcacacgtctcaaaggctcaaaacctacccacattcttgggtgtcctgctgagtccccaagagcactgaggaagcaaccacttgacagtattccatattttcacaaatcttgtctgcctcacacgccagccatcagcgcaaaatgaccattcctaaattctctataagtcaaaatctctgtcttcaaaaggcccacgttcagaagttacctcccataagacttcctctggctccccatgatgatatgaacatgcctagtcaacgttcatttcattccacctggtgttattaagttagtctacctatgcctcccctagtagacttagaaccccctgaggtcaagaaatattctccctcatctccacattgctctattccctgcagacagcttggcatatcaaagatatccaatcagttcaacaagctgattcaaatgtccctccatctaaggcaatttgtccagagaatcttcctgcactatacaattaattccaaattgaaatgccaaagaccagaaacctggaagtggggaaaaaatccaataattgatttcagaaaaaaaagtggaattccaaatctcttaaaacataattttgaaatcctttaaaacatatgagccttattaattactctgcaaatactcatctcagagaatgtccacataatgcttaattcctaatgattactggtctgaatttgtagctgattccctcatgcttaaattacaaaagattaagatggaacaatgacattggggaaacaatctccttcttaattgtgccatttcagctgcaaatacccttttatgtatataactaattcaaatcttcactatttcctatacatcagaaacacttaaatgtcattcaaaaaggcagcaaaacaacacacacacacacacacacagacacacaaaacggaagattctatgacttcactctctagtctaaaggatatatgtcattcctggccagagagaaaagagaaaatcagccaatacaacagtttcagtgaccaacgtaaggactgtaaatgacccagaaggaggaggcaccaggggccacaggatatgaggaatataaccaggactgtcatagcagaagtcatgaggagaatatctgggagcccaatcctttcttctcctctcccagagtagctggtagaatcctaacctaaaaccccaacaggggaccttgaaggagcagattccaaatttggacctgtattatatccacagagtaacatgagtaacatgagcgtgaagaccccaacatcaccggtcaccaacaagaccctagagaatccccactacacatcacagaagagtgtcattgtaaatggttctgctgttgtgaagtggtcagctgggaaaaaaggaacaagtgggggcgtggggaggtgactggctgtggcctttgtaccctggacacgaactagcagcagaaataaatcctggtgcttccccatccatttggttctgtttaccaagctcttattctttgcaaagcaaccatatctggggaaaggaggcaggaagaaaaaggaattcaaagaagtctcacaagcccatgtgaggtaggctctgggtgacaagcttgggtaccatggctctttttgttgtaaattgcccatagaatctgaactctctctctttggctcaaaccctgagccatgtcccttaaaattaaaccctttctcccaaagaaaaagatggagattcacatggggcaataataacacatccccacggatcatcctcaggggaccagtaaaagaaatgatggtaaaaggaaaggtgatcacctcaaggaattttcccttgagaaattatcaccatgctgaagatctctggtatagctgtcaacagagaaaagcatctgtcaagctggccaggtgttgactagcaacgccaacaataccctatgcttgtaccattcaagtctcccgcagtccaaggcacaggcacaggctttcctgtgcttcacaccacggggccaggggcagttactccatctttagatctttagtccatgtagctcatggagcaatgtaatggacaaaaaagttttaaacaatgatgtcctggcatagaaattatgtaaatcaccagggattttattcctgttcccagtgtatattggactaaaatgttttcatttaacatcttttgctttttctaatttcataacatttacatctatcaattttccattgattttgaagtagttgaatgggttgaaattgcagcttcagtcacaggcaaactggcacagatttgttttcagaccagccacgttcctcctcagtgttctggacagaggcctccttgtctgttcttccaagagtccctatttctgctgatggaactgccttccttggaattacacaggctcttcaccttggtgtctccatggacacctcccctttgtctctccttggcctcctcctttactcttactccaaatctaatcagtgccaaatctggaactcttctacccgcccagtggtgcattccttcctctctggtccagccatggccaccaattctggcctccccagcacctgcctcatttcatgctggcctccctgtctcaagtcttgttccctccttagaatgtttcctagacatagctgacaaatcagtcttccagaaaaagtgatcatgcgatttccttgttcaataccattgaggtctctctctctctctctctgtctctctctctcttttctattttattttatttttctggttcttaggaagtgtgcagaggactctcccttaatgtggagagagaaagtccatactcctcagtctgtcctttaaagcctggtcacatccaaacaactcagtgttaaatcccactgctgcctcttatatccccagtgcaccaactactcactgacctctgcacttgcttagagcaagtccactgttacttacgcctgcaatgcccctctgctactggctctgtatattcaaacattcccgttttcaaggttcagccgaaatgtccaatctccagaagccttccctggccgccttagatgaaagggatctttcattcctaattctatgatgagagacacttttctttgctaggcattgctgttcctcccccgaccctccctatctccaacacatgacctccctctgctgggaatttcctgggggccgccctctgtgactctccctgcatcttccacagggacccagcaacctgccgtgcccacagcagcctctgcacaacacccaaaagtttgtactagcttagatgttcacgtttctcttctcccacaccctgctcatcaggtagggaactttcccagtgaaaacggaacttccctactacaataccaaaacaagtcaatgttgccacttgatcaagaactcttccatttttgaaatatttcctaatgagctcagttgtcacagactgcaccctggggacaggtcagaccagaaagcagaggatgtcacctgggcaggaccagggctgctccacgctggtgaccacaggctgggtgttttgtgcccccggagggttaggacacacagcagccagtcgcaaagggcgcaaaggaccagcgcttagtgggcggggcgggcaggggagagtcccgggagttgtaccctgttgaatcccagctccaaacttttccctccgtcagcgcggagccctccaccagccaggactggctgacgccgtgatgccacaaaagccgggaccggaagagaaaaatgcgtgggatggggaaggcaaaggcggttattttcagaacttcgggggctcccgggcctgcccttcgggttcccgaggatgcgaggccagcgtccggccgcccgcgggtccggaccggcgcctgcccgggaccggatgggcagcgattgggatgcagatgccgctctggtgctgatgctgcggctgccgcgtagtgacagccgctccaccacccaccgcgccgagctgcggctccgcgcccccgggggcgcccggcgcgcctggtccgctccggccccgggcaaggcctgcgggctgcggcgggcggcggggcccaggccgctactcacccggagggttgaccgccgccggggttgccatcttgctcggagaggataggcgcccgcttggcaggggcgcgggaggggcggcgcggagcccggcgctcagccccggggacccggtcaggcccaggcgccgccgccgccacacaaaggacggcgcgggcgggcggcgctccctccgctctccccgccgccgcggccgctcgccgtccccgcctttctctcctcctcctccccctcctcggcctcctcctcccggttcagcctttgtcgcgcggcggggggcgcccggcccgcggctccccggtcagagcggtagcaccgcgagacttggggctgcggacggcgggacccccaagttgggcgccggcgactggcgggggcagagggccgggcgctccctcgggctcgcgcaggtgctcgggcctggccgggctgggaccgcaggcgcctctcccgcgctcgcctagcccgggctgcccccgcacgcccacgccccaggtgtccgggcgcgctttacccaggggcgccgtgcccaggccaggaggccagggcggagcgggtgagggagaagcccatttagattcagagggaagccggtcctgggagacggccgcgaggaacaaaggcgccccagtgctgcccacttagcatgccagagccgcgctgctcggctcccaggccggggacacggcccggtgttaagcggagggtgcccgaccgcgggaattcctaaggccacgcgcacctccaaggccaccgccgcacacagcttcggagtgcacagtgcacacgcccaggcacaggcagccggcccgagaaattgtgaatgtcttggctttgagtaaggcgctcatctctaccctccttccataatgactgccgttgattattacttgagggcgctgcaagggccttatttacaccaccaagttgagaatttaaaaagatttttttttttaaataggtttatctgcgtatcctggcgaagtttggatgcagagaacttggagctgttgttttctaccagacactaggatccctgagagaggtaatggcccctaggaaggacacgtcaccatcggggtcccctgtaaaggttaaatggaagaataaagacatcccaggtgaacgctgagaagggcaagttggtccctaaacgcagataatgtttgcagagacatcaaactgtcttaaatccttccaaggaagcattttctggagggcagaaaatttgggatgtatgttcaaataagcattttcttcggggagtatttgtcactactaatctaatagtctatcagttctacaaatgttgaatgtctgctgtgtgccaggcacaaagccaggtgttgggcctaccatggaaaggaagaaacaggagctctgttcttctggtttggggggtagagtggggaagagtgaaacaaagtatctgcactcaagaagcacacagctcccttgggggcttagggcagaagccctgaaa

SEQ ID NO: 6832 - DNA, 6000 bp, Homo sapiens
ggttcagagagcttccaggttggcaaacacacatccatgtgcctggaatgtggtacataccaactccatggggacagaagctcctgtactcaggacccttccagatctcaccctttgtatcccctggctgttcatctgtatccttattacatcctttattaataagccagtaaatgtaagtaatgtgttttcctgagttccatgagccatcctagtaaattaatagaacctaagaagggggtcatgggaagcccaatttacagaccgtccctggtcagaagcacaagtcacaatctggaacttgtgattggcatctgaaggtggggggcagtcttgagggactgggccctgaacctgtggagtctgatgctatctccaggtagatagtctcagcattgaattgaattagaggacacccaggtggtatctgtgggagaatttgcttgatatgtggggaactccccaaccaacacctggtgtcagaagtgctgtgttgagtggctgagtggtgtatgagagtaggaaaaacaatttgttttgtttttcctatccttaatacctgtttaaagtagcccttttccgtttatttctttcaaagcaattttcatcacctttaattatcagatttattcacttgtttacttcttcaatgtttgacttcccagtagactataagcttcatgaaggcaaggattacagtgtttttattgttgttgtttgccaccaaatactcagcctctggtatagtaactagcaagaagtagatgttcaataaatatttgttttaataaatatataattattatgtttgttgaaaagtgtgaaccaacatcatagggaaaaattaccttaacattaacttctaaaaaatgatgaatcaagcaatttcctgaaaatgtgcaagaacagactttcagaatgatgttctatgaactgtagtctgcaggtcatttgaaatccagcaaatattttcatcctccttcttctgattctataacttattctatatctagaattactctaaagactaattctaacctggatacaagataaaaagtaaagatggaagattctaaagaacaattttaacaatgtcccatttagggggattttcattacatactttatgaacacaggttcggcatattagctatccgtggaaataagtcacttactacatctacatgagcatgttgagatgaaagtgtttgcaaatcatgctttttcaagggtggctaaacaaatctctattcatctattacaactcatagtcattgctaatgttcaaatatattagggttgaacataacacaaaaatggaaatgctggaaagattaacattatttaatctacagatgactcatgctactggtttaaccattttctttagatttttttcatatacaggaatatatttttatatacatatataatatgctgaagggacaaaaatattgcatgatcattatcctaaagaaacagattccaattatttcttttgaattatagacttacagttaattaagaatttttatagttaattaaaaattagacagattgtaaccttgaatgtaacaaaggacataaagagaaaccatttgtcacatgtaccttttcgggaaaatctcacaaaagattttgtttggcaaagctatttgaaacaatttaaagctagaaatgtttctaggctatagcaagatgaattccatcggtttggattttgacctaccactaaattttggatttaggaacagtctcatttttatacttaacacaaaaattaaattttaacttagaaactgagttttacacagcttgaggcttgtgaaaaattatgtgaaaataagtcagttactgctagggtctcagtgtttgtgtcctccacaaaattcatttgttgaaattttaacccttgagatgatggtagtaggagtcagggccttttgggaggtgattaggtcacgagagtggagccctcatgaatgggattagtgtgcttataaaagaaacatgagggagctagctagtcccttccaccatgtgcaggtacaatgagctgtctctagacagggggcccttaccagtcatggaatctgccagtgccttgtctttgacttcccagcctccagaactgtaaaaaataaattgctgtcatttataagctacctcgttcgtagtattttgttacagcagcctgaacagactaagccagataatatatagagacaacagatggcttcatacacctaggtgtgaatcctgggaaaattgagtggaaaccacagttgagaacaccaacgtcctaacaatcctgtagccttcaggcttagttggttctggactccctctagtggttcaattctagtgctttaattgatgttcttcaattcatagaattaacaaatttctggtcagattaaaaacaactaagcaaaagagccacacaactcccattagaatggtttaccacaaggaggccaggtgcagtggctcatgcctgtaatctcagcactttgggaggctgaggcaggtggatcacttgaggcctggagttcgagaccagcctggccaacagggtaaaaccctatctctactaaaaatccaaaagttagccaggcgtggtggtaggcacctgtaatcccagctacttgggagcctgaggcaggagaattgcttgaacttgggaaacagatgttgcagtgagctgagatcctgccattgcactcaagactgggtgacagagcaagactgtctaaaaaataaataaaattttaaaaataaaaagaatggtttatcacaaggagattatgtcattgaatggcatgataaatatggatgttcagatggctgaaatcatagtgttgcaaatggttagacctaaagggacagaatggattttactggatgattgggaaagacatttatagttttgctcagagtgagtggataagagctgaaggcccagtaacagaattccttgttgcttttgtttgcaacctatggtaaagactggatcttttagagaaagagtgaagtgaaataatatttcctgtgcatatggattctataaggtcagagggttcttgtttgaccttgtataaaatcaacctcttagaccaaccaaaagcaacatgtagtttccttctcatcatattcctaatagcatagtttgtgcctctgttttaaaccaattcagaaaattttgaggccgatttaactttattggctccctgttttggctttggttattccactccattaaacctttacttcttggccatttctgcactgtaaatataagtaaatctactaactcttttacatgagatccctttacatatttaagacagttatcctgtcctcagtaagtcttctttccctctcccagatccttaaagcttcttggagctgaatagaaggaactcgatgaggtacaggcttctgataaaataacttgataggcatgtaattcacacctttaggggtcggtaaaaacgatggctttttttttatttcaaaaaatgcaaagctgttatttaaaagtccccaaaccaaaaagaactgaagccaatgggattaagaggaaaaaagaaaacaggaagtaatgggtgacttatccatttcaagacctcctcctgctattttctgattcctaaattgttccagaatcgatttaagcagacaagtacagctgagaccaggtaagttactgtcaagtcaagaagtctgtcatgtctgccatgaagtttggacagaatgagatcaggaactggcatgggtcttaagatcccagatctgacagtacttcccattgataagatattactacacagtctgtaattgattatttgcatagatagaaaaaaaaaacttcccagcaacttaagcactctaaaatatcagttttgtcaactcacaaatttgggttgcagtgaaagtggggaaaatagaggtaggaagatgtaagtcaaataaaaacaaggtatatcttcttgtctttgagtatctgtagttcttttttaacggcaattaagagggatagaaaatgtattccagctgataaaaaggaattccctgtgcgaaagggaaaggcagaaagcagctggaaaaaaaaaatagcaggcagttgtcttaataacgtagataggtatcgcctctaatacaggacttagtactgttgtgccccaattagacagtaagcattgatcgcatgaactttagtgattaacttgttgccaaagaatattcaaaagaatatcagaaatcagaacaaatgtactgttggtgtgctacaaatccatcaggtagcctagttttccttctttcctctctacaagggattttaagcgctaccgtgtgcttccctcccactatgctggtactttcccataggaagggttgtgcctggacctcccagattggaaccccgattaccgaaggtcccaaggctgtattctcagttacgccaagtcacctgagacatttgcaccagagcacccaaaattctgtgcccatgcggatagttagagtttcttcacaaaatagcaaagtctctaggttgctattccaacggcggtagtactgatgctccagttcgaaggccaggaaaacagaatgtaaagccggtgacttccaagatatatgtaaccaccaaagtacatgcttaatgacctagtgaagtgagcttaagccgcctcccagacacctgtaacgaagaccatctcgggaaagctctgggttaggcaactcgatttcacgaaagcggacaccaacgctctacccagaggcccgagcgtcgtctaacgtttccattggccctttcggccttcactcagctgctagcaacgcagtctgccctagcgcatgcgcgcaatctgcttccggcctgcgagctcggtgttccgctttttgtgggccgggtgggtttcctaatctggtttcgtctgcctggttcatctgtgtgcgatggctccggactcggatcccttccctgaagggccgctcttaaagctgctacccttagacgctagagaccggggcacccagcgctgccgcctgggcccggccgccctccacgccctgggcgcgcgcttgggctcggcagtgaagatctcgctacccgacggcggctcctgcctctgcactgcctggcctcggcgggacggagcggacggctttgtgcagctggacccgctgtgcgcgagccccggggcggcggtcggggcgtcgagatcccggaggagtctcagcctgaatcgcctcctcctagtgccctgtccgcccctgcggcgcgtcgccgtgtggccggtgttgcgagagcgggcaggcgcgcccggtgcccggaatacagccgcggtgctggaggcggcacaggagctgctgagaaaccgaccgatctccctgggccacgtggtggtcgctccgccaggcgctcctggcctggtggctgccttgcacatcgtcggcgggacgcccagtcccgatcccgctgggctggtcacccctcgtacccgcgtcagccttggcggggagcctccgtcggaagcccagccgcagcccgaggtgcccctgggaggtctttcggaggcggccgactcgctgcgggagctcctccgcctcccgctccgctacccgcgcgccctgaccgcgctgggcttagcggtgcctcgcggggtgctcctggcggggccccccggagtgggcaagacccagctggtgcgggccgtggcgcgcgaggcgggcgcggagctgctggcagtcagcgccccggcgctgcagggttcccggcctggggagaccgaggagaacgtgcggcgggtcttccagcgcgcccgggaactggccagccgcggacccagcctcctcttcctggacgagatggacgccttgtgtccccagcggggcagtcgagcacccgagagccgcgtagtggcccaggtgttgacgctgctggacggcgccagtggggaccgcgaggtcgtggttgtgggagccactaac

SEQ ID NO: 6833 - DNA, 6000 bp, Homo sapiens; identical to SEQ ID NO: 2812

SEQ ID NO: 6834 - DNA, 6000 bp, Homo sapiens
gagtgtgcctaggcaaacgggccggcagcaccagctccaaaacgcagcaggagccaggcattcctgatggaccagccaccaatcctgtcactggggtcaagccatcctagcacccccactttgacttcccctcagtccactctgccagaatcagaaccctgccctgagcctgtcctagaagccatggggcaatgcctaagaacagggtcccacggagaggccctcccagattattttcatgtttctgcctctaccagccccttacccccaccaacaacccaacgaggagggatgccccttttccctaaccccacccctcatctttctgtgtggggcagatttctgcctccccaaccagagttcacttcagcatggatcctctctccacctgcttctacccctaccataccccactgcctcctccacctctcaccctcatcccttaggccttccatcacttctctctcatcctctgacccctcttcacatgcagaggtgtccagccgaccccaccggcttccttccccagaggttgaagttctcaccaaagaagacccccaacactgtgcggtttctcagggaggccagccctgcagggccccttgagatggtgttgctaaggtctcgggggttgggcaggtggggttctcccaagggctggtacacgccatctgcatagctggctgggaccaggcgctgcagccgggagcctggggtaggaggggtaaggataaggatgaatcttcagggggcattcttgaccccctctctcccaggctttcctccatgtcatggatcctaaaaccttggaaatggatggcctttgctggtacttgccagctcttgccccgcagcactcagtacccccctggccctggggttctatccccacttggctctcacttacctttgctgccccatctgtgctccatgaggttgttgtaccacccatcaaatcgctgcacctcccacgaaatggggttctgagctcctgtgtgagaatggagggaaggggcagctgggcaagtcagtgcgtgagaggacaggcaggcctgccggatatgggtgctgtgagcctggcacttggagcagcagaaagtggatacctgaagtggatgtgagaggtagggtgcagagggaaaaaccagggcaaagtagtgtccaaactcaagccagatctttaagctgctcagtgggggagacatggcagggagccaaaaagcagtggagcagggagcagagtgtgctgacagacggcctcagagagggagagggggctggaggagagcagtggtgatggggaataggatgcaggggactttactccccttaaacttcagctccctgaggggacacaacaggacagaatccatccccagccctaagacaccacacagagcaagagccagccacactccataccggagaaggacatgtcattctgtgacccatccctgggcagggtcggtgtggtgaggggactagtcatctctggctgagcagagcccagggcaagggtgtggtgttgctactgcttttttccccagtttcttgggtaggaccagggactggactggtgatgtggatgactttgccctttttctggggcatcttgtcccccatacaattcctcctcttgatcctgttgtattctccaaaatgagggtccaggagggagcactcagctgctggggaaagaactgaggaatgagggacagagggaagatccagaatggataatggaatcagggatggagcagggatctttctgatcagtagagcagatagctggcctgattctttcccccaaactaggagtctataggcctggggcttcttctctgctcacttcagagaacagacgcacacattcacactcactcagcagagagtcaggggggaaaatgactcagggcctgatgtttgagcaaagaacccagctaaggttcaagactttgggcagggccacacatgtgatctctaaaataaaatgaacctgtggcacataaaggagagagcctttgcaggacagtacagggaaagcgcctcttggggataagaggtgagagctgagggaaaaaagggaaatccaaagctagggaaagaagagggctggaaggaacgtggatgtgagtagctctggcaagggagaagttgtagggaaggtgtcaccatcctgtcacctccagccaggacagatccttctacaggttttctctgctttctgcttttgcatctcccatccccagtgatcagggacttgatcttttaactttaactgtggcactgtaggcccacttccctccacagagatccggactgcagagagcagcctcagattccagcaagaaactgtctactgaaggcagcaacatgaaactcttatggaagatattgcttttgtttttcatcataatgtttaaacatattgatgactccccttcagctttgggtccaatctgaccccaagatcctttattgtcttatgtgtctaatcaatcttttcctattttgagtcagaggccctcactttatggaaaacaagagaagagagaggagagagaaagggcccccaaactgtaagaataaaagagaaagtgctgacagcagctgaaggctccctaattctgtgtatttggggataattttcattccattatccatctatttcttcaacagctagaaatgagcaactctcatgtgcagggcactgtgtcagctagagactaaagatacagatgaatatcaaatggatcctgtccttgggggagcccagaggatgctgggttcctctgctcctaaccatgcttctcctccaatctgtactcacccagaggggtccatgccccaaccagaagtgtccatgctagagccaggcagaagcccatgatgaaaataataggggctcagggattagaatgtcccaaaatggagaccctagaaaaagacaggcaaagaatgagccccagctactcagaagaatcaggtgaaagactctgcaggcctctgtgaatcaaggcctggggctgggccaaggtcacagtaggtagcaaagttcaagagactcactctttccgaaaattctttaattgattcggcaaatacttcatgagcaccactacataccagccactgacatagacactggagattaagtgacgaacaaaacaaacagaaatccctggtacataccttcatggactttaccttctaagattagttggaaaaccctgctttggcccagcactctgcagagtgtgttccttaggcagggccctgcttggggatcaggagactaggctgaggtctcagtgctgctgccagtccactgtgggatcttagataaatcacttctccaatctgatccttgttttcctcttccagctatgggagcaaatatgcctgaactgtttacttctaagcatggttgccagaatcaaatgtgagaaggaggtttaattcaaagcaagtgacaggtgttgggcaaatgtgatatagagagggtaggcgggagcttgtctcctctggttggatccagaagggatgcactaccaggtgctcatgtatttagtgcaagcttcctgctctctctctctccacccagagtcaacagggaaacagaggcagcagaggactcaggctgggactcctgagtgcgagtaaggagtacctaaagccggcgaagacctcctgaaggcaacctggagattggggttaggatagaggaagaaaggagctcagggaaagcctcatccccagccaaacatcagggttcctggatgggttgtctagaggagagaacccagggagtgacctcatccctactccatctcctattaaatgaaaaaacctaggccctgccataactggaaagctcagtatcacctgctgcatttcacagagtctgtccaggtgctggcctttaatagtgcatgaagagctgggctctggatggttgaagctgtaaagctggatatacggaagtagccacagcggtccttccctgatcccaagatgtcattcccctcccccgccaccaccatgtcttcaggatcctgggcctcaacgctaatgtaccactcagcccctaagggcatgaaatgggctttcagaccaggctgtgtggggatgacctgaagaggaaggtggacatgcttaataaccactccttgtgggtgggttgcccttaatgatttacacaacgatggggcagtaacttctcaacaaccttgacaggaaggttgcccaggacagggcagtgaagccccaggcagagccagcggcagaaccagagagagaacacaggcctgcctgttcttgccccacatggctgcttttccagcctgaagccctagagtggtgaccctggtggccctgaggtgggaggaagatgggtcaaggccatcttggtcctaagggagggctgagggggaaagcttggatcctaaagcccaaagctccctccctggtatgttgtgctggtgccaggagaagaacccgcaggcccaggcaaactaggccacccaacattcccaggtcccaaagaacccagtctctcaaaaccttgattgggcagaggacaggccctaacaggaccggttttagccttaggataagatcggaggcgcagggggctagcattcccctttcttccataacgtggaggagctgcggctcccccgccaccctgcccttggagctccctcccccggagcgcccaggcccgcgggccgggaaaagccctcccaaatctgacctgcggccacggcgtcaccagagcccgggactgcaacttgtctccggcctggctgccagctgggcccgcggagccctctctcgtccggtgcctctgcagctctgcgccgggacgggcggggctgggggtgaggaggggaaggcacggcccggctcggctcagccacggggcggggcgcagtggggcgggatggagtctggcgcctggggaggcgcggaggtgcttccagcggacggcagcgcgcgaggtgagacggcgagggctcccggggcgcaggtagagatgttccgtcggtgccgaaggcccggctagtgcggttgtgtggacggcgaaaaaagcaagtccgccttcacaagtcccatggggctggggagagggtgggaggcggagagggtatggggaggggagactctcctcagatcctctcgacaccgtcgggtctgggctccaagtccaaggccatcgatcacctgccacccacagaccaggccaggcgtcaaagcaagtcacccatccgacctaaacccctctaagaccccggagtcacgtctccctccggggatcctcgtgaggtcttgggggtcccaccgccctgcgagccgcgcccgcgccccgccagacccggaactgcgtcgctaggtttgcgctggagctgctgggattgctgggcatgggtgggggggcgcagaggaggaggggggattggagggacctctgcggagctggcagaccccggtactactgtcctggcgcacccagcccttctctgtaccaggccgggagagggaggcggcgccgcagagcctcgggtgcagtctgagaagtttgggagtgacttgaagagtgactggaagcaccccagacccggtttgtccggtcacagccgggtccttacgtgagttaggagaggagtgggggtcggacgggagccccactgagagtaagggcgcgcgtttgttcacagaacgtcgggacctggttccctctttaatcacacccccgggggcgcttcgtgtgaggttccacgggggaaggcgagaggcgcaggctgccacacacgcactgtttggaagaggggaaggtagggaatagtggtccgggtgtgggtggtgggggatgcggctgcttagatctgtgcggtccaggtgattttggagggggtcttgaagtgcttgctcccgccctggcacctagggctgcacttcctgctttcatccagaccaagttcggatcaagtgggagtt

SEQ ID NO: 6835 - DNA, 6000 bp, Homo sapiens
ggatgagttggtcttcagatatattcgttaacattattagctcagggtaaaaaaaataactcagaggacagggcagtctagcacaatggtcaagagcatgcatgggtttcggccttccacagagctgctttatcacaagtttatcagcagggtatacaacctctccaggcctcggtttcttcatcaataaatggggatagaaatggtacctaccttagagggttctggtgaggatccagcaaatgtgtttcaaagcagttagcctagcatctggctcacagagctctacaaacagtgccactggcaggtgaccactggattgccatgaggctggaatgtgttaacatctataaagcacttggagtagctcttagctcttaggaagcactcagtaaatgctaaccgtgatcatcatcttcaccgttgtcataattgctattgttatctttactagtcactcaacttctctttaacaagatttctgtaattcctttatgggtagaggaactaatatgaggattaggacattgggttacaaaagaggagacctgtgcaagcctgctctgcccttaaccagccaggctgtgatctcagattagtgatgttatttctcagtgtcaaattcaccctagctgataaaaaggaaaggtttctacagggagagccctatgctctcttcttgtcccaaggctcagtgagtttctttctttctttttcttttcttttttctttttttgagatggagtctcgctctgtcgcccaggctggagtgcaatggcgtgatcttggctcactgcaacctcttcctcccaggtttcaagccattctcctgcctcagcctcccgagtagctggtattacaggcacccgccaccatgcctggctaatttttgtacttttagtagagatggagtttcaccatgttggccagtctggtctcgaactcctgacctcaggtgatctacctgcctcggcctcccaaagtgttgggattacaggcgtgagccaccgttcccggccagctctgagtttcaactttgcccaaggatgctgtgtgtgcccatcactgtgccagactcaggaaaatatttatccaacagatgtttattgaatgccttgtgtgcccagttccatggacaccatgatgggcaagacagctacgcctcacaatcccctagtggaagttacactcaagattaaaggccaagaaacaatcagaagattttagcttacaacttggtcgaattggatctaaaacttgggagtgtgcatgaattgatcagggcctattttaccaaagccccacccaatttctgacttagaatttgaattcactccttggctaccaggcaggactctctaggtgctttgcagagaacttatctttctacattttgttttcttagtcagctccagctcaatgagagcaagagagtcagaaatggaactttggaaaataatcactaaggaaaagagatgtgtgtctcagaaaactcccctcaaagaaagccctgcccctcaattcatgatgtataacttttcaggcaggacaggacctctgagaccaccacattaaaagcctcattttataaaaaaaagagaatcaaaagcttcagaaaagtaaatctcagttttatccctccagataatacacatgtaattcactttcttctttcactttttaaaattccttaatccttgaaaaagttacccccaaaagaggttccttctatctttccttccttccaacagatcacagggtcccactgttcattactttccagaaacagccatccttttacagagccatcgctttctcccaggggccgacacgcgcagatcatctgtaatcctccctagcacaggtccggagtgagttggggatggaggggcagggctggtgcaaaagcctcttgtgcctgagtatgattcgaggtctccaggaaggcatatggtgaggaaggcggagccctcttgacgcccctcactggccactgtgccaaggctcttattgggcactgagcccagctgcccaaagttggggtaattccaagaatgaatttagtgttaaaacctcacttgtgccgggaggggtggctcacgcctgtaatcccagcactttgggaggctgaggtgggcagatcccctgaggtgattgagaccagcctggccaacatggtgaaaccccgtctctaataaaaatacaaaaattagcctggtgtggtggcaggtgcctgtaatcccagctactcgggaggctgaaacaggagaattgcttgaacccgggaggcggaggttgcagtgagccgagattgtgccactgcactccatcctgggcgacagaatgagactccgtctcaaaaaaaagaaaaagaaaaaaagaaaagacaaaaaaaaaaacaaaaacaaacaaacaaaaagaaacccctcacttgtaagcagacagaaggtgctgttgggattcccatgctctgcccatgtgtttactcctccagccatggtgaatcccaaaatatgcctccattcctctggattaaacatgtgtggggctgaccgtgggtggggcaagagtgcccatcccagtcgaaaggcatatgcagtgttgacctaaggcagctacatcagcctgggagagagggtgtcttaggcctggtcaggactggtcaagccagtggtcagcctgggacgagaggcaagagagggaaggaagatgccacaggaggtgacacatcgtacttgtttgaccgttttttcctaggattggcccagcagagacaggataaaaagaagcagggagcactcaagtgagacaagtccccggggtgcgtacatatatgggaacaacctgatgtggggagcgtaggcttcaccgtgcatttggcaagaaagtgcaacattatgtgcaaagtgatctcctgattgcattttaaaaattaaaagttcccagcatgtggaaggtatttggtaagaattcagtgaatggctgacctaggggtgcctggataagcacagcacttatgtttttataacaggacaatgggcagcgccgggccttccctctcacatgggcaaaggtcagcaagtgatctgagccgggcagtgcccacatccggaatcagaagccggagagcctagaggaaggccctcctcaccgcatcttccattaccccaagacgtgacttgcccgatttcctttccaatccacgtttctgaggcgagcagctatgaaaagtagcatgtttatctctgcgtgggaattggtggcacgttgtgtattaactgcgcagcatttgtgaaagttttcagagctcttggggaaaccgagaatgagaggagaaagaggcagggagaggggttctggaagcccagcggagttcacagaaggaattccagggagatgggcaggggcagggagaaaatgagagcaggaagcggcacttgtcacaagtttttgtccttggggcctcggcatcccgcctgggcccaggactggcatctcccatttgagggactgacagtgtggcggaccctcaactagcacagataacaaatgaagtaacaaatgggacaaaggaggggcgcacgcggcgcgggactcgagaagagcgcctggcagagcacaaatcccacagaagaagagaccttctgccctctttgagacctcaccttccccttgcccagggccaggaagctctcctcgggcctcctcagaaccccggctgcctccccacctgtcgtctaccgccctttggaggttccggagaggggcccggcccggcgagccgaaggctgcggggcggggcgcgagtctcagcccctgggacacacagccggtgcgtcccgcgcctcaagtgcgcactccaggaagtccggagccgggaggatccgggctcgcggtcccaccctacctctggcgaggtcgggagaaaaaaagcgccagatcgcccgcctgagggcccagaagcccaccgggcggcggtacagactttcccgaaatgtctccgtctccgcgctgcgagcgcacaggaacccagggtcgccggggttgccgtggcttggctgaacgtccaaagccaggcgagggcggggggtctcagtccagctatgcgagcccttctctagtggtgccagctcctacgccgggctcccgggccggcgggaggcgcgtgtgcctgtctgtgtgtgcaggggacattccgcttcccagtagcccatgcagaaccccgccctccgctccggccccaggaacccctcccccagctcagagatccctgcgcgccccctgcccactttgccaaggcgagaaagcggccgtgctggagacaaagaaactcctgcctccctccactctcggcccctccgcccgcccgagacactccccggcgccctccctcgaccccggcgacactgcgcttggacacgccaggcaggggggcagggtgggcgagtccgcttcccgacgcgggccagctgggggcttcccgtgaaccccgcccggggacaccccacagcagccgcgcccccaccctcctctccccaaaccgtcccgggcccctgtcgccgccaccttctgccaaaccgtccccatctctccagcggagctacagcggggcgcggcgcacacaaagggggtcggagggtggagagtacagaaggagggagagatcccgccagggctcgtggcacgggcctgggagcagctatttacccgatttcttcttcgatctctgagatgtctgcgaagatgaggaagaccacgagcagcgtgagcgcggccagcatccagctccggaactgcagctgcatggtgggttcgcgcccgccgggacccacgcgggccggcgcgaggagcaggggccggagggcgcagcggcggacgccggagcctccgcgcgccgcgcgcagctgggcagacaccctgcgctccggacgagtccgggccggcggcggcagcggcagcggcagcggcagcgacaggcaggggttgctcaggcgcggcgagcccgctcgctccctcccggctcccgcctgcccctccctccctcctctcccttcccccgccccgcgcccggctccgcgcgcagtttgacagctttgctccgcgcctctgctcgcctcctcccaccaactccagcgtccaggcgctagcctttgcttctcccgcctggctttattcagctcccgagggcgcggggatgcagccggacgccactcctggcctagagagactgggctctggccaccgcgagcgaccgggtacggagctgagcccagggaagtgcgcgcaccgcccggcgcacccctcaggctggcaaacgccctccctcgcccgctctttgtccagctccctcgcctcctcgcaaagttttctcgacacaaagaccaacacctggggacagcccccagcgcgcggcgagaaggcggtttcagccaggcagatgtttcagcagttgatgaattaggaggggaggtgggggaaggggaggagagaagaaatatccaagacaggccaacttcagtgaagatgctgactacagtttgtgggcgaggctctcagccctcgagaaaccactccctccaggtgctgatctttatctccatttatagacccgatactgggtcgggagagctctccgagctgcccccagatcacgcagtcctggctggaaccctcggctagaaccccaatgggagactcagcgcccgccttccctccgccctcgcggtgctgacgccgggtggccttcatctccccagttcttggactctcaatgaccctaagatcaataaccgcgggaggcctgtcttgatcaaaatgccttctagaaaaatatggctcccacaaggggtaatgccccccacccttccgaatattgtacactttcacagccttagacagtttaagtcaaattacatttcacaccaaccattggccaggggtgggaagggccccattaagttttactggaattagataattaccttttattttctttgcacg

SEQ ID NO: 6836 - DNA, 6000 bp, Homo sapiens
aaccccaaggcttccctgggcctctggctgcatttctcagactggtcggttatccctagcccaagtccatgggaatgccactccttctcccacggctgcctggagcctggctttggacttccttagttctccagtgcactggagaattgattgactgactgattgattgattgattgattggatgtgctttttttttttttaattgcactggggaattttaaaaggctgcctgaagagggcactattttcaccaagagagaactcactagcagaggaattggctgccttgggagagcaaccctgggaggttttctttgaggatggaggtctggtggggatgactccttcctggaactcaccaatcgcctcatgtggcggctgtccattcagtctgggagctgcccctttgggtaactctggaggcagctggcctgaaggttcttgccaagggcctcttaagcacccctagcaaccaaggtaattcaaagtgggagacagagacccaaatttgaattaacttgagtctaattaggaaaagctccagctctgcctccaagagtcactcctcgcctctgggtctcagtctccccatctgtatactgagaaatggtgcattggatgtgttcatctactcagcacgtgttaactgagcacctactacactctgatctcttgggagagaccatggaacgagagagacaaaaggctttgccctcacagagctgctattctaacagggaggacagatggcaaacaagattaaggagtgaaatctataggccatcagaaggggatgtgagccatggaaaatgaagcaaagaagaagcagggggacatggctgctaaggattagtccagcttagagactctgggtctaaagctcttactctgctgcatccttgttaggagtcaagaatggtggcaggaaactgggcagggccatgcgtgagtacagggacagctctcaggggtggtggggatggtgggtttgttcacgggcttgagccccagtcagtctctcagcggcttcctccaggaaacagaactgactaaccccaggtgtgctggcctgtcctcaagtcaaaggcagacacctgggtctgctgaggagtccaggggtcacacagggttcctggcagggccccaaaagtcctgactgaggggtggatttcttcaaagcaaggtgggcagcatcctcagggcactgccagtgactcttctacatccctcactttgccctggccttcgatgaacaagacactggccacctccaactacaggggctctcagacccttccttccctcctactgatcctcccctgcatggtggggtgtcccctccccttacatggggagggagggagaggaatttgaaagtccccatttctggctgggcatggtggatcacacctgtaatcccagcactttgggaggtagaggcagacagatcgcttgaactcaggagttcgagagcagcctgggcaacatagtgagaccccacctctacaaaaaatacaaaaattagctgggcacggtggtgcatgcctatagtcccagctactaaggaggctgaggtgaggaagatagctcgagaccgggaggcggaggttgcagtgagctgagatcatgctactgcactgcagcctgctctgttgagacagagcaacaccctgtctcaaatatatatatctgaccaacccggagttggtcagttttgtttcctggaggaagccgctgagagacagactggggctcaagcccatgcacaaacctaccacccccaccacccctgagagctgtccctgtactcacgcatggccctgcccagtttcctgccaccattcttgactcctaacactgtgctaaaaaaaaaaaaaaaaaaaaaaaaaaaaaaaaaaaaatctccccccatttcttatgaattcacaatttttctcttcctgtacggatcatttttgaaaacatgtcttgtaaaccttctgtgtactcaggatgaatgagggatgccaagatgctgagaaaggacttaccgccaaccagggaggccaggctaatacacatgagaaaataacaatccgctcttacagtttgatttgcagcccacagagtcctttggaaccacttactatctcctaaaaccacacagggtctgttgctctcattttacagatgaggaaattgaggcccagaaaagcaccttctcttccctcaatacatagctgccccatggagtggtaaggagagagaggagacaatgaagattaaagtttccaaataattccaattccaattcttacccccagagggatgcataagaattctacgtaaagggacaaagttgctctgcctcagtctagggtagagccaagcttggcatggaacccaccagcctcggcctctccttggcgggacaagggtaaagtgaaagtcctctgtctctctggaaaagcacatgggggctgggtgcagtggctcacgcctgcaatcccagcactttgggaggccaacccgggtgggtcatctgatgttagcagttcgagaccaacctggccaacatggtgaaaccctgtctctactaaaaatgcaaaaattagctgtgtttggtggcaggcgcctgtaatcccagctactcgggaggctgaggcaagagaattgcttgaacccgggaggcggaggttgcagttagctgagatctcgcccttgcactctagcctgggtaatagagcaagactcagtcaaaaagaaagaagaaagaaagaaagaaagaaagaaagaaagaaagaaagaaagaaagaaagaaagaaagaaagaaggaaagaaagagagagagagagagagagagagaaaggaaggaaggaaggaaggaagaaagaaagaaagaaagaaagaaagaaagaaagaaagaaagaaagaaagaaaacgaactaaaggaaggaaggaaggaaggaaggaaagaaggaaagaaagaaagaaagagagagagagagggagggaggaaggaagagaaagaatgaaagaaagaaagaaagaaagaaagaaagaaagaaagaaagaaagagagagagagagggagggaggaaggaagagaaagaatgaaagaaagaaagaaaagaaagaaagaaagaaagaaagaaagaaagaaagaaagaaagaaagaaagaaagaaagaaggaaagaaagaaagaaagagaaagaaagaaaagcatacgggattaaggatgtactcttggtgtaaggggaaaatgttgccccacgtgggtaagggtgccaagggatctcagtggtggggctggacacctttctgatccaacttttcagagtgccctttctgcttgccaagggcagagataaggcagttggaaaagaagctttgctgttgcaggctaatcattccattctcgcagagcaccttccgtgtgccaggtactattgctacggcagggaacaaagcaggtccctgcagggaacaaagcaggtccctgccctcctgcagttctgggagcttagcaaggctctggctggctcttggaggaccttactgactggagtttgtgtctgcttggaggtgccctctcccctgaacctctttcacaggcagaacctaggggggtggggagtggggtaaaagaaacaaacctctgctgagtcaagggcactgcaagaatgcagaagcgaccatgcagctctggaaggatgcggtgggaaacccgccactcagtggtggagaaaagcccaccagtttctccagcaaatggctgagctttgttgggcctccttgtcttctcatctgcccatgtgttaatatctactcgccattggtttgttaggttcaaatgaaatcagggatgtgtccctttttggctgctagctcttctcagatcccctgacctctccccatctcttctctatggctctgcgtgggaaggggcagttgtcacccccgactcccactaagctgagccctcctcccaacctaagcgggaggaagccggttctgctcacggataagagttaccgggctcctgagttcttgttctgctgggccggggtccaccccctctcctgggctcatccgactaggacttgggaagtgctaggggagccaggagatgcccagctgggggctgtggccggggggaggccaatgacagagcagggggaactccctgtagctgggcacccacttcaacagggccgggacgacccccgcaggcagtgggccgcccctcacccacacggtcctgctcagcccaggctcacatctgggctcaggaggcgggaagcacaggtgtaaagaaatcgccaactgtgcagccccaatccaagggttttattaaagtgggggcggcgggaggggggcggtggaggaaggataagcggcgcaaacgccctggagagtgagagaaaaggtgcgagaaggcaacagctcccctcaccgccctcgattgcagcagagagccttctgcacggcggcggccgccccaccttcacaccggccccgcgtgcggtgaaagtggccgagccgcgccgccgccggatcagggccgccccggcacaaactttcccagacccgccctcggagcggccacccaggctcaacgggctccacgggcgcagggcggctggggctgccgcggagggcgggtgcgcgtggaccgggaggtggggaggcggcgcgcggcggggagtcccgccccgggttacctgggttccaagggtctcgggagtccagtggacagggcgcggggacagcacaggcaggccggagaccagacactcctcccgggctgcggcgaccccggactcgcgggccctgcacctggccctgcgggtcgccgcgcctacccatgccggtccccgcccgtcccctcccgcgcggggcggggcggccccgggggaggagccgagggccgtgggcaccaccccctgagccaggcctgcgcctcatcacgtgccaccgaccctgggctctgtgacttccaaagactcgccaccccattccacagcctgaggtgccaccaaagccataagcccaggggagtctctcacaccccattctcctagggcccatgtaccccacgcccacctccaccccaggagccgaaggccggcagggagcctggagagcctccttgatgggagaactgcggagcttgcccctcggaaaagtgcatggggtggagaacagggaaggagaaaaaaacaacaactgggtactcgcagccccaccgcggtgtccgcttcgccggtgggagaggatcctcgccgccctgaatccttgaagtgagttccacccctgtctcttggagtgctcagggtggcgggccctttgccagccctcaccctttccccagggatcctgtcccaggtcacaggctcctagactggaaggcgctgggcctggacctctgccactcagtggacacagctataagagatgaagggacacagaggacaaagaagaaacatttggcttcagggaaccagactctgtgtctcctcccaggtgctgaaggaacaggttgcagctacctggtgcccccaccccgaccctgccagagaaaggttggaacatccacacctgtggaccgaagtcccccaccaggctctttcctcccacccttcagccccaggctctctgagctcctgctcctccctgccttgccttgtttgctgagggcacacacagtggagagagcacaggactgggagtccagagacctgggctctagtctactctgtgactcgggtcaagtctctggccctttgtgggcccaagttgccccatttgcagtgaataggttgcagtcaattatctccggccatttttacggatcctgaaccgtggtcttgggcaccttgctttattaggctttttggtggctgtgcatcttgtaagggtgtgtatgcatgtgcgtgtgtgtgtgcgtgcgacatgcgcttgtcctctcagacccaagttcttaaagggaaagagactggggcctacacagaggcag

SEQ ID NO: 6837 - DNA, 6000 bp, Homo sapiens
aaaaaaggatgagtttatgtcctttgcagggacatggatgaagctggaaaccatgattctcagcaaactatctcaaggacagaaaaccaaacactgcatgttctcaccgataggtgggaattgaacaatgagattacttggacacagggcagggaacatcacacactggggcctgttggggggtgggggggtgggggagggatagcattaggagaaataactaatgtaaatgatgagtcaatgggtgcagcaaaccaacatggcacatacatacgtatgtatcaaacctgcatgttgtgcatatgtaccctagaacttaaagtatgactaaaaaaaaattaaaattaactttgaatttttatccatagacacaaattattattttttttgagacagggtcttgctgtgttgcccaggctggagtgcagtggcatgatgttggttcactgcaacctccacctcccggattcaggcgattctcatgcctcagccttccaagcagctgactacaggtgcccgccatgacagccggctaatttttgtatttttagtagagacagggttacactatgttggtcaggcttgcctcgaacacctgacctcaagtgatctacccacctcggcctcccaaagtgctggaattacaggcgtgagccaccgtgcccggcctcccagcctcacaaattactttttataagtttttaaaaactagttttatttggctttatcttctttttcattgaaagatgccactaaggttttaagagagtgagtggtgagcctgggtcagggcccagatcatgaggggcctttaaaaatttagacttcatagcattttgtttgtttgtttgtttgtttgtttttagagataagatcttgtcctggctggagtgcagtgacacaatcacagctcactgcagccttgaactgttgggctcaaacaatcctcctgcctcagcctcctgagtagctaggattacaggtgcacaccaccacacctggttaattttaatttttgtagagacaaggtctttctatgttgcccaggctagtctcgaacagctgggctcaagcgattctcctgcctccgcctcccgaagagctgagagccaccactctaggcctttatagcacttttcaaaggaaagagtgtatggaagaaagaagttcctttctactttcttagagaaatgtagtatctaccaagttttctctgctttcctctttgacttttttttccaataacctctcttactcccctcctatcttctttccacaaatgcatatccaccatcacatgccagaccctgggggatccagtgatggataaagctcaccctattttcagagcagaggcaaagttagttggaattggaaatgtgtaaagcttttctttgttcagtgagtcttttcattatttaaaatagagagcagctttgcggttttctcaaatgctctggaaaaaactgaaagaggattgagagcaattttaaaaggagggggagcacagttttccaaatacatttcgaaggaaaagagggggaaacctgtggattaaaagagacttctgagatatagcaacggatttcaatatctggatcttacttggatcctgattcaaataaccaaagtgtaaaaaagtaaaatttatgatatttatgacacaactgaatatttgaaagctgattcgatatttgatgatattagggatttattgttaattatgttaaatttgataatggtattgtaattatatatttttaagttctcttttaaagatacataaggaaatattcctggataaaatgttatgctatcagggatctccatcaaaataatatgtggggagaagtcggtaggggtgtacatgaaacgagatgaggattgcattgacagcagaaactgggtgaagggcacacagggatttattatcctaatctccctatctttgtctatgtttgaaaatttccataataaaattttttttcagaagacagaagggtcatatttatgattgacttctgctttggtgaaaatagtgaaatagggaggaggtaatgatgagaggaaggggctggagcttggaagtatgatttgggagtgaacagtctccagactacaggggcagaaagggaaatgcagggcaaaggacatcatgggagtatgagaagagcgggaagaatgcaaaagagaagtaggcccactgctcttcccccacccctcagccttttcttcacttactcattccctatcccttatctctgtagatgaaaaatcatcttggggccaaatgtagtggctcatgcctgtaatcctggcactttgggaggccaaggagggaggatcgcttgaaatcaggagttcaagaccactctgggcaacatagtgagacccccatctctacaaaaaatttaaaaattagccaggcatggtggcacatgcctgtagtcccagctacgtgggaggttgaggttgggggggattgcttaaattcaggaagtcaaggctgcaagaagccatgaccatgccactgcactccagcctgggtgacaaagaccctgtcaccacacacacacacacacacacacaaaatcaccctgggaacttaacagcaaagattctcaagcacgaagtcatgaaatttcatttccatttcacttggcaaggtctgggaatctgcattttcaacacgtgctctgggagattgagatatctagacttccctttgagctccccagtacctagcccctgtgagagccatggtttttctgtcataaacctttcctctgtcagactggggatcaaacactgcctttcaaagcctttgggacagcagtccactgtttcaaggcaggaaaaaataaagggaatgagagattatgcaaaggaaactatttattgatttcctttaatgtgtgtgtggaaacacgcaaatgctgagggtcgtttgagtggggaaaagaaattcatcagccagtgatggcttgaaagacaccccctttaaaaccttctaacctttgtgctgatgttctctgatgttatagtcactgaacaaccttctgatttgtaatgggattccactaaggaggaaaaacaaacaaacaaactagttgccctaagtaacacagtcctcctggtagctgtgccttttatcatcaatttaatatattgattttttgctttccaagtctcccaaagcctgttattcagaagaactaggtcacaagatttgatcatccatcagtgaactaacttaagctttagggttgggtaaggtaatgaatcagaccctgcaactgagccagaattaccacgaggacagtaaccctatggctaagtcgttgtcacattaggggtaactagacacttgcttacccacacattcttggccacatccctcccaatagggcaagattagaaatcatgactaagttatcaggctgcagccttacttacctggagcccaatgcctgctcaagcataactaggtcttgacatggtgagatcagccaggttggggaaagaagttttgaagcaaatagggcagtctgcagggccctggccccagtgctggcagggatattcccagggacaggaaaaaactacaagcaactggccccacaatctcccacataacaagctgtgagaagtcagacagatttgtctgttcagttcaaagcatcctccttcctcgtcccatctcctaatctcgccccatcctatcagctaaaagaaaaaggcaaatgcctgaggccttctagaggcctttctgtactcactttgtaacctatgtggttccacattgttctttgaaccgtaactacccaggggcctgctggcatccatctaagcctatctctagctgggattccctggctccctacatggttagaaagaaagtcacctcttgccctcttaaggacctcactgaggcacagactacaatggagacaccaggtggccagagtggcaggcaagagcccatgttgccttacagggaaatctgagcacgcatgccttgtccagggtgagaggaacgagggccctctgcttccctcaaagaggggataggggaaataaagtgagcatttgggctgaggagaccaagaggccaagtcttgaggtaaattgggctcaggtcagctaagaaggatatacaaagcatacctcagccaggaattacagttttggggtttttccccccaagattctcgtgcgttagcctcccaagtagctgggattacaggcactcgttaccatgcccggctaatttttgtattttagtagagagcggggtttcaccatgtttcccaggctggtctcaaactcctgacctgaagcgatccgcccaccttggcctcccaaagtgctgggattacaggcctgaaccaccacgcccggccaggatttgtagttcaggaattgcagtttaaaaagaacaggaagaggattctgtcaaccggttcagaggatacgagagagggggctaaagagtgacgaggaaaatagcaggaagggttgggctcgtgcaccgacggggcccaggggagtgaggggacaaaagtgtgaagcggacacagagtcaccgggccaggtgaggcccatgggtcagtggggcagaaggggaaggaaagagcccgagaatggggagagattcagggcaatgcagagagacacggcaggaaacccagccaaggctcgagagaagttggggatttgtgggaggagaggggtggccgcggattggccatcgcgaagagaggccgcgccccctagcgtccctccgggatgagccagaaccctgcccgggcgaccctgaagctctccaaggaccgccccgcccagcgcggagtgcaggcgccggattcccttctgtcgcgcggccttatagttccggctgtggcgcgcggacggaaagtttatgccgacggaaagtttatgccgacggactgtgtccggcgatgggcacggggtgagtggggaggccgagggcccgggactgcctttcgctgcttgttggggttacaggtgaaggggttatgggtgaagaacaacccagggccagcgcttggccttcccgccaccgtggcggccgccccgcgctgtctgtgaggcgccagttccggggcgctgctcccggcctcccctcgctctgaggctcggggtccccagctccgcgtaaactgcacgatttcgccctctgctcagctcccctctgccccctctttccaagagagacttccagatcccacattttcttgactgatttttaaggtaaaaatacatctcccagatgtgattttcagtctggacttttagagatgaaattatatctgagaactggggagggactcccggaggctgacgggaaagccaaagagcaggtgaggcactagaaattcaggtagaatcctgctttgagagcgagactgctgagaatcagttctttatgaatgagctaattatcaccttcagggaagaattacaaacgtctagctgatggacacttggtattcaaggccaaataggtggctagggcctatttctcagactgttcctgagaaagaagagccctagttgtttgaacagtacacgtgggaagggggtgggggtgggagacttgggggctcagaatccacccaagtgaggaatacatagtgttgtgctcacaaaattggtagactgtggtgggcagggattcccccccacccaagacggagtctcgctctgtcgcccaggctgaagagcagtggcgcgatctcggctcactgcaacctctgcctcctgggttcaagcaattctcctatttcagcctcccaagtactagaaccacaggcgcacgccaccacatctggctaatttttgtatttttagtagagatggggtttcaccatgttggtcagactggtctcgaactcctgacctcgggtgatctgcccgcctcagcctcccaaagtgctgggattaaaggcgtgcctggccttttttttttttaatcag

SEQ ID NO: 6838 - DNA, 6000 bp, Homo sapiens
gaagagacaagcaataataaaattaggaatgcatgtcacaaggcaatattaacaactgttaaatggtgttaaatgatgatatacataatagttccactgagagcaaaattgctatctcagaccttgaaagatatcaagatagaacagaaagagcaatgaacgaaaagcaaacatggctgtggaaggtagaaatagcaaaagcaaagataagagtatcagattttttttttcaaagcctaccttaaaagaggcctcaaggaagctcatgttatcatggaagcttcataaagctcattaaacacagtttggaacacagtattctaatggatcaagacattattctgaagacttgggagggtaaatctgactatatgactgattagctggaggaagtcagtattcgcttttatctttgattctagctatgaaaggaaaaatatactaaagactccctactttatataaatgtaataataaacatgacaaaaataaacatgactgcatttaggaatctacttttcattcataacaaaagaagcaacctaattataagcttcctttttttttcttttaaactgttttctcaaactaatttttagatgaccaacacattttcaaaggactctattagaatgttcaaaaatttgacctgttggatagaatttatggaaatgataaaaagcaattgggctatgaactattcaaaataatccatacagggacaggattaactaataaaaagccagtaagaacacatcccccaaacaggagacttgtaaggaaatttggcagcaaaaatactgctgtttatgttacaagacaatatttagaactttaaatgaaaggctttaagagacaataaggtcgggcgcggtggctcacgcctgtaatcccagcactttgggaggccgaggcgggtggatcatgaggtcaggagatcgagaccatcctggctaacaaggtgaaaccccgtctctactaaaaatacaaaaaattagccgggcgcggtggcgggcgcctgtagtcccagctactcgggaggctgaggcaggagaatggcgtgaacctgggaagcggagcttgcagtgagccgagattgcgccactgcaatccgcagtccggcctgggcgacagagcgagactccgtctcaaaaaaaaaaaaaaaaaaaaaaatggtcccagctattccatggaaagctatataccatcccccaaaaagtacaaaatcaaagacaactggtaaatatgagaaagcacagaaataacaaagaaaaagataatgttaaagtgtctcaggccgggcacggtggctcacacctgtaatcccagaactgtgggaggccaaggcaggcagataacttgaggtcgggagttcgagaccagcctggccaatatggtgaaacccccacctctgctaaaaatacaaaaattagccggcgtggtggcacgcgcctatagtcccagctactcgggaggctgaggcagaagaatcgcttgaacccaggaagcagaggttacagtgagccgagatcgtgccactgcattccagcctgggcgtcacagcaaaactccgtctcaaaaaacaacaacaaaaaataaagtgcctcaaatcctccaaaaacaatgaaatataaacacttcaaaatacgcagttagggctgggcatagagactcatgcctgtaatcccagctactcgggaggctgaggcaggagaatcgcttgaacctgggaggtggaggttgcagtaagccaagatcgtaccactgcactccagtctgggtgacagagtgagacaccatcttaaaaaaaatgcagttggtttaacttggcaaaacaccactagatcaaactacacgagaaaaaaagactggacctaataaaagaataaaacagcaaacaggctgtcaagctattccaaaagacaagggttactaggttacccagtaaaccaatctcacaaggccagtgtcagagtagatttgatctaaatcaaatataagtcactggtcaggagactgattacatattcatggatacagtatatattcttcagagaaattctacctgctgttttcactcccactagaatgtaagctcgatgagggaagaacatttttctattacttccccacagtctatgcaataagtaataattactcactaaacaattgaaaagaataaaattatccaactatgacttaaaattttgcacttccgtgaagacagtatgcatagaatcacacatctatcatcaggatttttatccctcatctagaaataaagctgcccacgatcaatcgttctctaaattaaagccggtttcagaactaaaaggaagcttttactgaacacacaatgggatactttagattcagatacagtcatttttccactagacaaactagttttgttctacataatccctatttcttgataatatctgagcttcctcttccaaagcagtaaaatactccttttgtaaataaaggatctactaaatatattccttcacagccaacggcctgacaaacctaggtcatgtttgcagtaaacatttaacaagcacacaagagtaaaacctctttaatctacacagaacagattaaaaccaccatgcagggaatcaaccccaacataatcacagtcattcactacataacatttcagtaaatgaaagactacatatacaacgggggtcccataaaattgtaatatcgtatttgtactctactttcctatgtttagatatacaaaaacttaccattgtgttacaaccacctatagcattcagtacagtaacatgttatacaggtttatagcctaggagcaataggctgtaccatacaaactaggcgtgtagtgccatccagttttaagtatactctatgatgtttgcataatgacaaaatcacctaaggatgcttttctcagaaagtatcaactgtaaatgtaattcgactgagatgtgactgaatattcaatgtagtatatacagcatatatattaatatatacattatatatactaatatataatgtctacatagtgtatatatgcaatgtaaacaccagaaaaacaagagaagaaaataaagttcacacgagtactttgaagatgattcagtaaaaggaccttagtaatactaaaaatatttatacctagataatgccagactattagatttcagaacttataaaataggtaatttaaaacattacctataaatttttaaaattcaaattaaaacttcatgaaattcaaaaactcacacttcaggaagatagtggtatttctgaagaggatctttccaaaactaaaataatttttcccctgcaaacataaaggaaagataattagcctcagatggcttcaattaccaaagcatcatataactatctaagactgctagaaattccaacttaacttaaatctttatgggacgtaccccttaatcagttcattccctttactcaccaatcactgctcagaataaccaatcattttttctaatgaactattctgtgtgcaaataaccagagttttattttcaaatctaaaaagacttaactattaaccattttagtaacaagtaaaaacctaactgaacacctgaaaatcttcaccactgaacaaaaggtataacgtttaccataataaaagcccaaataagatttggacattacagtcagtgagcagagcagaatgaaacaaaaaggccaacgtaggtttaatggggctaatgcttttcagcatttcctccctgcatctggtttttgtctgctcacaggactatacctgttactgaaataaggtttaaaatgggtaaggggcagaaagggtcaacccatgtagttaattatccaaatgaaagactagccttaccacattaaattttaagtactatttcttcaattttaaccattcccatgttaaaacacatttcttaaatctctatgctttctagtcacacagtaaagcttagaatagccattccaaagttgaagcgaagtcgaaccatctcgtaagcagaattacccagggaccaagaagtgcagaggaagaaaaagaaagaaagaaatgaagactcctatttacatatctttcttatccaacccggggacactggattctgtgaaacatctgaaagataaacaactctccgtttgtacatcaagtttacatctcaagtcaggcactgaaagttctgtttttctgatgagaagccgctccaccactcctttctgttgctgaagtggcccttacattcccgctagcctaatcacagaagtgcgcggctttccactccagggaggtgggtcccagttggctagccacacagaccatcccagcaaccccaccccttttgaagagacttttgcggaaccttcatggaccccttgggccgccgtagccccaccccttgctcctctaggttcagacgttagtgaagtgaatactcaccgacggtatcggaatgtgccatttggaccggtcggcagcagctacggttgccggtcccgcactgaaaaacgacagtggtgacgggtgagctcccagaagcagaagaatgacaggcaacacctgaagccacgcagccgccgccatcttcacagccgtggagtgcctaccgaaagcatttcaccctcttccggttcgtcccgccttcttccggctctgctctaagggcgggattatccgggtcctggaaacgtcgcggagcttgtttgctgtgcggcgtagcggcccctctctcagacagtcgtctgtgcgccgtgagactttggacctactgcgcaggcgtcatcctgttggaacctggtcagctgggttagagagatcgctacatgccagcctggcctgagtcttttctgtctcccagccgttaaaggttttaggaccaggcaggcaccccgtgcaggatttggctctctacttccgctcgccccagcccttcatcccttctaagtcaatgtcagactttggggccagaaagtctggaaaagccctaagcctggctgcccaagtggcgtctagtagtgagttctccggtttgggtggtatttaagcaaaggctggaattcggcggtggtggagtacacgcgattcctagactgggtagtgtaacaaccttcaaaggccccttctagccctgaagagtacgatgctgcagtacaatctggctggagacctagcctccagcaaagacccggccggcacttcccacccttaaccgaaaacggagacagagagggtcagttttcaaaatctgtggcgtgaccccgccactgagatagatctgcagatgcttcgtcccagtcagggaggccgtctcggcatttccaggttcttaacgctcttgatttttaccctctaggactcattgcgtacacgccctcaccgccgcccagtttcggttcctaacaaaagcacgttcctcatcagccacccataatcaagacaaatttgccaaataaatcattgtagaaacgctagtttgggcctgaaaaattccaggagcaagagtcaagatttgtcactccatgagaatctggaggggactcccttcccagaaacttgacgatgaagtactggttgtaattttagaaagacacccaatcggcttttttaaaagatcgcccagggcccttgtcctgagagctgggagctggtcggagtgacagagaagccatggaagcagcagtgaaagaggaaataaggtaaaggccaagtgcttctgtagcgagtgaccccagggtccctagaaacagggaatagtgttttaattgcatttcttatttgcgtatttggtatttgctgacctttatcttttctctcaattcgcgggaagttagttgatattaatagcctctcataaaatactttcaggatggttaaataggccgggtgcagtggctcacgcaggtaatcccacagcactttgggaggctaaggtgggaggatcgcttgagttcaggagttcgagaccccctccccgcccc

SEQ ID NO: 6839 - DNA, 6000 bp, Homo sapiens
acaccatggtatactatgcagccataaaaaagaatgagttcatgtcctttgcagggacacggacgaagctggaagctatcatcctcagcaaactaacaccagaacagaaaaccaaacaccacatgttctcactcataagtgggagttgaacaatgagaacacatggacacagggaggggaacatcacacaccaggacctggggcctgttacccgggttggtggtggggggaaagggagggaaagcatttaggaaaaatacctaatgcatgtggggcttaaaacttagatgatgggttcataggtgcagcaaaccaccatggcacacgtatacctatgtaacaaatgtgcacattctgcacatggatcccagaacttaattaaaaaaaaaaaagcccactgtgctccacttgatacaataaatcaattcctgggtatcatgtaaatcagtgtaacagtaaaaaatgacataaatcattttcatacttacattataatttcagatagccacagcgggcaatactactattcccgagacttaacaaaaacatttaagtattcagcaaaatctaataagcatatacaatagcacaatcttaaattaaattttattgcttcctccaaaggaaaacagcttgaaaacacagaagccactgaaacttccttcagccacttttctgtgattcaaccaatgaaatcgtttcttaacaatgattcataccactttcttacacatttaaacaattctttggtgacgcagagaaccaccctaattcttgtttttcaactttctaataatcttaaatcaaatacaccagtaaacaaaattctgactgcgaacgcagacgtttatcacacatataaaaaacgtttttttcctttatttatttatttgagacagcgtctcgctctgtcgcccaggatggagtgcagtggtgcgatcttggctcaatgcaacctctgactcccgggttcaagcgtttctcctgcctcagccttcccattaggggggattacaggtgctcgccaccaggcccggctatttttttttttttttttttgtatttttagtagagacggggtttcaccatgttggtcaggctggtcttgaactcctgacgtcgtgatccgcccctcctggcctcacaaagtgctgggattacaccgcgcccggccacgttttttccttcattactttttgtttttgagacggaagctcactttgtcgcccaggctgtagtgcagtggccccgatctcagctcaatgcaacctccgccttccaggttcaagcaattctccttccttagcttcccaagtagctgggattataggcacgcgccaccatgcccggctaatttttgtatttttagtagagacggggtttcaccatgttggccaggctggcctcgaactcctgacctcaagtgacccacccgcctttattacttctttagtatcatgcacggaggattcttttcaatctaggtacatacatatttttaagtagtattctacattttcttctattttagaatttttattgctctttgtcatttagatttcctttgattttttttagcctatgaggcagaaaacatttttaaaaaatggataaccaatagtcctagcaccatacattgaacaagccactttctccaatagtctacaatattattttttaccacatattcgtagttttccaccttgctggctaaatgaacttaaaagttatcgtatctctgtgtttcaatttcttcaccaaaaagtagagataatagttcacttcatagggttactgtgagaattaaataaattgagcacttagaacaatacctgacatgcaataatactgatgatcataattactaaaagcccataaatgcacagatgtttctggacctccctggttcctgaactgacgggctgctttaaatgactgtgaatttctaacaagtttcctgatacggccttctttttccaaaattttgtcgctatcattttatcatgtaggttttcttatcaatatgtcaagttttctacaatacaacactagaagacactgacttggggaaaattagtaaattctacaacagtgactgtctccatccagaaaatacattgtttcatctcgtttattcagatctcactttatgtccttcattaagattccagtagctcaccaatatttgttatatttatttctaggtagtctttttagagaaacatttagtagtatatatcagaatttaaactgcacatagcctttgcctcggtaattccatttttaagaatctgatatacagtaatatatgtgtacagatataaaaaggctactattccaagaacaaaatcctggaaacaaatgtctatcaagaaagcaaagataatctaaacagcagcatattcataggatgacaaactattcaaccattataaagaaaaccgaatcaaaagcactggcttattagacaagagtttcccaaactatcatgctaaaacagtaacagcgagcttccaaattaatgttgcctttttttttttttttttccaaactgaaaggagggtggggaaaacaaacgcatcatatgtaaagcactgagtccagcctggctcttagtaagcattttaatcaccttcaaaaattaaatgtgacttacggaaacaggtcactgaatattatttcatttcacttattcatttatggcctgttttgctctatataaaattctgaagtggctccataatacagcatcttaaaaaaaagctttcaacttgccctttactcgcaaatgtttacaatgcaaaaaagtccctacaacgtaatatttaacgagtgatgcttttcaatatgccatacaaatctcaatactataattcaggagaagtactcctcctaccttactgtggcaatccattgaaaacgtatttctctccatacttgaaataacctcttaaaaagtgtgttgtcttgcatattaagtaccagagatcacacttcaggaacaaagtgacattctgtgtaatacggaaacaaagcctttcctcctaggaaagaaagccccagaaaagacaaataatgggagcttattttaaaaccaaagcaaaatgttgccttttatcctaaatctctggatcaagttttacctttagattgttcttcctcaatgtaaggtcaaaaggtgcaagttaaatttttcttaaacgaagaatactatatcccttaaaacaatctattcattaataagtgtaaccgctagcttctcccagccagcaaacaagcttctgtgagagttcaaaagtttcagaggcatagtattcctgctcccagatgttacgggtaagcatttcaaacaaaaatacacacagaaaaccactacctgcccaagtatctcgatactatttgaagtaatgaattgatattctttaaaggggagattttttactcctcacatttctgtattcctttgtttgaaataacaagtactattttatgatgaaaaaattaatatacaaaatgggaggagcatcctagctgtttttcaggaactttggctttttaatgtaatacacaagttagtttcaaagcaatgggaaaatgcaataatatttcagagcacataggaaaagtaacaggaaaaacgttacttttttcggctgaactcaccggcctttactaatttttaagtgctcatcttattgtccattcgtaggaatactttgtattacttgtgaaagtttaattcaagttaaattattaaatgttaaagaggttattttcaaagttaccttaaataagtaatacagcatgaaagaaaacccgacctactacgcctcacaggctgagtggagtgttttgcagtctcaaagccttatcgctggcgtgcgcataccgcagggagtgacatcagatcgaaactacagggtttcgccggggaccaaccactcctccaaagacagcagctcccggccagcaggaggtggcaccccaagccccgacccgctgagagccggcttccagcccccgaaccctcactggagccgagtttctccgcgagggacctgttgcgtgtccccgccctcagcgagccgcagccaggcacaggcgccggcagctatgcacctgcccagtacggcggccgggcgcccgcagccccctccccggccgcccccagtgcggcccgcgccgcccccgcccgaggggctccccgcggcccgcggcccgcggcccgcggccccgcgccagccctgcccaccccgccgccccggggcccagacagccgccagcgagggagggcgggacgcgggccagatgccggtgggcgggcggcgacggtcggcccggtctggccctggcggccgcggaggcgctcaccttggcggccgcagctctggcggacatcttgtctctctccagcgccgcgcgaggctcctcggacccgaaactccgcggcgctggcccgcccgctcctcacgccacagcccaaataaacatctcccgagagcgagcggggcacgggcgggggcggccggaagggcccggcccagggggagggaattcaactcggacaaaagtccgggaagcgcccgccccgcccgggtcttctccacggggcgcgcccgaccggcacctccctccgagcgcggccacccactcggcctcccgcagctttcgcagcccggccacgtcggcctcgcccggtcgcccgcccgtcagcagcacccgtggcctcccggcgtctcctcggaagccggcttcgccacgtaacttcccgggaaccggcggccgccaaggaacgcggcgtccgctggctcagccggcgccggcaactcagcggccacgcaaacctgccggcccggcccactgagcatgcccggcccggcgggggcggggctggacgaggcgaggcgaggcgaggcggggagggggcggggccgcggcgggggagggggcgggacgagcggccggggtcccgaccccaagcgcggaaggaaaagccgggtaacccaagtaacttggaagacagtttccgctgccgtgcgagtcttcctgtttgtttttatccaaggtctggcagaattcgcccccaaggagaaagcgcctgtgcaccaaagctttccttaagagacttgtccacttgctcctcgacaagccacgcacatcatggggtgagccccatgcatgagtgcggctggaaaggccggcagagccgatacccgacagttgtttccttcactgggcaaacagcatggtcacggctgtcaccgcgtgcctcggcgttgttcccacggaaggcggaatgcattttctgcaaggcgcgtcatggctttcatctccgaggagctccggcagggtcagaagcgttgctctcgttcaccggcgccgactgccaaggctgaaactggtgatgaggtcatgggcacccggaggcagcagcctgagaaacaccctagagacctgtgacatctcggcccacaccccacattagacctcaagatatatccaaagtctctttcccgcccatctagacaggaatcttgaaaagtttatttttggccatcaagattgctgaaattcttgttgaccgaacgggtcaagctgccctgcattccaatgctgtccctccaactcaaagttgggcagaaaagggtgtaaacacgtgcagtccatggtccagtttaatcagccactacacaaacttcccacaatgttgacggctttgctaaacaccaaggaacatggtaagaaaccaatcctagactcactaatctacacttgtaaatgtaaaggtcttcaaaaaatgccagaaatccttagtaacatcaatgataacatctttaaagtatctggtatagtgccacaaccggcacagaagaaatggaagaaatcataaacatcaggctttagacaatggttttctctttagaattcaactgtatgaaaagaacaaatttaacaaagaagtatgtgtaggtgatacataagtatcaattaaggcttcga

SEQ ID NO: 6840 - DNA, 6000 bp, Homo sapiens
ctgtgactgctggccagacatcttctcccaactcccaccccatccctcaaggtctgggaaaggtactagggctgacagtagggtggcactataaacagttaagatccagagcgagtcttcccaggaactgggtgtcatggaaatacacccagtttgtaagacgagggctgtgacacaggctgcccacagctgtctagctgcagaccagtgccatgctgaggtcacgtctcatgtgaccataagaggtaccatttattgagcacctagtaagagcctggctggacaaagctctcagctgtcccttacctttagaaataggaatcattaatccctcctacaggtgaggaaactgacacttagagagactaaggaactcagcacgaagctcatggtggagataggatttgaacagggccagagctagggagagggaagagaggccactcttttttagggctgaccctgcacttgctcagcctcctatgttgtgcctggggcaactctttggtttaccctagtcccagccccaggagggaataccttgaacctcactcaatctcagcatatcccagtagtccacactctcattttataaaccaaggatgctgggctttctcccattcatcccatcctgcaagagagtggggcccaggctctctcgaggtcacagtggagaagtacaggccaggcctgtgatggaacagtcctggagagaagtctcggggtaggtgagaggggctggtaaaggtctccatctctgtgtctttcccctcaggtattaagacttggggcatcgtgtgttgctgcagaacttttcatcagggacactttcggcctcaggaaattaatcttcgaatggcatgagatgcatgggggcacttgagcactttgcaatgggtgcaatgagaataaatttccaggaaactactccgtgtttccttcatcccctaatgacctgcctgggaacaggctgcacctgcacacagggtctcctttcccacttgaagaaaagcacagcatatgcccattcatctagaatcatcctatcatgaattgtcccagtgtgtaaaatcctccagggtggcaaagggacaattaggagtgcgggcggcaatatgtaatcaaggcagtacacactggtattagaatttcatgtttttccctttcttaagcatattccaaaacttggtgttaaaaactaggcaattttgccatttctaaattctggtattttgtaacagtaatggcagaagtgatgaaaattttgaaaaaaaaatcatactgcttccacccctgatgactgcctccaagtgcatcattcctgaggtacagtgtctggaaactaagatgaggaggactttggaaagaaattttgaagacagcagcagcacatgtcataaatgcgacaaactcatggcatggccctgtatcctatccatccatccacctatcatcgatcatctatctattttagaattaggatatttgagagttgccaaaagcatgctgagaaatgtcagtctgcaaggaagagccctttctccacattttcattgtttcactaaatgataaagagctaccacttggcaattctccacttttttgtaaacctgagctcaccagtagcctgtgcttcccctctactttgcagttgtctattgaaaagtttgtatcttttcatgggcttatgagttaattagaaaaaagagagctcccattcatctcatctaaagacgcaaaatgttttacttgtcacgtttaatatttatcagaatttataatataatcatgttattttaatgaattacactcgtacctcaatccaattttttaaaaaacaattagtcttggccaggcgcagtggcttacacctgtaatcccagcactttggggggtcgaggtggggggatcatgaggtcaagagatcgagaccatcccagccaatatggtgaaactccgtctctaccaaaaatacaaaaattagctgggcatggtggcgtgcccctgtagtcccagctacttaggaggctgaggcaggagaatcacttgaacccaggaggcagaggctgcagtgagccaagatcacgccactgtactccagcctagcgacagagtgagattccgtctcaaaaaaaaaaaaaattagtctcatgattacatgaaatatatgattaaaaaaacttctatttctatgcatatttatgatgcaagatgatgacttccaagaataaacatgtattgtattaggataaaattcagagggctatgtggaatggaaatttgagttccaggaaaacagctatataccatttctgatgatttaaaaaaccttgttcatgtattttaagtaaaaatttatatattatttagacacatctaaaagaatgatgtcattgctttgttcaaaactgagatttacatgtcaaaaatgacatgctttgcaacttatgaaaatttagttgtaaactaaatgttattaatagacatcaactggatgtgtgaggatgatgcataatttctcaaaaatctgttggatgcatgtaagcaaaaagcgtgaagaccctcataccagagggtaactggggtcatgcaggtacgtggagctgctactggcccaggcttcagggaagtgggtgccaggggctgaggatcctgtgttgcctagtgcagcagccccacacaaggaacaggtatgctccccgcagagactctgtttggggcttctctccctctctgagtcatgaggtttcccaccgggaaactgggctgaggcaggcctccaatgctgcaagcagtgggcagcctgtgcttgcaggacacacccccttaacaaaaggtatcacggaccccttccagaagaaatgggagggggttactatagcctggcccagacactatctagagataacatgcttggaaagacttacgtcagtgatgctttggataatttcaaaaccggtcacattctcatcccacttcactcgtaggcctccaacagctggcttcacacagtcccacacctcctctagtgtcccatatacaatgccttctcctcggtacctggagcacgaaaaggaatttgaccccaacgcatcaatcaaacttgttatcttgagattgtatctaaggactagaaggtggaccatgccatgtctgtcactactctttaggacagacttgcagagaaggggctgaaagtcactagccccgcctcccttcaggcctgcagaaatggacagtaagctttcacaagaatacagtttgctggaaatgatttcattaaaaacagtaaggcttttctggaggacaagtgatcacaggttatagggttgatttgaatattttaggaggcaggcccataaagataccaggaagggtgcggcacctctggtaatctttgaacgaggcatgcacttacaggttccctggaaactccacagatggcctccaggaaactgaaactccattctgtcaaaaggcacagaaccacagaattttagagctagaagggctctggtcacctggcttaatcccctgttctacagaagaggggtaagaggcctcaagagatacgactctccaaggctgtgcaacccatacgtggaaaagctgggactagtcttgggcaaagctgtccccacagcagaatgtgatgaagaaaaagatcttaactggctgactccaagagccgtgggtggtttttaaaattatcttaaaagccaccaggcattctgtttccttgagcaacccagggctacttaatgaaaagtcagaagggtcaagcaaaactactcccatgctaccctctggcaacgacaaagagaggggttcatgctgtaatgaaaagtcagaagggtcaagcaaaactactcccatgctaccctctggcaacgacaaagagaggggttcatgctgtaatgaaaagtcagaagggtcaagcaaaactactcccatgttaccctctggcaacgacaaagagaggggttcatgctgtaatgaaaagtcagaagggtcaagcaaaactactcccatgctaccctctggcaacgacaaagagaggggttcatgctgtaatgaacacagaagaaaaccttagtatgcatcagatgctggatcagactttactggatttaaacaacatgtaaaaacctccttagctgcgaccacattctttcattttgttttgtttttaaacacctgcttaccccttaaatgcaatttatttacttttaccactgtcacagaaacatccagtcctaaacagcattcaacagccaggtgaccttgggcaagtcactgagtgaaaggaacagatacttaccacctgaagtcattgtgagcataacaggcccaatcttttttttaaagaagaaaacaatccccattggaatccctctcaatcgggtccaggggattggggagcagaaaacaacggggagaggaggcgcttgggggcttctggggacccgggctccacgaagccgtctccgcgaccccttcccgcccagctcctcactcacgccttcccggcaaatcttccagcctgctgtgtcccgccggtactggagcatcttctcggccacagcctcgctcatctgggctgccagcgccgggtccattgcgtcgggagctgcgcttagctgcggggtcgcgggtgttatgagcggcggcgctggatcccgggtgcctggaggctggagctctgggaggagctcgtagccccgcctctttccgcgcccccgctcccgaattggtccaggccctcagacggatcccgcctcccggagattggcaggacaaggagaccgcggggccaggctctccagttagcgtcagcgcctgggcgggtcccggacgccttgggcgggccgggtaaggtccagccgtatccgcctccttcatgtcccgctgtgggaggggctctggagcgccgggactgtgagatggccaatgacggtctgacccgttgggccgggccaggtcgcggacaacgtcgaccgtttgtttaagaagcgtggactcttgtcctgagtgcaccgaggctttcagcctgcgggacagtggtgcgatttgcattagaggtaatatgctagggcggctgctgcagggtgggagaggaaatgcgcgtggagactgggcgcgtgcaatggtgggagaggtgtgtggcaggggtgcggggagtgggggtgaagagaagaggacccatcgtagagtgtttaggagatggaaggtgaaggtctctgcccccgattgtggatgttcagaaggagaaagcatcatgactcccagccttggccacctggcagcttacctgagatggagaagagatagggtgagttcagttctgggcatatttagttggaggtgcctgaagggcctttagtgcaggtgtccaggagtcaatgcaatgcgctgacatctgcgagaggcccggctttattagagatatgggagttctctgcttccagctgccctggagctgcggggagtgagccagggtcgcatcttcacagcgtgaatggcaaggacagcctcggtttcccctcttctgcgctatcaccaactaaatatttgaaaaggttaatactgaggtctatttcttatctttcttttttatgtacttattgtttcctttaaactttcgatataaatgtttggaagagtagtgtaaacaaattgacaacttgaaagacctttttggaagatgtgaagggcagccaggctgtgaagaagacctggatggggaattagggagctcaagatctaaacccagtttcactcattattctttgagcttcagtttactccaaggtgaaatgggatacatcataaatgttcctggcggggtccggtggctcacgcctgtaatcccagcactttgggaggctgaggcaggagatcacttgaacctaggagttcgagaccagcctgagcagcatggcgagactccgtctctactaaaaattcaaaaattagccgggcatggtggcgcggggctgt

SEQ ID NO: 6841 - DNA, 6000 bp, Homo sapiens
ggtactgttcagattggggttctggaagtaaacaatgcactcaagataggcctctacccaaaactcggtctctctcagcctggaccactttagtaccccaggacaaagggcccttggccagtcccagactctcttgaactgttgtccccggataatttcctctacccttcatctcccatgaacctggggcagcaacactcaagaactgggattgttgcttttcccagcctgtgtgaagagactgaccttgacccatcttcccctgaccctgaccccagtctgacctcccgaatccagtagttgttgcagaccctgagagcttgggagctttgaaaacccttgttcaggaccttccggaaatgacagctggcatttctgaaattgagaacaaaggatgtggtgagggaatttggagaagaatcaaagatggggttgagtgggctgagggactcagtgggggttcactaggattgagcagtggcccaggaacttccttgaacacggcagagatttggtgatgtgcgtttactgaagatagagtgcgctcctagtccaggtagggtggggagaggagggaagggaatgacccagctgctagacaaatcctacacccagccaccaaatttcagcccttaggagagctggagagatttccctactaagcctacacatcttaccccagggttctgtttcagggccccaaatttttgcttccccttctctagtgaaactgcgaaggagtgtgaaaggccccagcccccaaggcagctcattctgcacctttcttagtgtggtgcccctctctgccaacccctccctcacctcatgtagacaccagggggcaccatggtagagaagaactgctcagaggccaccacaaattccggggagatgctggggtctaggaaaggacggtatcctgcaggaaggagacggtgatgatggggagacaggcttcttgcctccacatcctcccatcacaggcacctgtctccttcccctcaggattctccgcacaggtgtcctccttccccgctccctcacctgtatactccgggagtgttttctgcaggaagctgggcagccactcatacacagcgatgttctgaggggcagagaggggcgaggggaggcacaagttggatggtgtggggcctggaagggtctgagcccaaggacggcttccgtgtggagatgagaccaggaagggtcaatcatgggagaagcaactcagacaggagcagtgtgaggcctgtccccacaaggaaccaggggatttgagggagtgggggttggggaggtgataaataatcatcaccagccagatttctcctataaacagcgcgtgcctccctatcatttacaggggcttccctagacctcggctgtctggggaggggtttctgggtggcggttgtccacagatggggagctccatggggcagcggagtctcccgtgggcttgcacgcggaagggaggacgtcgcggggcgcggacggctgacctggtaggtggcgatgaccctcttgcgtgcgtgctggaacagctcctcgtcctcccagtctgggtgctggcgggccagcctctgcgcccacaggttgtggtagcggaaccagagcaggcccagcgcctgcaggaagggttcccggttccctctctctgccccgaaggctgcatccgacgtgggggcgcaggggaggagacgagcggtagcgtgatcgggggagcccacactcgcagacccccagccggccccgtcccgcccctgtggcctcaccgtacagcccccggggcccgttctgcccggtggcggggtcgggcgccgcccacatgagcagggggttctgcgagtctcgggggaaagcggggtcgggccccgacgccagctgtccccccgagaagctccgcagcgcgtcgctccaggagtgcgaggagccatagatggcgctgccgtccagccagcccgtcacctggttggcctgcggggcacgcggcgggtgagcccgggtcgagaggcggcggcgggccagggaaggccggggcccggcgggtgtccgcggctggggagtgggcgcctctcccctccaggccctgccaggcccgaagcccaggccccacctggctggggtgcggtcccttcccgccgccttccccgcctcaccaggtcccgggggttgctgggactccgtccggtctcggggtcccagcggctcctctggaagggcagcaccacgtccccgcgctggtcggggtcgaacacggggtctccaggtgggatgcggatgttgaggaactcggcggggcaaccgggcgtttccacgctcaccacgtcggaaagaacatggtagcctgcgggcatggggcgccaatacgtgacaaaccgtccgtattgcgccctccccacggccagggcggcctccaagtgtcctcaggagccaaaagacagaggtcccagtgccagctccgccaccagctctgcacgttagccccaggtagcctcaattttctaatctgcaaagtaagactatagtgagttcccttcctactcaattcataaagctgttgtgagaatcaaaatgatataatttatgtaggggtaccccaagtcagtcctcctccctctgggctagggggaggtaaaatggttacaaacacacggtgaggagagcggtggctggggagctcagttcccaagagctataatgggggtccagtgacacccctaggttggaataaggcgtaagagaaaggttagatacagagcaaatatctctgtatcaacatcccaaaatctctccgagatgaaggcagtctcgaagtgctgcgtagagaggaagtggttgggagtcggatgggtctcctgtggactcgcagacgggatctggcccctcccccaggctgagcagagcgccagatcaaccccactggtctccccctttgccctcaccaaagaagacccccagtacggtgcggttgtggagcgacggcaggccggctatgccccgcgtggctgcgttgctgagccggcgcgggttgggcagctgcggctcctccagagcctgatacacaccgtcggcgtaattggctggtacgcggcgctgcaaccggcagcctgcggaggcagggagcggggctctgtctaagcactccatcccctaggatcccccaaacctctccctaagcctccctcaacccccatcccacttcactgacagaaccttccctcaagggtctcttggccccgggagcgcataagattgcgctgtgtaggcagcggagctgctgggcgcgtgttccccgcagattccccgctcagggcctttcgcgccccggcccttcgcgagccacggccccagcacgcccgggcccccagaacgcaccaacagcaccacgctcgtggtgcctcaggttgttaaaccagccgtcatagcgctgcacttcccagggcagtgagagtgcgtcctgactgcctgtgggcacagagaagggcctcctcagcactacgctcccagctacccctcccgagcaacgaaggccttggccagtccttccccagctcgcggagcgcccctaaccggacccaagtgtcgggccgcactgggaagtttcccatcccgctgagctgcacggcgaaatgaccttccagtctcagggagccgcttgccgcacctctccccgccccacctcccagggatcctggggaacaccccgccgctagaggagcctgatacttgcccgatggacccagggatccagtcagaagagctcccaggagcatcagtgcctctggtcttgcacggagcatgccaaccctgcagcctgcggggtgagggtgggggtggtaggtggtatgcgaaagccactgttagggcgtcctctatgcctcccctcttgttcctacagctagtactggaggaggagcaccagctgtttccacttctggaaggtagctgttagaagcatcaccgaggaccttcatccaaacgccactctttccaggacaattggcagctctggaggcattgacactgttccccatccgccaccccatcagagagttaacccccgaccataggaacccactgggcaggagtcttctggggcatgtcagtccagggcaggactggtcaagcctcccagggtgtgcccaatgtctccaatgtttcacctccacccgcccccgatccgtcaggctccgcttctcctccaggaggcagggaagggaaaaaggttactgacctgggagtgagggactgcagcacccttccacaatgaatccccccttccccaataaactccccttctgcaatgaacgcctgtgcatgatgggcgagggctagggtcagatcccaaactctggtctaacctgtggtttagggtggtgttgggttcagatgtcttctttcctcttaaaatctttgcttctgtgctctacttcttgccttcaccctcactcttccagctccgccgatcctcagcctccccggctgcactctcacctttctctctgggtccttggtctcgccactgtgcaggtgtcggctcaggacagacctgcgccagtgtgagcatctggacctagggctcaccctcctgccgtggaggtggggcccttatttgcacaacctcttccagctcagaccagcccctgggctgggacacccgtgtggcacgtcgcccacgctgctataaaaggggtcccgcgcgacttccaaactcagcgccaacccgcagaaccaggaaagtaacggctacagacagtgagaaatagtttcgctcgccggctagaaaaactctgtcggtaccaaccccagagcgttgagagcagcccacctccacgcttccttaacggagaggtgcaggactcagacttcaccagcccactcggtcccagccttgtacgcaaagagacgccaaggacgcgctctcccgcgtccaggcagccccagcttgctggcttgcctgcccgcctgcgtgcagcactcggccggcgtgcagcatgaccctgtggaacggcgtactgcctttttacccccagccccggcatgccgcaggcttcagcgttccactgctcatcgttattctagtgtttttggctctagcagcaagcttcctgctcatcttgccggggatccgtggccactcggtaagggtgtcctcatagtgcaggtagagtgggggaaggctcatgggcagattgtctcctgagggacccaggacaggtaagactgtacaagagcctccatgaatagtcgaattgaggctcaggtggagtgaagtcaggagtctggtgcagcaagcacccctttccaaggatagggagagctccccatccaggatatcctggagaaggaccccagctgggtccttgggaaggctgctgcagagaatgggcacccagtccagtaatcctgaggaacagtctaggcttcttgtgctggagggcctcccacctctcccaggactaaagctgcactctcatcccatccggtgggtgatgaccttcaggccaaaaggacagatgccagcagctcagactgcagtgttcccctttgcactgggttgagacacatgtgtatgggtgcctcatcctcaggactgagactcccacattggattagaagttggagccaactgggtgcattgtcttagactttccccctctcccagaacctaggttgtgcatttttcagttctgggaggacccagcttttctgcatcttaatctgtgttgctttccctggaactggtgcacctaggagtatctgcattcccacctcctcccctcggagatcaggctggggcctccctcttctgagggaggtgacccctgcgtgcctagcacttctggactcactgagcctcaccaagcagtgactggaccaggaggcagaaccaggaccaggcgccagacagctaggggagtgaaggtggtggaagagtgccaggaagtgggggtggaggggaggtgctgttagggtagatgggaaatggggcta

SEQ ID NO: 6842 - DNA, 6000 bp, Homo sapiens; identical to SEQ ID NO: 2821

SEQ ID NO: 6843 - DNA, 6000 bp, Homo sapiens
cgtctcccgccgcaaaaaaacacaaaacaaaaaaatacgaacagcatcaatctcccttttctacccaattaagctaccctatatttgccctacaagagtagtcactcttcagtagtttgtattgttcatcaaaagaaaaactgcttaaagaggggcatggcccccaggggaaagggacagtaccttcaggatggagacattggcaattcgatccaaagggctcatgagatctgcctcaatgaataaatccttttttccaggaagctgaaggagacacaatatgttgggtcactcacaggtcacatgagcttccgcagctgagaagtggcccagccacccatctaacagaaacagtctctgaggtgggagggcactaagtatcgtctagcccgtcaccttatttattatctgtatccacagttgacacttctctgtatatttacctattttgccttctcgttttctgtaccagtgggaagaagacatcccaccttctttctcaggttaactccttgtcactcaacccttctgctcacctgtgaccttggtctgcacctcactccccttctctgctgcctcctccactctggctcctaaccacccctggtctcctgctgaacaaagccaaacacaacagaaccccaccttgcatttttctcctaagtacaaaataaaatagcacacgttcactgcagaaaacttagcaaacccaggacagtcctcaccccatcacccttccactcccccaccccacaatccctgtcatacgattcctgcaccaccactcctgacaccgatctcaatgtctgttcagaggaaggagaggtcacagttagtgacagggaggggaaagtcactgggagtttcctctcacccaggccttcacaaatgagtagggtgttgacatggatggatgaagaggacagtccagcaaagatcagaaagagagcataggctgtgtagtaaggggacgattttgccctccgagggacatttggcaatgtccagacacatttttggttatctgactcagggtaggggttttactggcatcttgtgggtagaggccaggggtgctgctagacatccaacaatgcacaggccagcccccaccacaaagaatgatccagcccaaaaagtcaacagtatagagagcaggaaatctttttttttaaatcttatttgttgttttgttttgtttgtttgttttttgagatgaagtctccctctgacacccaggctggagtgcagtggcgtgatctcggctcactgcaacctccgcctcccggattcaagcaattctctgcctcagcctcccgagtagctgagattacaggtgcctgccaccacacctggctaatttttgtatttttagtagagacggtgtttcaccatcttggccaggctggtcttgaactcctgacctcatgatccacctgcctcggcctcccaaagtgctgggattacaggtgtgagccactgctcctggcctgtttttttttttttttttttttttttaaagatagagtcttactctgtcgcccaggctggagtggcacgacctcagctcactgcaacctctgcctcccagggtcaagcaattctcctgtctcagcctcccgagtagctgggattataggcgcatgccaccacacctggctaatttttgtatttttagtagacatggaatttcgccatgttggccagggtgttctcgaacccctgacctcctcaggtgatccacctgcctcagcctcccaaactgttgggattataggtgtgagccaccacgtttggcctttttaaatgtttatttattttttagtttcccaaactcaaaatggtcaacagagggtaggaaatcttgaggtaggtgaatggtgaaaaatagaccaaaatagttggttagaattgagcaggaagggctccaaatgccagcttaggggagtgtggccttgatcctctaattaacagggaaaaataaagcttttgtgtattgaagcattccaatcagctggaaatgttagaggaatctgaagaccagagaaacaggaggcagggagtccacttagggagttaataaaaccatccacagagcgcaagcatgtggcaatgaaagaggcctgatttaggctggtggtggtgtgagcaaacatagattaagagatacatggaatgtgtaatataatttttttttttttgagatggagtatcgcttttgttgcccaggctggagtgcaatgacgcgatctcggctcaccgcaacctccacctcctgggttcaagcaattctcctgcctcagcctcttgagtagctgggattacaagcatgggccactatgcccagctaattttgtatttttaatagagatggggtttctccatgttggtcaggctggtctcgaactcccaacctcaggtgatctgcctgccttggcctcccaaagtgctgggattacaggcatgagccaccgcacccagcctaatattttttttaatacttgaaagaaattaacagtgttagtagtgtttataacttatggtagggctataagtagttttcttttcctttttactttccttaatcttcttacattttctataatgtgcaagtgttattttataatcaccataaaaaagttatgtgtaaagaagtatccatggaactcagcaactggttcagttaagtatcagggtgaaggagaggcaaagatgattctgatatttcaagctgaatagcagtgcacattaacaaaaattaagtcagaagttagttaggagaggacgttattgcctggaaatccactttggccatgctgaatcacccagtgggctcaagtttctcttcttggtctcctctacttgatctcacctgaactagtggctttaactagcacctcttttaaattcttcagacattgttgcaagtcttttatgtgcatgtcactgtgcaagcactaagtattaaagagaaagaagccgggagtggtagctcaagcctataatcccagcactttgggaggctgggacgggcagattacctgaggtcaggagtttgagaccagcctggccaacatggtgaaaccctatctctactaaaaatacaaacattagccaggtgggctagcgtgcgcctgtaatcccaactactggggaggctgaggcagaagaatcgcctgaacccgggaggtggaggttgcagttagccaagatcgcgccactgcactccagcctgggcaacggagtgagactgtgtctcaaaaaaataaataaaataaaatagaaataaaatctggtctaagatgccctgcagttctcatcttgatccatcttccttccagtcctcacaatgcagctgcagttctacatttctatctgctggatgttacaagctatatttcttacgggcatcttaacttcccccatccaaacccaaacaaatcaacttcccccatcaaacctgttcctttttctaattatttttctcatttctattcaatgttaatacaacaaatatttattaagcacatggtgtgtgcttgactctaagctaggtactcactaggtagtgttgaacaaaacaaacatgatccctgcccaccttccagtctaatgaggaatacagacataaaatgaataactaaatgattacacaagtaatccattaaaatcacagtggcagtattattttcctaataacccaggttaaaaatctcactcatttttgcttctccttcaacatttataaccaatcagtaagtctttgagttttctttcaccataacttaaaaatccatcactttccttcattcccactgctaccaattttgtgtgggcctttatttcttgtctgatctacggtctcctaactggccttcttgttgcccatttacgccaccacacacatcactattagaatcatcaagtattgtctcatgccacaaatggaaaaaaaatttttttcagtggctactgtgtaactgctgatgggtgtcttcccttacatgccttgtctttccctggtttgccaactttgctcctaccaatctatctgcctggagcatgcttagtctccaaagaaaatatgcttattactcacactcacttccttgaagctcctagatcatcaccccaactagaaatgatcacttactgtgaactcttcgggtacactagctctatcactcatttaccacctgtgtgtgataatttgtgcttcatacagctcctactggagtggtaagatccctaatggcaaagatgtcttaaccatctttccgtccctagggatgcctggcactaatggtgtctcccttgcctgtatgcggggttggggggtgatttccattaactctctggccaggttccaaacagctcttactactccctggattcattctggacctgctggggaagcgccaaggacaataccaggggccaagaacaagatcaaaggggcacggcaaggaagaaatgtgcatccaatgagtgctaaactgtagatgcgataaaggcgtcaggcaagcactgacctgctccagcagatagatgagctggtctcgagccagcctcttcagcatggagaagtcaggcagctcaggggcgtccggccgatggggaaaagccatggcagcggtcacctgcgccgcggggtggaaggacgcccttcgttctgagaaggccggccgcagcccagggaagcgcaaggggggctatccttcaggcctgggcaccgacttccagagaccccagatgggccctcgctcctcagcagcactccaggaatgaatggccacctccaggcaagagagctactacctcggagcagccttgtctcagacctgcagccaccgtgtctcgaccctccctccctgatccactctgcccgtcagcaggattccggtctacaccccgcagagactccgcagcgtacgaggagaaccccgccttctaccagaaaaagaagcgacttcctagatctcccggaagtccctttcgctcccagcgcttcgcgtaccaggaaggggacggcgtcctgaaagggacatttgaaaaacggaggcaacgcgtctattaattaggtggcggcgcctggggtcgcagcactccagaggctgaggtgggagaatcgctcgagtcagggaggcggaggttgcagtgaactgcgatcgcgctactgcaccccagcctgggcaacaaagctagaccttgcctcaaaaaaaaaaaaaaaaaaaaaaaaaaagacataatgaatgcatcaggctagctaacaatacctcaactctgatcaatcataccatcatatcatttcctggtgagatgcataggaaatacagagcatcacctattgccaaaaattgaacctaatcaagcctcaagatctaactaccagtttataggctatatagagattagcaggaatatgttaagacaccaaaggtatgaaatcaaccatatccaaaatgtaggaaattatatgggacaaatgatctgtcgtcttcaaaaaaatggcaaagtgggaaatgtgggaggggaaaacacttcagaataaaagagatttaagagatgtatcaacaaaatgtttcaatgtgtggatcttttttggataataattcaaagataactgatttaaggaattactaaaacttttcgggtattgtatttcttttcttctcttttttttcctgacagagtctcgcccttttgcctagtggaggagctcggctcactgcaagctccgcgccacaacccccctgccgccccaggttcaagagattctcctgcctcagtctcccgagtagactgggattacaggcgagtgccaccatgcccggctaatttttgtatttttggtagagacggggtttcattatgttggccaggctgatctcgaactcctgacctcaagtgatccgcctgccttggcctcccaaagtgctgggattacaggcgtgagccacaacgttgggccaggtattgtatttctatgttattattatt

SEQ ID NO: 6844 - DNA, 6000 bp, Homo sapiens
gctcattggaattagaaggtgagtagcactaaagaaatgagaaagaacactagtctgctgaaataatgggaccatatgtaggcagaaaataccaaaaatgagagtaaaatgttgtggctaaaaagtaatgtcttatgacatgtaagtaaaggatcaatctcctttgaagaacccactaagaaatgattgattaaaagtctagaattgtgctgtgtaatagagtagcaactaaccgtacttggctatttaaattaattaaataaaattagaaattctgttcttgatttgcactagccatgttttaagagctcagtagtcacatgtggctagttgttgccacattgggcagcatgaatagaagaaatcctcatcattacagaaagttctactggcagcgctggtctagagagatctgcttgactaccgggttagcattgtgttaagcatcagaccccgaagagatcatggaaagaacagcatgctcgccaagtgtaatgattaatccatggcaggaaaaaaaaatgtggtggaaagaaaaaaaaattccactcctggaatgggctaatatgatgtagtattgacatttgtgttataagaaatagacaagtaaggaaagttttgagctgaaatggaaaggagctaataaatcatacgatttgaatatctcaccactcccttatgaacattcataaagcattgatttggaagaaaatatccatgaaaagtctctcttcatctgttagtggctgattgtattttattggtcattcctcaaatactattcaaccatgacttacttcctacccccaatgtttttctgttataacatttttgatcatgcatttaaataaatataccccccatcaaaaagtgcagactcttcccattttacaaaaaaaggcaagaactttattttaaacaaatccttagttgtgtgttacaccatgtccatatctaaatcaaaaatgataatgataattcaaagggaacaaagggcttcataaaagcacattacccagatgtttctcttggccaatattttaactaaatacacagtggatatgaaaggtacagtatggcacttaaataaataagagcaaaaagaagaaaacatattgacagtccaatgcaataggtttttgaacctttggtatatgtctcaaataagtcaccgtaaacacacgttagccaatagtgtttagttgcaggtcttttaagccagtaattttgtatgtgtgtctgtatatgtgtgtgtgtttcaaagagtaactgaaaaaataataaatcaggattgacatgggatgattaaggtctctggtgtaagcacacaggtaaattcaaatcatggcaaaatgaccgtgcagctgtgttgcacaacaaaactatgtaagaaaatgagtgagatacaccagttacaaatgctgtggctcagctagacactcttgatattagccaaaaaaaatctttttaatgttaaccaaagtccacaagctggaaggcagaaatatcctgaagctcgtaaccgtgtgcctaactgtgcaacaacaatctcacaaaagtgttgtagttgcatattgcaattccctccctcccacccatcccccatccctagtaaacagcaccagtgcagtttgagttagaaaactggaaatattgagacattcctaaggttttcatcacgactaagggccagtcagatggggctctaatgaaaacctctgccatggccgttctccaataagcaccccatgtaattccctctaagtttgcaaataaaacatattaggtctaatgtaaggccagattctggaaaaaaaaaaaaaaaaaaaaaaaaagctggcatgctattttggattgagggaaaggggcatgctggtgggggagatacatgaagagtgcctcaaggatgtttgtcccatggctcaggataaagggatgggttgagataggtcacaaattttatatcaatgaagtactcaactcacaccattcaccagaataaagagctcagcagggctaagtcctacttggtagctgtgcaagttcagtgttatcaggatcaggctaggccataaacagaaagggaccaaagaagtctaattgatccatttcatcactctacccaatcgtctctgtagaaccaattaggtgatatgtgaaaatgggtccacttttcctcctttcccattggtgcaaaatcttcttttatccagtcttatcctacatcttaatggtgagggtcacataaatgagggtggatacagccacgtctgagcagtcatctgccttggggctccttgccatcccccagaccttcatgaaacctgccctctcacacataggcagagtcactggactgagtcctgccaaaattgggaacactgacccttggcaggtccttgttacgaatctcatagattgactttctcttggcctgagcccctcgcacagccagcttgatcttgcgccatcccaggtggttgagttcagccaggttgagcacaacacagatgccacttacagcaaacatgaacactagaaagacagtcttctcagttggccgggacacataacattccacctccttgatgcaggggtagcggttacactcatacaaccctgggacactaaagccatagagaaaatattggccaaccaggaacccaatttccagggcatttcggaacaccacttggataatgtagaagcgggagatgccttcctgccttctgagcttggattttgatgcagtgcgtagacctgatgggtgtggagtcagctccttaacctctaaacaatctggctctgtctccttactggtgttctctgtgttctgcagcaccccattcacaatagcattttgcaacttcttatcttctcgtttgcccccaccactgcccccacccccagttcctccaggacctcctatggactcaggggggtctctgtccagggctaggaagactgtagagtagcggcgttctcgctgcttggcggactggtgcacagagtaggtgatgaagcaaagactgggggtacacaccattatgatctggaagacccagtaacgtatgtgggagatggggaaggcgcggtcatagcaggcctggttacagccgggctgcagggtgttgcacacaaacatggtctgctcatcatcgtacaccgtctcccccacaatggccacaatgaggatccggaagatcaccaccacagtcaacaggatcctgaacggaggaagagggagggagagaggttctcacgggctgcgtcactgacaggaaacccctgctcctcccttccctttgctggtgtttaccagtcttttgactggggagctgtccatcccgggctggtactgaactaggaatctgggaaagctttttgtctcttccttttctgctgagtgctggtaggctgggaatatttcatattatagagatcccaggtacacacatctccatacactggacatagtctacttgcaacagatagatttcatctctctatatagaatgtatagaaacacaaaacacaccttcactctggatatggcaaatgcacacagaatacctttacagatggtgcatgcttcgaggtctacacacagggtgtgtaaataactactccatgtgtatatttagtttattctcaacatgaatattaaatttaatgctttatataagcagatggctatgaatatatattcatatatattgaactcatatatatataaagctaggtagatagagacatagatatagatacagacccaaaaatggcaattgggtgtgtaggctcggtaagtttacaccgccaaataagtttggtttagtaattatttgttgagaaaagaggcatctgctctgaagagcaaatccatctccccatttgcccttttctgtccaaatgcaatcctgccttctttgtagattctatttagggaaccaaatggagattggctctgactctggagagtggagggaccaagactgagccagcggctccttttctgatgtgggaagagtgaagccccagtggtgcttgatggggaagggatgggcagctggttaggagtagctagaggaggggggcatcgcggggcgtcgggtaatccctcatcgccgggaacaccggagccttgacctaggacgatggggaggaggcagaggacggactggggattggagcgggagactcagtccaggtgtgagaagggactcccgggggccgcccgacggggccccctgaccgccggcttggcgcccttacctcccgatcatagtggagtgctgctgcaccgcggcttctagcagcctctccaagatggtccattcccccatcgctgtgcatccggaggcagcagacaaagactgggcagcaccgggcacgttcccgctcctggcccctccccgggccgcacttccagaatgggagtgaattgcctcccaattaaagaagcaattttttaaaaaatcctcgaatccccctttccttttattgtacttaaaagagaagaaatggggaaagaaatccaagcgcgtcccgaccgatggggcagttggcgcggtctagagagagggcacgaacctcgggcgccgtccggggttcgggtctggatcccgcggacgccgggacgaggggcggggcggggtggcagcctgcaggtcctccagcgctcgcccgcccaggagaagtctcagcgccgctctccgccgcaggttgggggccaggggagggtccgaacaccggctctgttcctgctacttcagcgggcacctggcgctccggcgcggcagcctgcgaggccagggccgagcgcgcggagccgaatgctgggctcggggatccgcggccgccgcctctaatccgcccttaagtagtctccgcctgcgtcacgccaggtcggcggaggggagcagagcgcgccgtgcggctgtcgctgcgcgtcggagcccgaggggccggggacgcgcgcggggggagaggggcaagagtcctggaggcccggcggggagcggggcgatttcgaaaggaaggactgcagcgcccctcggggcttctcggggagcccaggtaacctcacctgaccgccagacccaagcaggcggagggggagccgggagcggacgcgtgggtgagtggggaggggagtgagtaggtatcttctcttctctcggtgcatccctcaccttttcgctttttgcctcctggagacaactgaaattccttccctagatggagatgctggctgagggagggcgagtgggggcgaccacttttaaatctcccttaggggacagagtggctgagagtgcttctgcagagtggctgcggttcggtgcctctgtggatccgacagtgaagtgagaaaggcttgatgggaatccatttaggctgaagggtaaatgcaggtgtggagctgtctctcggtataggggtcagggcacacgagcgcatctaacaggtgcctcgcaaagagcaagtggggtggccatggttaaaggtctcgcttccccttgcactaacccagatgctcggctctttttaaattattgctattattttactaatgggaagggggggcggggtactcgtcaggtaaactgtgatttaatctgaatttaagacccagtattctgctagcagaaacagagccactcacagcctcgccctgcccccacttgccttactgggtttggctttctcccctcaaccagcagatcccggtttttaaaattcacattgtgttgtcagttctgtctagagcaactacttaattggttgctgaaaaattgaaacaacctcactaagctgctaattagcccaggggtcagtattaggagacactgtagctggcagtgtttgatgtaaatgtaccaaaagtccaatgggaaagtaattgtcatcctttcgaaaacacgaccttgaaagggttgctaacttgtcctaggcatataaagggacctagccttaattatccacagggatcatagcaca

SEQ ID NO: 6845 - DNA, 6000 bp, Homo sapiens
ctctttaatacaacttctgcttgtttttacgtaaacttacacattcatttgatggaatcaaaaaagcacttttttctttaatgctttttaatggcaatctggcaatatctatcaaaataaatatatatacgtaccctccactgacagtttatcctacttatacaaacacatgtaaaaaggctgctcactgtttctaacagtaaaggaacggaaacaagctaaatatcaacagaggtcaatttaaaaattatatacacccaactatagaatacaatacagctataggccgtgcatggtggctcatgcctgtaatcccagcaagtgtagtaggatgtgcagtaaatggaaagttgttagtcctgtttttaaatccattctgccaatccatcctttgattggggagtttaattaatttacatttaagttattgatagggaaggacttactactactgttttctgtatgtcttacagcttttttgttccttatttcttcccagtgagcatatgtaagtctttaaagaagtctaagtataaatgagagaaaaggtaagaaagtaattaggagaatatgtggagtccagggattatttaaaacaggaaaacttgagcatgttcaaatactgattaagttggccaggcagagtggctcctggctgtaaccccagcactttgggaggccaagttggagaatcacttgaagccaggagttcaagatcaaccggggcaacacagcaagaccatgtctcttcaaaaacaaaacaaaaacgaaaaagtaatcaagatgactgaaaatgggaaagaacaaagatagaggagtaagaggggacaacggacagaaaagataactgagaaagcaggaaaagatggggagatacgtttcctccactgtaaaaggagaaacgaagaaagtaaatgttgagcttccctgggggagtttcctaattcctcatttggtgtatttatacatttttctagtaaactcaattacttggtttccggattcatcaacaacagagtagaaatagtcgatcaaaaagcaaagaagagctactacaggcaagttggcagtaagaagtaaaaattatcacttaatagtcattaaatatcagagaggaaaaaaacctttagcaatttggcaatatctattaaaatataaactgtacatattgtctgaccaaacaattcaatttctgtgagtatatcttacagaaataactataaaaattcaccaatatattgtttttaattaccaaaaaaaaagaagaaaagggaacacaacgttttgcaacacaagactagttaaatgaattaaaagtacatctataggctatatagtgaggtaatatgcaaccattaagattgaactaaatgctggggcatgaaaagatattcaaaatatcactttaaatgacagataattgcaaaacagttttatagtatatttttagtatgatcccattttgtattatatacctgtatatgtatgtgtgcgtgtacacgttataaacagtatactgcttagtactatactaaacaattattagtataatattggtaccatactaaaacatttattggtataaatgtttccatagtattatactatattggtacagtattataaaaatattgggatagtttagcatagtattataaaatactataaaattgttttgcagttcatgtgtggagaaaggaatgaaggtctgaaaagataaataccagtgttaaaagttgttttactttaaacatttctataatttgaatgtttaatactagagatacacataaaacttcaactatcagaaaaacgaccatcaaatatggaaataaataaccaaataaacatattacctgttggataaaacacgtagttcttttaaacttggagccatggaatgatctttataattttctcgagagaaaaatgtcttaaggccatttttgggggaaatatccctgtgaaacaaagtaatttacttacatttgacaattcaaaatctcatgctagactatgacacataatggcacaattgtaacttacaatttcataccttcttacccccccatccccagacaatctcttcttactatgtttaatttcatataccagatctgtgggcttagaagtgttacttcttggatagctttaaacccaggcccattatggaattctccagctccaataatcagctctacattttctgtagtacacaattaaataaatgtcacagagactggaaagttaaagatagaaaagactgaagtataatcaagggtctgtcaaaggctggcctcacttctggctctaggacataacattaagatacttggttgctgaaaacacttctcaacttatttttgtttcatgcactactgtgctgagccaaaagacactacaaagactaaatagcctagctattttgtttactttggcaaatgggataactggtttgctaaaaccacctcaaaggtgatatgatttttcataacaccataattaatttagagactaacatattatattcaatgctttccatatagttaggcatccaaaaatgctgtttgaatgaaggaattaaaaacttgaaaacactgaatccattaacgttactagggaggacaaaggtcagtaaaattccgtggaaaaggataattccaagggctacaatattgtgcaaaggttctaaaccacaactagttccacaatgccggtggtatacaagagcatctgtgctacatctgaatgcatactttatagcactggcaaggaatgcaaatgtgcatacctcttacctaatcaaatggtaacttctgggtgtcctagtgcccagataggaaattctagcatatttgctccatactcttctcctttttaaactgttcttaaaggcatttatccaaaaaactatattaaggtattaatggtaaaattagaaagtcttatttgctatgcatcagtatagtttcttattaccttgtcgtggtattgtatctgtgacatctcaataaattcttaagtttctgcacatcatataaaaacaaagtaaagggtctcagggattgtgagctccctggggatgggagtgttgttagcaataaacaaatactcaatgaacatactgacttaatagtctgagtcaggtactattttaatactctttgtaaccatttataacatttgatcctccttggctggcttagtaaatgtgtgttaaaatgaactaaagcagcacatgtattagctagatggctacaaaaccactatattatttaaccaggttctctatttgcaaagttctcatacacttttaaaatacagtctatgcatttatatcatttgatatagatttcaatataacaaaaagcatgtctattcttaaagagggtcttttttattacttgtatggaaatgggccaaggttcttggactcaagaaaattccagtatctctccttcacaggagaccaacaataaatacctgagggaattatacctaaaaataatttgagtgctgaactgtgttgttccactataggagtggaagtacagtcagccataactctagcattccgtatgtgaagatgaggatagggtaaattctgagaccctaaacttgtattttctgtttcctccaaatctctctatgccagaaatctattttcttatgtcaaccatcagccccactacactcctcttcagtggattacaaagtggctacaactcaccaattcagtcctggttcacttatgaccatcttggagctcatcttcctagatttctgcttcactctagctcacagttcacagctgcctggctgcgaaggctccaagaggcaggatccctccagaacttactcagctgagtaaaaacaaaaggccaagatcaaaagcaagtgattggctaggccaggtgctattaggtgaggaagaatctctccctaaacatctaccctcaacagactgtggcacctaaaacagaatacagcagacccaaggttctttgtagcagagcagcaatgacgatacaggacgagcccttttccatttaatctacgccgggagtgttactctcaggacactcactatggaaataagagctgaaacagaacggtgttctcattgcttacatactaggccacttgatggcatggaacgggaagtcaactcagttttccattcccttactgccaaaataaatcttttgttttcccgaccatgctttgttatggggcagattctggcaggcactttatgacaaaagctacctcgatatcaggaatcttaggcctttcacaaagaacctcacatttgagaagacttgaggtcaacttaagtgacatttcacaagatcacttacagacatcatcaggactacaaatcaggcttgatctctcatgttcagtacttctcctgtgaccccaggcagactgataaagtgacctgcgagaacctaatcaaatttaggagtcggtctctcgacaccgaacgggcccgaccggctcccacttaatctacctctcacacttcgacccagtgtggagctgggggggaatagtcgaggaaggcaaaagaaacggctgagggaaaggggacgcaaagagaggggaaacaaggttccagaaaagcaggtaaaagggcaagcaaagcaggggtaggagccgcgcagagccaggagcaaagggtcctggcccggccgccatgttccctcctcccgcccctgcatgagcacgcccgctggcccggcagcgccctcccgtccgcgtctgggctgcaacacagcctttccgcccacctcatggtccgcggcggctcttgcccaggccgcagccacacaccacacacgctccaccccactcctcacattgtcgcgcgcgcccaaaaaagaccatatttaaaggatgtggccgcgccgactcggccctgcgtgatgacgtctcagcgacatagtgggcggggccttgcgtcttgacggctgctcccctcctttcctcccgccacaagcgctcgctgtggttctggcagcgaagtgcgagactgggctcgccaggcggaagtggttggagactgcgtgttttcctagaaagtcctcgaccttcgtcggggagaggaggggagtgataaattggaaggcggacaagcgacaagtgcggtactggaaagacccaaacatacttggttgtgacctcaggcaagtttcctgacttccgtaacccaaactcctcatatgtaaaatggagatgaaattgttactgctgcatcatacggttttttggaaaggattaaatgaaacaaaggaagaagctgtgctctgcacagtacctggcacatagtagggcctcattaagtgctccttcacctccgctccactccccatccagttttagctgtgagttcaaacactagttttgttctcatccattacggaaagatttattgaccgtaaacagagtactttgtgcttggtgctgggtacacatggactaagactgaatactgatttttccagtgctttggatctctggcaatctaagacatttacattaaatacaatagaaagtaataaactacataagaaaggtgtatagattgaggttagagggagaggaatagctagtgtgagggacaaaacgcagttttgaatagtattgagtacttacatgtcagttgctgcactgagcacctgccgtgtgagctcatttgaagaatgtgggtatgtggaatgaagagaaagggcgttctagacagaccagcacaagtgtcaaaagacaaaaatttgacacatctaaagatctcagttggccttattgcgattctggaatcaggcaacacttcattccataaaatggaatgagtgtcccaatgagtggaacagaggaggttggcattacggacagaaaaaaggtctgtagaaagtagaaacaaagaacaaaaagcagattgatcatttcaaagttactttcctggtaaggtggagacagacagtacaatagaaagat

SEQ ID NO: 6846 - DNA, 6000 bp, Homo sapiens
cacctacctttttcaagtcaaagcaccagagaggagcccagttctcttggtacttagactgtgaatctaaggagaaggggaaaaagagaaatattaactctgaggagttcaatccaccatttccagttcaattggaaatggtgattccagatcttttggagtctttgatttcacactcttgactactaaaagtgattggtgccattgaagaggaatctaaattattttactctatttcagtatctacaacatacctaaagatatgccaagatgttgtataaagaaggctgagaaacactggtttacgcaaacccccaaaatacatattatttgaataatattatgtacaagccttgtgttcattttcaacacagcaaataatgttccttctggttggaatattacagttattccaagttcttagggatttttcctaatacaagacactaaaacagttttcaaaaagaggtacaagacaccagtagtacaaatgaattattttcacataataatggtcctctggaaatcccaataaaaaagaagtctatttagagaatataagaagtatatttaaatttgtttcaagagaaaaaaataaagaaaaacgaatttgtctatgtttgggggcagaagaaataagaaaagtaagttacttaatcagttattttttccaggtactattccatcctcccacaatttacttttcaatcatacagattccttttcttttattcctaatctatgatttttctctatttggaggctttatgaaatgtgcttcccaagttttcttgccttgcttctgactgcacatggctttgaaacttaagctctgagcctcaacagacattatcagaattctaatgtacacagatgtgtttgaatgggacaagtccttagaaaacaatgaatcaagaataccagtacgtaggcagggcatcatggctcatgcctgtgatctcagcacttcgggaggctgcggtgggttgatcacctgaggtcaggagttggagaccagcctgaccaacatggtgaaaccccatctctactaaaaatgcaaaaacttagccaggcgtggtggcgggcacctgtaatcccagctacttgggaggctgaggcaggagaatcacttgaagccgggaggcagaggttgcagtgagctgagctgagatcctgccattgcactccagcctgggcaacaagagcgaaactccgtctcaaaaaaaaaataaaaataagtaacaggtatacagggcaatgttgtgattgaacttttttttttttttttggagactccactctgttgcccaggctggagtgcagcagtgaaatcccagctcactgcaacctaagtctcccgggttctagcgattctcctgcctcagcctcccgagtggctgggattacacgtgcatgccaccacatgcagctaatttttgtatttttagtacagtcgggatttcatcatgttggccaggctggtctcaaactcctgatctcaagcgatctgcccacctcggcctcccaaagtgttgggattacaggtgtgagccaccacgccaagcccagctgaacttttaaggaaaccagacatactgtccatatttatgggtttttttctgcatataaaaaggagcaaattgaattctcttttaggagggtccatgtaacgtggaaggggtaatagaagactcccagccgggcatagtggctcagcctgtaatcccagcactttgggaggccaaggcaggtgcatcatgaggtcaagagttcgagaccagcttggccaacatggtgaaaccccgtctctactaaaaatacaaaaattagccaggcgtggtggtgggtgcctgtaatcccagctactcagggggctgaggcaggagaatcacttgaacccaggaggcagaggttgcagtgagcggagatcatgccattgcactccagcctgggcaacaagagtgaaactctgtctaaaaaaaaaaaaaaaaaaaagactccttagctcatcaggcaccatagatcaagaggaaatcagtttgtcctttggagacatctactaaagaaggttttgcatgtcactcacaagtgctatgtggagaaaagctgaaataaggacagatttatctagaaattcctgaatccaatgcaagctacaaaaatggaaaggacatggataacagaagtaacattcattaaatgtttacgatttgctatgtcttttacatacatgtcctgtcttctacttcaatagtactcaaatttttagactcaaaccatgagaaaatttctcagaatttctcctcccaacaccacctttcttcagagttaaagttatccgtgggggagggaaaaatatatatacatgtatgtatgaatgtatgtatatatatgtatattgggggaaaacctgcagaaataaaaatacagtcacttctactacctctccaataacccacactttaagtgtgacaatactcagaatttaactcccaataacctacaatgcatcatgaatacctaaagtattttgaacataggcttttgctttgctaatgtgcatttaacatcccagtcataaaaacacatcttaaaacacacacacacacacacacccctagatatagcaatagtagtatctactcctgaaaatatcctcgtaacaaaaaaatcgaagagaaatactatgatagagtaaaatggaatgatgacaattagagaaagtatgaagggaaattccaaacatctgaaattcttctaaaaatagtctattaaatgtcagttatcttggtttccatagaaattcacaagtgtctacaaaaagtaacctattcctactttgaaactttacgactgttcttgccaataacaccacatccttataaacgccatatcggggacacaggaaaggaagccacatatatccaagtggtatgcagtatgttcaacagaccttaatagaaatgaatattgcttgtatcatttaacgtttgaagaggagcgataaagactattatcatttaagagtagtgagaagtacaggtaattctcacactagtaggctaatattttactagccactcattttaattcgttgatcttttcttccctgaacaagtatacctaaatctgggatgtgtgtgtgtgtgttttatcctacctttattctgtaccttaaacaacacatagatggggaagtagagtgggtttggttttgttttttttaaataatcgacaggcgacatacagtttaacttcacagggttgtttaccagcaggttggtgttccgaagaagcacgcagtaaaacacgcacaaaataagggtctatcaaaataattgtatatattattatttcgagatatatatggaaagatgggatcgcaaaacatctttaacagaatgggtaacattccgttcaattatcagtaacaaattcccacagaatctttattcctcgctatttgtaaacaagagctgaagccagccgggcacccaggagcattccgccggggccatctgaggagggggactcccgcctggatcccgctccatcctcgggccacgagaaagccctatttgaactcttctgctcccgcgtgggggctggagtccaccgtccctgcttaactacactgcagctacccgggatccttaagcttccttcaactctctgcactttgccaggcacccgaaacccacggcggctgggcggccctgctcccggctctccgagcctgtaccctcggggaggcccggtccggaggcgccccgcgggaggcttaccgagcagcgagcctatgaagatgacgacctgcacggtggtggtgaactggcggtacagctgcgcctcgccgaactccccgagcgcgctgcggttcacacccgcagcctcggcgccggacgcgttgtgcggctcgctggcatttggagagatccagctcccgttatgtcccatggcgaggctgggactccggctccgcgcgccgcccgcctcggagccccgcgcggagcctctcctcctccgggtgaggagggacgcgcgggcgcctggcggagtcctggagaagccggagcagccgacgggtcccctcacgtctccacatcgccaaccccggcgcccgggaggcggggagggagggaggcgcggctgcgccccatgcccactccctcctggatcccagtcagcagccacaagaaggcggcacggtcagagcccgccgagcgtcgtccgtccctcctccagggtggtcagcgtggcccagcccactcgacaggaatggaaacacagaaggaggcattcgatggtcaaggagggcgctctccgctcccgctgcctccttcaaccgcgggtcctccgcccctcgagggctagggcatccctctccagtcccctcgggctgacgcactcgacccctctccttagcgggaggagaacgtttggccgaagctatttttcagtcctgttggcttcgaggctggatggcgatgtgaagccaacgtaatgcccacgccgagtggccggagccacgaggggacccccgagtgcccgacagcgcccatggcttgggtggaaagccctgagcgtccccagcagcctggccctgcgcccggccgcctgccaagacgcccgtgctgggtcctgcttcccagcccctcacttgtggctccgacctcctgcctcagcactggcgacggggaccccgttccgcagcgcctttttgcctctgcatggctgggcgccccctttcttagcccccctcggtccctcggccgctagaacacagcttgacagccgggcggggacgaaggaggacgcccccagtggggcagtggcaccgtctgcgcggccgccagactcggtgcgcgcctggggcagccgggggcgcgcggctggcgaggatggtcacgtggcacgcgcgaccccgcccctcgcgcccaggctgccgcggggagggcgccatcttggccccgcggagcgtgactgtctcggctggaagcgtgggaggccggaggatcagtgactggctgtcgtggacatgctcgctacacctcccggggcttcgcttcgtttactattaactgtcgttactcctctgtatctcgtcagcaggggctgcctgcggtgttagaattacacgcccctgccacctgggcacggagcccagtctcccggcccctcagtcagtccttgggtgtagctggagcatttaagaaaaatgaaatataggaactcagtgcatggtttcctgggcctttttattgaatatcatttctaacatgtacacagtataacccaggcttagtggattccgggacagaaaatgttgggagctgggatagtcaagtaaacaagaagaaatggtaaagagatgccaagtgggagaggaaactacggatgcagagagaggatctgggataaagagaacaaagatgcgtggtcgactttatggaaactcgtttctttttaataagtgaggtacatggtagaagactttgacatgttgattatgtgactgggaccaaggacaacaactcgagaattgattaaaactacagttattccttggttgccccaaggatgatcctggtacaatatggctatttccttttcactggtaatccttatttactcttgaaagggtaaaaatccgtgtcttgtacatatttggagtttcacaataccttcacatagtaatctatgtgagaattattttaaacattttggagaccaaaaaggggaaagagaaagagacggaaaattactaattacactaattgtattttacccccaagaacgccattaccagcggttaacattagttccaggagtccaaacatagttttcaagataaaaccccttacactataatcattagaaaccaaaaattataataattcaccaacatccagcatactcatttaggaagggttgaagaatctgtgtaaatagagttgtttgataacagttataaaaatatccctttacccatcttcaccc

SEQ ID NO: 6847 - DNA, 6000 bp, Homo sapiens
actatagcaacatctggttttcatcaaacaacaaagactcagaaaggcaattgctatgaaaagtactggatttcccagtatgacatattattaaagtaaatttaataaacacaaaatattgatttcactttttacctttggcatgaaacctacctcaaacatggtctacaaaaatgtatccacctatatatcctctagcactcctcaataaaggaaaaaggcaggtggtctaggatataactattccactcttgtttagaataaaggggctcacaggagcagaagctcatgtcagagactgctaaaacatactatgattctaagaactaaaggtgaactaacacgttgtctgtctcactggttatgattcagcagaaagataaggtgtagcaccagatgtgaacataagagggtgtttatgaatggtctgcagcaacacattcaaacctgttgtgccatgaggacagccttactggtcaatttcaccaataaacttgattgactagaaattaatgacctagaaattactccgtgaattacagggtctgaggctgaggattctaaaccaggagtcactgtccctcaagaaacagggtacttacatttacgaccagtgctcacactggactccagtttcttgagcttcattaccaccttctctttgccagctttgggctctaacaaatatctaagcaacatgcatgtgtactgagtggctctgaaatggaaaaaaaaaaattgagaagaatgatttacaaaccaaataaaacttaattcaggaagtaagggaaagagaaacacatgcctccagacaacatttccaagaccatttctcatgtagcaactcttacaaaagcaaaattctgcaacagtcattctacaggagagccaaagggtagaacatgtcatggaaatttaacacaaaggtaatgaaaacaaattctgcaataatgcagccaatgtgcctccaaaaggccttttgctggcacagagaaatggatatagtcaaagtgagaaactgtacaaaatctccctcatgttaagtctacaaagatccatattccttctcttccccagtgtagatttctttctttgttttttttttgtttgtttttgatcgagtctcgctctttcgccaggctggagtgctgtggtgtgatcttggctccactgcaacctctgcctccctggttcaagcgattctcctgtctcagcctcccgagtagctgggattacaggtgtgtgccaccacgcccagctaatttttgtatttttaatagacacggggttgtgccattttggtcatggctggtctcgatctcctgacctcgtgatctgccctactcaacctcccaaagtgctgggattgcaggcataagctactgtgcctggcctgattttcagatttctaaaatgaacttttctaccatgtacttaacctaccatctatgtgacaggacacaaactcaaaccagaaccaaatgaaaagtccacagtttaaagattgtttaattttttataaacgaaaggaccaaatacacatcagtacataaattagtataaatatgttttcatagttgtctttcaaaacttattcgtattttacataaaatacaggcagaatcctgcttaataatactatatatttaataaagtgattattgtcatgcttacaaataacaatgacttactaatataaatgtaggagaaattttacatcacatagtcacacatccaaatccatttggcaatctactaataaagtaggtgcctggttcctactgtcttgtaagtgcatttgaatccctttatgctataaatattattctcaataaaaatgcggtacattttcattttctaaaatagtgaacttgttactaggaatgaaataaaaagagaagactggaatcataaacaatcgctttctcttttttaagtgtccttcctggttacaggactggtcatgtcaatgattctgcctttctgagctttggtctaataataaggatcaggccaacagtaagacattacttttatttatttatttttgaagtgaacataaactcgattttattgtcttcataataaaacaaaagatgatacttagaactggatcacttggccctttctcttcttatctcctcccagttcaaaatgctggcatcttttaatagccaggattctcttagatcttcactgggctcaacacactcaagctttagcacaaacttcttggtagttttagactttttctggaaaatcggcttagtctgcccaccacagccactctgcttcctgtcataatgctgctttccctgggcatacagagaatccttgctcttcttgtactatgtcactttgtggggttggtgcttgccacacttcttacagtctgacaggttttaggaatgttcaccgtgtttgcatgagcattattggcacagaaagcaaggtattattttatgaatgccagtgtggtcataaaggttatacagatcatcaaggaggttgggaaatgaatgctagagatctcagatcttttggaataaacatatcttaaattattattattattatttttcgagacagagtctcgctctgttgcccaggctggagggtagtggtgcgttcttggctctctgcaaactccgcctcccggattcaagcgattctcctgcctcagcctcctgagtagctgggattacaggcatgtgccatcacgcccagctaatttttgcatatttagtagagatggggtttcaccatgttggccaggctggtcccgaactcctgacctcatgatctgcccacctcagcctcccaaagtgctgggactacaggtgtgagtcactgaacccggcctaaatgatgatgattattatttttaatgtttttattttttttttagaaggagtctcgctctgttgcccaggctggagtgcagtggcgtgatcttggctcactgcaagctttgcctcctgggctcatgccattctcctgcctcagcctcctgagtagctgggactgcaggcgcccaccacaacgcccagctaatttttgtatttttagtagagacagggtttcaccatgttagccaggatggtctcgatctcctgactttgtgatccgcccacctcagcctcccaaagtgctgggattacaggtgtaagccactgcacccggcctaaatgattatttttttaaccaacttccttgataaaccctgcagggtacattctaggtacactggaattacaggtttctatttaatgaaatttctatttaatgaagcttgtatataaagtaaccatttaaaaaacctatcaaactaatgagaaagccagtatagcttggtagttaagtgggcactggagtcatttgcgtggatgtgaatccctcagttctgccattgtagtacctattaacctctttctgcttcagtttctccatctgaagtgggtaaaatatttagagtatctacctcatagggttgtgatgagggttatataagttcatagttgcaaaacactgggaacaatagctgtcataaagatggcttccaaaagcctcattattggggccattctaattgatctgtttgtatcagcacttgcacacccagaagagaatgcagagctgttaaataaaactgcaactgtaaatattttttcattaagcaagaatcaaccaaatctctaaaacatcatgaactagtactgtattcgtattaaagatacaatctctcagttcttttcgtttcttatggaaccaaaagaaaaagagacacaatctctgtttaatattttcagtagcacagcatgaaccttagaggtgcagttagttctttctgagcttctccccactgtatttccccccaatccagttggtgtggtctcatccccgctatattttgttttacaatttacaaaactattccacatgcagtatctcaatgatacagcctgggtaataatggaagagaacttctgtctctcctcaaacatttcaagaggtatttgagaccgggcgcggtggctcgcacctgtaatcccagcactttgggaagccgaggtggacagatcacctgaggtcaggagttcgagaccagcctggccaacatggcgaaacccccgtctctactaaaaatacaaaaagtagccgggcgtggtagtgcacgcctgtaatcccagctactcaggaggctgaggcaggagaatcgcttgaacccgggaggcagaggttgcagtgggccgagaccgcgccactgcctgggcgacagagcgagactccgtctcaaaagaaaaaaaaaagagagatatttgaagtcacaccaagtggtttgcttccctagccacaaatactaatccaaagtttctctttaaaggagatccctcggaagaatgttgagtggagagaaccaatctttctgtgcccggagagcaaagttaggaggggaggaggatctgtcagccggtgtcccgtcgtcggcggtctcgaggcggctagggtgccaggcactggggctttcgtgcacggggctaggacgggacgcgggtgcgttgggcccactcacgttgaatttagggtaaggaggggctcggatactaaactccctccgtaggagctggcaacgtccttcctgcttccatctactaggctatcacctcctttttcccgggtgcaggggaataggcacgggagccgagttagggcgagaaaggggcggaggccgctggcacctgactcacctgaagagtcggtcccggccctgggtctggttggtgaagcgggtgaaggcgtccatggcttctagcccaaaggccacgagtcgcacggggctcaggcgtgggtcctctggggcccgtcggatccccagggaacggtcagtcccaggttatccgctgagggggaggggctgagtctctccgccccagagggggcgggcacactttctgtagagcaacttcgcggacttccggttcaagccggaagttgtggttaccaaggcgacgcaacgccgcccggccaggtgagcaaaactgatcttacctttggatgccggggctcccctcgagtcccaggactcccctttacctgtagagtctcctagaggaaagtctgagggggtccgtctccccagactcgggcgtttccggatgcctgacgcctccccgcagatctcaggttctcaggaacccggggtgatatcccgaatggtctctccagcctcagaactcccctgagctcttgcttgggacggtggggcctaatcatttcccagcgccgtgcctctttcccttgagctacaccagctctatgtctggtgaaggaagtggttaggtcagagataagccaatttcacagtgtgaacctagcatgggaggcggatgaagtgagaaaatgttctgcttggattattgaacattgaaagaagattgttacctgaggaaatcctaaaagagtcattatgagcaaagtgaagcaaaaatagattgcaatgaaattgcaccgctgaacattcgttctgtgcggcttgaagaaaaggagccttacccactccgtggcagtaattttataaaatgtaccctctataaccacaaaataaggtcggccggtgctgtggcttacgcctgtaatcccaacactttgggagccgaggtgggcggatcacctgcgatcaggagttggagaccagcctggccaacagggtgaaaccccgtctctactaaaaatacaaaaaaagtagccgggcgtggtggtgggcgcctgtaatcccagctactcgggaggctgaggcaggagaatcgctggaacccaggaggcggaggtggcagtgagccgagattgtgccactgctttccagcctgggcgacagagcgagacgctgtctcaaaaaaataaaataaaataaaataaggtgaacattttcgtaatctttattcccttggtcaggccagctcctaacatttgcaggccctgggtaagagtacaaatggagtc

SEQ ID NO: 6848 - DNA, 6000 bp, Homo sapiens
gcaattgggctatgaactattcaaaataatccatacagggacaggattaactaataaaaagccagtaagaacacatcccccaaacaggagacttgtaaggaaatttggcagcaaaaatactgctgtttatgttacaagacaatatttagaactttaaatgaaaggctttaagagacaataaggtcgggcgcggtggctcacgcctgtaatcccagcactttgggaggccgaggcgggtggatcatgaggtcaggagatcgagaccatcctggctaacaaggtgaaaccccgtctctactaaaaatacaaaaaattagccgggcgcggtggcgggcgcctgtagtcccagctactcgggaggctgaggcaggagaatggcgtgaacctgggaagcggagcttgcagtgagccgagattgcgccactgcaatccgcagtccggcctgggcgacagagcgagactccgtctcaaaaaaaaaaaaaaaaaaaaaaatggtcccagctattccatggaaagctatataccatcccccaaaaagtacaaaatcaaagacaactggtaaatatgagaaagcacagaaataacaaagaaaaagataatgttaaagtgtctcaggccgggcacggtggctcacacctgtaatcccagaactgtgggaggccaaggcaggcagataacttgaggtcgggagttcgagaccagcctggccaatatggtgaaacccccacctctgctaaaaatacaaaaattagccggcgtggtggcacgcgcctatagtcccagctactcgggaggctgaggcagaagaatcgcttgaacccaggaagcagaggttacagtgagccgagatcgtgccactgcattccagcctgggcgtcacagcaaaactccgtctcaaaaaacaacaacaaaaaataaagtgcctcaaatcctccaaaaacaatgaaatataaacacttcaaaatacgcagttagggctgggcatagagactcatgcctgtaatcccagctactcgggaggctgaggcaggagaatcgcttgaacctgggaggtggaggttgcagtaagccaagatcgtaccactgcactccagtctgggtgacagagtgagacaccatcttaaaaaaaatgcagttggtttaacttggcaaaacaccactagatcaaactacacgagaaaaaaagactggacctaataaaagaataaaacagcaaacaggctgtcaagctattccaaaagacaagggttactaggttacccagtaaaccaatctcacaaggccagtgtcagagtagatttgatctaaatcaaatataagtcactggtcaggagactgattacatattcatggatacagtatatattcttcagagaaattctacctgctgttttcactcccactagaatgtaagctcgatgagggaagaacatttttctattacttccccacagtctatgcaataagtaataattactcactaaacaattgaaaagaataaaattatccaactatgacttaaaattttgcacttccgtgaagacagtatgcatagaatcacacatctatcatcaggatttttatccctcatctagaaataaagctgcccacgatcaatcgttctctaaattaaagccggtttcagaactaaaaggaagcttttactgaacacacaatgggatactttagattcagatacagtcatttttccactagacaaactagttttgttctacataatccctatttcttgataatatctgagcttcctcttccaaagcagtaaaatactccttttgtaaataaaggatctactaaatatattccttcacagccaacggcctgacaaacctaggtcatgtttgcagtaaacatttaacaagcacacaagagtaaaacctctttaatctacacagaacagattaaaaccaccatgcagggaatcaaccccaacataatcacagtcattcactacataacatttcagtaaatgaaagactacatatacaacgggggtcccataaaattgtaatatcgtatttgtactctactttcctatgtttagatatacaaaaacttaccattgtgttacaaccacctatagcattcagtacagtaacatgttatacaggtttatagcctaggagcaataggctgtaccatacaaactaggcgtgtagtgccatccagttttaagtatactctatgatgtttgcataatgacaaaatcacctaaggatgcttttctcagaaagtatcaactgtaaatgtaattcgactgagatgtgactgaatattcaatgtagtatatacagcatatatattaatatatacattatatatactaatatataatgtctacatagtgtatatatgcaatgtaaacaccagaaaaacaagagaagaaaataaagttcacacgagtactttgaagatgattcagtaaaaggaccttagtaatactaaaaatatttatacctagataatgccagactattagatttcagaacttataaaataggtaatttaaaacattacctataaatttttaaaattcaaattaaaacttcatgaaattcaaaaactcacacttcaggaagatagtggtatttctgaagaggatctttccaaaactaaaataatttttcccctgcaaacataaaggaaagataattagcctcagatggcttcaattaccaaagcatcatataactatctaagactgctagaaattccaacttaacttaaatctttatgggacgtaccccttaatcagttcattccctttactcaccaatcactgctcagaataaccaatcattttttctaatgaactattctgtgtgcaaataaccagagttttattttcaaatctaaaaagacttaactattaaccattttagtaacaagtaaaaacctaactgaacacctgaaaatcttcaccactgaacaaaaggtataacgtttaccataataaaagcccaaataagatttggacattacagtcagtgagcagagcagaatgaaacaaaaaggccaacgtaggtttaatggggctaatgcttttcagcatttcctccctgcatctggtttttgtctgctcacaggactatacctgttactgaaataaggtttaaaatgggtaaggggcagaaagggtcaacccatgtagttaattatccaaatgaaagactagccttaccacattaaattttaagtactatttcttcaattttaaccattcccatgttaaaacacatttcttaaatctctatgctttctagtcacacagtaaagcttagaatagccattccaaagttgaagcgaagtcgaaccatctcgtaagcagaattacccagggaccaagaagtgcagaggaagaaaaagaaagaaagaaatgaagactcctatttacatatctttcttatccaacccggggacactggattctgtgaaacatctgaaagataaacaactctccgtttgtacatcaagtttacatctcaagtcaggcactgaaagttctgtttttctgatgagaagccgctccaccactcctttctgttgctgaagtggcccttacattcccgctagcctaatcacagaagtgcgcggctttccactccagggaggtgggtcccagttggctagccacacagaccatcccagcaaccccaccccttttgaagagacttttgcggaaccttcatggaccccttgggccgccgtagccccaccccttgctcctctaggttcagacgttagtgaagtgaatactcaccgacggtatcggaatgtgccatttggaccggtcggcagcagctacggttgccggtcccgcactgaaaaacgacagtggtgacgggtgagctcccagaagcagaagaatgacaggcaacacctgaagccacgcagccgccgccatcttcacagccgtggagtgcctaccgaaagcatttcaccctcttccggttcgtcccgccttcttccggctctgctctaagggcgggattatccgggtcctggaaacgtcgcggagcttgtttgctgtgcggcgtagcggcccctctctcagacagtcgtctgtgcgccgtgagactttggacctactgcgcaggcgtcatcctgttggaacctggtcagctgggttagagagatcgctacatgccagcctggcctgagtcttttctgtctcccagccgttaaaggttttaggaccaggcaggcaccccgtgcaggatttggctctctacttccgctcgccccagcccttcatcccttctaagtcaatgtcagactttggggccagaaagtctggaaaagccctaagcctggctgcccaagtggcgtctagtagtgagttctccggtttgggtggtatttaagcaaaggctggaattcggcggtggtggagtacacgcgattcctagactgggtagtgtaacaaccttcaaaggccccttctagccctgaagagtacgatgctgcagtacaatctggctggagacctagcctccagcaaagacccggccggcacttcccacccttaaccgaaaacggagacagagagggtcagttttcaaaatctgtggcgtgaccccgccactgagatagatctgcagatgcttcgtcccagtcagggaggccgtctcggcatttccaggttcttaacgctcttgatttttaccctctaggactcattgcgtacacgccctcaccgccgcccagtttcggttcctaacaaaagcacgttcctcatcagccacccataatcaagacaaatttgccaaataaatcattgtagaaacgctagtttgggcctgaaaaattccaggagcaagagtcaagatttgtcactccatgagaatctggaggggactcccttcccagaaacttgacgatgaagtactggttgtaattttagaaagacacccaatcggcttttttaaaagatcgcccagggcccttgtcctgagagctgggagctggtcggagtgacagagaagccatggaagcagcagtgaaagaggaaataaggtaaaggccaagtgcttctgtagcgagtgaccccagggtccctagaaacagggaatagtgttttaattgcatttcttatttgcgtatttggtatttgctgacctttatcttttctctcaattcgcgggaagttagttgatattaatagcctctcataaaatactttcaggatggttaaataggccgggtgcagtggctcacgcaggtaatcccacagcactttgggaggctaaggtgggaggatcgcttgagttcaggagttcgagaccccctccccgccccctcggagtcccagctacttgggagaccactgggaggatggatttggaggctgcagtggagctgtgatcttgccactgcttgggcaacaaagtgagaccctgtctccaaaaaaaaaggatggttaaataacattaacagtggaaaagttgcaatcagaactcttaacacgtgaatttcaggcatgttgctttccaaattcatctataatcaccccttcctatatcatcccagagttaattcttcgaagctgtaaagaggaaacaaaagattctccaatctttgtacacttgattaaaataaactgggccggttcgctcatgcctgtaatcccagcactttgggaggcctataggtgggcagattgcttgaacccaggagttcagaccagcctgggcaacatgctgaatccctgtctctacaaaaattttaaagttagccagacgtggtgatgtgggcctgtagtcccagctactcaggaggctgaggcaggaagatagcctgagcccaggaggcggcagttgcagcaagccaagatcgtgccacttcactccaacgtaggaggcagagcgagatcctgtctcaaaaaaaatttttttaataaattaaaataaacggacaaagactgagttcagtgaaggacaaacagttttttagtatggccaagtatatctgcctgggctt

SEQ ID NO: 6849 - DNA, 6000 bp, Homo sapiens
cgatcagatgtcaaggtttttttgtttttttgttttttgtttttttttgagatggagtctggctgtgttgcccaggctggagtgcagtggtgtgatcttggttcacggcaacctccgcctcctgggttcaagcgactctcctctctcagccaccggagtagctgggactacagtcatgtgccgccacacccggccagtttttacacttctagtagagacggcgtttcaccatgttgaccatgctggtctcgaacccctgacctcaagtgatctgcccgccttggcctcccaaagtgctgggattacaggagtgaaccaccgtgcctggctatctcagggtttttgaatagacaatctggagaggagagacacatcatggtgcagatcagttgagaaaagtataaaagtctaataggggagtgaatcctaaagaagagtatgcactgtggctgacaatactagtaatgtgagggatgtgtaggggccttcaggggtaggtatatgtacgttgcatgcttccacctaatcttgtttaaagacatcaaggagaaaattcttcaaaatacctacaaaggataaaaatgggttgcatccatcttcaagaagaaatgtacactaagaataaaataatgttatcaaaactcttactgagaaattaggcagaatatctctgtttcacaaggacagaagaatggaatattaccaggaaacagagcaaactgttcctgtcagccagggtgagctgctccaaagaccctgatcttaagagtccatgaagatgaaaaaatgaaatataaggagaagccacaacagacggtaactactaaaatgtcctgccaagacagaagtcaatgagttttggggcgtttttactcatacccgctgatctctgttttggcccacagaggacacagaacctatgggaattggcctcctttgaccagatagttgacagagtctttaaaccttctgcctaattttcaggctctgggaaatccagtattttgctttctgaaagttcttcacctcatagcactgctttaaacaagcaactgaaaaatgagaaaagtaaatccaaccagcaattctgtagtcactctctgcataaactgtttgctacacttccattatttactgtggtaatctggatataatcatttcgtaagttgggtaggtacatagtacatttttatgttagtcagttaccagtgacttaaaactttttatatgaggttataaaagacatttgcatttattttgtcaatttctgccctacttttaaaattccttcttcttcctgccctaagaattgtaaagtttcacacctcactaggcattcttgcctcctgacccctgggttctaacatgatacagcacttctactcacaggacggacctggctaagaaactgggtatcctttcaatagagttcatttgttcatctgtcaccaaggaaactgacttctgcctggccttgtatgcatacttgggtaaggcaatccttaattttttccactgccctattcattgctcctttatagctctgttgctaagagaagagaggctgaaactgagcagtcatttgctcaaaataagaaaaagaggagcctgtcttttggataggctggataccaaacaggtggggaaacctggagcttcccttcttcaggttaaatttatgttcagttaagtttgtggaatggctacataatggaagcaaagccattccctaaaagagccacaggaacaccacagacacttaaaagttaactaaacttacctttgggatgttataagtcaagttctagaataattacctgtaaggagtagtgtcatttcgtttcacagaactaacagattccaatttgcctgcgctgctttcagataatccttctatgtttttgctcaattgcacttggatacttcctgcctctttccctggatggcaggcttcttgatggatcggtgaccgtgccttctttcatgtctatactgcatgcttcaaggcaggaacaaattttgcaaccatacttggtaaaaacaagcgctagaacttaattcatttggtagcaaggttgtagggggaaaaacgcactttagactcacagaacactggccatatcccttctgctttctggccatcagtttcttctgagaaactgaaaataccagcacccattcctgcctgcttcctgggagcagcaagcatccctggaagaatggctgaaaaactccctgtcccagtgtcagggatgctcagtccctatttatttcattttgcaactgctcgtctaagaattcttgggcttggcttctcacagggctgctgaagagcaagggattgtattaaaaaggagattcttgtgcctttattgtctattattacatacactgggaagcagcaagttattccttggaggaggtttgtaaaaagagaaagcaggcagaggtttcttagcaaaagtcaaaggtgccctccttgaatgagatgccaagctattctaagacctcgtctgtcacaagtctcatgatgacataaatacctaccaatggagacacagtttgagacagcatgacggggcagaccagccacccaccatttcatatgtctattggagaatgtaagcaactgtctgacacctgggagggaaataatggaagcagggtacttgaaaaaaggaggctaagacctctttcactaccagcacagcccagagagtctcaagggggtactacagtagaccactacactgctctacaaggggccagggtgcccttcagaaccgggtgagcccagctcactgctaatatattatctggcctggaaggtggcagcaaaaaccagccacagagaacgtggagcccgcctggatgtgtgggtgccccacccagagcctttgtctgcagaacttgccatccagccacgtctgccccagttgttaattggagatcatgtccctgtaaagggggcttgcttgtcacttgctgtggtaacagcaagaaaccccttctttgtatgtgcaaaaaaaaaaaaaaaaaaaaccacaaaacccagtttgggtacactattctgttcctgcacaaatgggcaggaggccctctcccagttctcctcctgttgcccttcggagcacagttactctcttttctaggggtcatggctcaaaatccacccaagaaatcacccgtttgtgatgcacaggagaagacagaggtttgtgcattggttttcaagatctctgcaccagatacctgcggaaggggcatcttcttacagcagttaacattttatattacgtttttgctggaagagtctaaaaccaaacagagaaggtgatggagctcctttaggtgacagcatgccactcaacacgacccgcaatttcgtcccctgagctcaatgtgctgagcatgggaggtcggggttctccctggtaccgtcgatactcagagagcttctgtagcctccttcctggaggcgagggctggttcccgcctctccaccttgtgcgggagactactttgagaacacccaacaacttcgcagcctaagaggaatgcacagctcaccacttccgctagatggcgctacttcccctactccgcccgcgagacacccaatttataaaataaatacaacccaacacctcccaaaaccacaccacataatagcagctcacaggctcccattagaaatctcaatttgggagaactgattctacctccgagcaagtctaatacaattacattaataagacgcaatcccgaattgcacccgagcgtcccccacacccgccctcccattgaatacacctgtcccccatgcccgggcttgtaccctgggttgagctgcggcgcgagccggcgctgaatcgtcgccgtgccctcccgtccacttaggaaagccggggcggcttggcaatgggcatcctcggccctcaatccaaggtccgcaccttcccgtacgccggcgcgccgaggcaaagggccgccgggacgcgagcccacgcggtgcactgcgccgacatccccgagggcaggagatggccaggcagctccgcagccgggcgtcgagcgggaggcgggggcccgggcggcgcgggccaatgggggttcacggcgggacagtcgggtggccggctccgtccggggctccgcgagccgggctgagggaaggagctcccagcccgcacacggtgtaagggacgtgtgccgggtctgcccaaccacgcgcgctggcggctgcccgggggagagtattttaggaaaaaagaacaaacaccaaaccacaaaaactttcctgctgccaacagctaaagcgatagaggcgcagcaaagctccaaatgtgggcaagatgggagcaagatgagacgcggggctaaggaagaccaaagcagcgccgtggccccggcatgtgtcggcggcgcctcggagatgtcagagccgggtctgcccggctcccgacccgcgcttaccttggcggctgcatgagcccctgcggcccgcggggggtggcgctggcggggctgcgggagaagagggggtgtcggggcgccgctcgtctgccccggggcaaggtgggaggggctccgctggcgctggtccccgccgccccggccggctcagcagcggcccggggagcgcctcctgctcccgggctgcatgcctgcgagcgcctggcggagccggcccgggagcgaacggccagtgcttccccggcccagcggctcgggcggcgcagccagcgctcgggagacaactgcagagtggggcggccgggaccagccccctccctcgcccggcccccgcccgccgccgagcgcggcgtcgcgaggttcgtttgcgcgccgaggggagggggcgggccgggcgcccgggccgcgggcggggggcgcgcgcgggcggggccggcagggaggggcggggaggagcggggtgcgggctcgcgttgccccgccccgccgcggccccaccctcccgcatcagcaccggctgggtgggtgcggagtgcgccagcggccaagtcaagactccttgaatgctcaggttagggggcgcgggcggcaagtgcggcgactccccggggcgcctccaactttccgaatcgcccgcagggttgcggtggagcgcacggtgtccttcagttaggcggtggtcgaggggagttcctctgagatttctggagaaggcggttacatccaagacaaatgctgttgcgctctgcggagacgcacctttgttctatagagattttgttgttgtttaagaatcttcctgaaaaaactaatacatatgtattacatgctaacacacgcatacattcttgcgtagaattgtacataactcaggagtgtctagagtgaaaagaccgtatcgcactccctcccacggccgcggctctcccacggccgcggctcccccgcggtaaccttcggtcagggtgtgctctgccgcggttctttccagtctctgcgcttttacatgcacacgcacagattgcgagtggaatctcctgggcttttcaaaagaatgttttcaacattaagcgcatgcacacagtggcttgaacacggccacgtcgggagcagtaaatccccagaggctccgggagcccagggaaggacccttgctgtgaaacagcaaagagccacccaatcgccatgtgtggatctgaaaccccagctggagcgtgaagtcggtctggttacacagctcaggcccaaattagcactgcacggttagagagatttgccagtacattctagacagggttatgaccttccccttcttacagaacaaactgtcttgaattttgatatgatgagaactctggatttgcaaaatgaaaaggtatcgtccgcattaaaacacgatcgttatttatgcgtgtggtcttcagagatgtggttttaactcaatattctccgttttatttgtcaagtgtatttgtataatctatagctgggatataaataaaattaagtggtttagcaggaagg

SEQ ID NO: 6850 - DNA, 6000 bp, Homo sapiens
atgttaggacacttttgtcccctgcattctgaaactcaccaatgatatgccttggcgtagagctattctttcccactgtgttgggctctctccctttcagcatatgtcgtgaaggcctctcttggattaataattcattgacgattttctctcttgtgttttctctgatcacctgtttgggtccctactcattgatcaataatttttttggttggtccactaatttagcttttctctactttccattttttaaaaaaaattttggttctactttcaaggaggttttttacttttacatttctgttaccttgtaaacatctcaagaacactttttttcccctgaatgtttctttatatatgttctcccttcacaggttgtatgtcttttaaaatttaatgacattattgatggttttgttgatgtttctttctttctgcatagtctgtttcttccaacttgctttttaaaaactctattgtggctttgtatttcatgacacagggtttcctgagatgccggtcagctctggctccctgcttgtccttggcctgggagggactgagaggctgatgagaacttctgtgcacatgagtggcagtgttaactgtggccttccctatagggtgagctggctgtttaattgggcagccacaaatgttagaatgtctgggtgtttccccttggcatggttggctaccccaggaaagacccttctagtctcctggctgcttgcattctgaaatcccaaaaaggggtttgtgggtctcagcatccagtatccatgtgtgtatttaatcccctgatcctattaccgtacctctgtccttaattgtgcctggtgtccacctacccaagacgctgccttttagttttttcaggtcataaatatccagcctttcgtcagaacaaggaaggggcagttgtcaggctgcatgaaattggggtgcagatatgggcatctgagtgctcctcaagctgacgttctgccaatcttattttcacccccgtttactctcacattcagaggtacgtagtgccacccattagtgaaccttctgggggattccatggagtatgttcttagctttccttcctagctactatctcagggtttcattttcttggatctgctaagtattttagcttcaagaactgcgttgctgttacttcctctcttgttctccctgtctttgtggatttctgccttctaacaaatgctccagaaggaagttaaagtcaatacatactaaccatccaccaactttacccagaaactcaaccaccctttcagccttcagtctctatacgccccagacacacctgctctgcttttctgttgcttccatttgaaacgagacgacccagccctcacatatacatatgccatctctgtcaaaatcttacttagaaaagaaaacatggactcttagctaagaggagattttctttggggaagagctgtctgtccggaagacccttccatgtaggtttgggataaagtcagtgaacaccacgacaatcatcaaatgagtggatttttgagaaaccagccaaggagctcagttttctatacagaatgccacagagcacagtcaaaattctttgggacccacattcttggaaaactcttaggggggtgcatcaatgcagaggacccttgaccacgtagggcatcccctcacccaaggcaggcctgttttgttcatggctgtagtagcctaatactagaatagtgcagactctagacggcctaccattgtgtatgccggctggggtgacccagtggggagacgtggcaccttgaagattggggagaattctgctggctggaaaggggccaggagggtatgggtggctgataagctggtgtaggaccactccttccttaagaagtgactaattgtgacatgtggtgggaatagaggaacattccgaatcattacttggtcaggacacacgtctcttattaaatgtcatcaacacaatctgcctggaagaaacacgattactttctaccaagcacagaccctcctaaagggaccagacccagtccagcacctttagtctccccagagggtagcaactcaatcagcgagaccgcatttcagggttttagttacagatactgagggtgctcaaacatccatgcagtttgctgttcaccgtaacacgcaacccagaatggccgtttcggtccctcgtcggttacctgaaaaccagtcttactgagctccaaccccaaattaatttggtgagaactcgaactcggctattaaccttaattctgagagaagaatgacacccccctcccactgcgagggtccactgagggtgagtgcccgggctccttcattctccaggctcctctcagaacacagcaagggtggctgactccttcgaacgtccattaagcacaatgcaacggggcgaggcagtagggggtttgctgagcccggttccgcggcggtgggaagttattcaccggcgtctccgaggacggcccaggcctggagaatggctggggccgcgggctggggtaggggttaccgtgagagtcaagggcaaggtggcccagcccgggctgggaggcgcgggctgggcgcagccgagcatttcctccgggaggcccagacagcgggcgggtggggcgcggtgggcggggtcctcgcagctggtggcgtttgaagcccccccgaccgcggtgggagaggggcagcctagaagagttggcagcgggcctgcggcgggatggggaggaaggggccccgcgttccctcagcagcggcgccggccgccctggcacgtagttcgcttctggaggcacaggccgcggtgggcgcgccacccgggctgccaggctcaccgccagccgaggccagtcctgctcgggctgacccgagctgaagggcagcgcggccgcaccccggaccccaggaacgagcccgagtctgtccctcccgcgggagctgccccgcccggactcccggagctctgcaaggcaggggcgtggggagggcgagcggcctgaggctctaggcgcggccacccggcaagccggcggcggagggcgcggcgcgagtgcgttccgcccctaggcagccccgcgcccggccgggcagacacgcctccccgccggcgcccatcgcgggaggaacaaatggcgccctccagaaaccgctcccctccatgccgggggccaaggctgtcaccacataaaagctccggcagagaagtgctcgctgtgtccccgccgcggggggtacaagcagccgctccgcgccgcgactacccggcccgccgcccccggacgtcatgcgtcagcgcgccccgctccagtttccgcccctcctcccaccggcccaggggacacgcccactggcgcgcgcagggcccgggaccgggcacgcccctctaacggctcggattggcctggccgtgcactcacggaccaatggcgtctgtcccggccctcggtcacgcccccttgcccaggcgcgggcacgcgaccgctccgttccgccggtgcgcgctctggggtccccgccccctccgcgcgcgcagctccccgcagccgccgccgcctgtaacctgcgccgccaggatgtggctgggggctgacgtcgggtccagatgtggccccggccccgcccacccccggggccgggccgcccacacggagccgcggcgcgcacggcagctgtcccgcctgccacaatgcgcggcgaagctgcggccgcgacttggcgaggtggtccctaacgttgccgctcggcatccttagaaccggccgcccctgacgccgcgcggggaccccagtcgcccgcgcgccccatgcgctcactcttcggtgcccggccgggccggcgcctcgcagacgcggagccgcgcgggtgacggcacaggcggctgcgcgcccagcccagcccagcccagcccgaggagagggcgcgccgcgcccccgccccccgcccgctctcccgaggccgtgggtgcggatgcgcggctgacgactcgcagcaagagcaccgccgccggccccagcccgcagcatggcagccgccgcctatgtggaccacttcgccgccgagtgcctcgtgtccatgtcgagccgcgcggtcgtgcacgggccgcgggaggggccggagtcccggcccgagggcgcggccgtggccgccacccccacgctgccccgcgtcgaggagcgccgcgacggtaaggacagcgcctcgctcttcgtggtggcgcggatcctagcggacctcaaccagcaagcgccggcgcccgccccggcggagcgcagggagggcgccgcggcccggaaggcgaggaccccctgccgcctgccgccgcccgcccccgagcccacctcccccggcgccgaaggcgcggcggccgcgccccccagcccggcgtggagcgagccggagcccgaggcggggctggagcccgagcgggagccggggcccgcggggagcggcgagcccggcctcagacaaagggtccggcggggccgaagtcgcgccgacctcgagtccccgcagaggaagcacaagtgccactacgcgggctgcgagaaagtttacgggaaatcttcgcacctcaaggcgcacctgagaactcacacaggtcagtggggcggcgcgggcgcccggatcgcgcggacggggtcggcgcgagctgcccgaccacgcccccggagtccccgatggggcgcgaggtgggggccgggcgggccggaacgcccggggcctcgccccttcccctgccgctccgacccgcggctggccccgcgcgtcgcgcgaggcgggtcttggctctcggagccggcgcccgccaggcgaccgcgcccccgccgggcacgccccctccccgggcgcgctcgggtggggccgcgggggcggatatagtcatctgggctgggggcggggacccctcccggccgggaggcggcgcgggcaggtgcgggcggcctgggtgtggaccgcaggcggcactcgtgacggtggggcgcccggagcgggggcaggggacgctctccggggtccctcctcgtttcctcccccgctgcccgggcgcgcgctcaggaggggaggggccggccccggcgcgcggcgggcgaagttcacgcagggacaaggtttccttcgccactcggcacattcttcgctctcttcttcctgtaatttttccagcgctctaaggtttaatttgtcgtaaccaaagtcagcggcggcgcttggcgatgcggggggcggtcccgggtcccgctccccgcctgcggctctttgtgggagcccccgcccatccggcccggcgggggcgcgcccggccctaggctcctcggcctcgaggctctctccggaaaggaatgccctggccgctgcccatcctccgtgctgccctctcgcctgcccacctctcacctgccctgggccggtgcggggcgggcggcacctgcaccagggcgggcgctgagcctccagcctggggatcaccgcccgcccccgccagcccagcggcaacagttcccacgcgcggcccgatactttgtagttgattcatctgtggcggttccctcccccctttttgtttcgtttttaacataaagatgaaaatattttaatggacggcaatccttccccattttggtgtaaagaattgtatgcttcctctgagctcacgtgagttcttctgtgacactcacctcttctaccttgggggcaggctcaaaacccgtctactgaatactgttgtcttgtgaccaagggtggtggtctctcatttgtaaaatagttcacatagtgattaaaaggcataaaaagaagctgcagccttggataccctagagctgaaggccccttttttttaccatttggaactgaaagggcccaaggtctgcaggtgaggctttcagatctcggactaactttccccagggaggcttttgtggccgctccaaaccacgtggcaggtgatggggtagagggtgagagcggggc

SEQ ID NO: 6851 - DNA, 6000 bp, Homo sapiens
ggctcatgcctgtaatcccagcactatgggaagctgaggttggtggattacctgaggtcaggagttcgagaccagcctggccaacatggtaaaactccgtctctatgaaaaatacaaaaattagccgggtctggtggctaattttttagccaccctctgggttgtcccctctgggaaccccatgttggaggcgtggagtgttccactctcagagagagaggccagtgtggtgtggggtcatgaagggcagcgtgctggaaggtgatgctgagctcagccattggtgagcacctactctgccagggccaggcatcatgcttgtaacctacagtgccttattcaagatcaaggcagggtgggggttatgggaggatgtagggatcccacacagtgacgatggcaagagagaaccctctcttcgggtcactggacagtgttttccagtgtttctatctgcagaaacatgtgttcagaccaagccttgcagggaacatagtctacaaaacagacaggagcagggtggtctttgacagcccttcgagaagaacaaggtgggccaaggagtggagtggccagtgctggggccgccacctcctggagccattttcagatgagcctgaggtgcagcaggagagaggtacttgtccggggatgctcagtgctctggaaccccgaccacctccccacaatgtgagctgggcacttgcacttggatagggaatgcagttccaggagaactacaaagaacatgcgccagaggcatggtggcacatgcctgtaatcccagctactcaggaggctgaggcaggagaaacacttgaacatgggaggcagaggttacagtgagtcgagactgtgctactgtactccagcctggctgacagagtgaggctctgtctaaaaaaaatatatatatatatagagagagagacagggtcttgctgtatggcccaggttggccacaagcaatcctcttgcctcggaatcccaaagtgctatgattacagacatgagtcactgcacctggccattatattgattttttaaaaaggagtgtgtagataggttatgctattgtcgtatttaatttctggacagaaaaactgcagaatattcattatcatcaagctcgtgccctctaaactgctctgatcaaggtcactggtgacctccacattctaaatccaatggtccagggctcagccctgttcttactgatcactctgtcctccgggaaacggtttcttgtggttccccttcccagcccggctcccttctcttgtctcctctgctgtttccctttcctctaactgacctctaaacttggcacttcagggctggatcctctgaccagttccctatccacactcattccttggcccttgtccacgctcatcgttttatttatttatttatttatttatttatttatttattgagacagagtcttgctctgtcgcccaggatggagtgcagtggcacaattccggctcactgcaacctccacctcccggcttcaagcaattttcctgcctcagcctcctgagtagctgggattgcaggtgtctgccaccacgcctagctaatttttgcatttttggtagagatggggtttcaattcaccatgttggtcaggcaggtctccaactcctgacctcaagtgatctgcccacctcggcctcccaaagtgctgggattacaggcgtgagccactgcgcctggcccagctcatggctttcaatatcatctcttcactggtgactcttgcatttttacctccagcccaggcctgtctcatgaactccagactcattcacatccccagctgcctccctgccatctcaaactcacacgtccaaaaccaaggtcccagctgcaaccttccaacttccctgtctccattccctgcttttaccctgcccacagccctctcccccaactagaaagtacgtttcaggaaggcaggggcttctgtcttatttacggctgtatcctcagggcagagcacagtgcctggcccagaacaggtgcctggtaacgtattatttgaatgaataaataaaaacttgcactgagttcttgggtggaacaccactgctctacagttccaagatacagtctaaacactacctgtcatcttcgtgagtctaatgttctgtgattctgagggcgttgtagcacggcctggccctggccctgccccctcccgcctcccacgactcactctcgctccttgagcagcaccttctgggactcatccagccgtagccgcagggcggtcaacttggaggcctcctcctccgtggcagctgtgtcctcccagggtagccggctgcgctcctggcggcctgagctgccccgcgggcccccagcccccaggctgcgcgcctcccagcagtcctcagactcctctggcatgctcttcagcaggctctccaccagctccagttcctgcggggaccaaggtggaggctggaccagtggccgccaagccaggccctgggtctgagatcagcttgatgggtaaccttgggcaagtcacacagtgtctctgggcctcagtttcctcttctgctgcctgcctctccatctctggagaaggaagacacaccctgctctgggcctcccctttcacctcctggagctgcagagtgtcagccaccatggttccctgtatcctagaagattccccaggagaggtggtgagctccctgtcactggaagtatgcaaacctacggcggggcaccgatgggaacaaatgttgaagcaggaattcctataatggcttaagcctagattccttccaaaggaattctagctctaagatcctgttttttcaggggcaaatagtaaggcatggggagactggtgacacagggaagcagtgcctgtgaggagagccagctcccagacaggaagcagttgagaaattaggaacccagggccgagcccctttccttcttgccatcctgcccttcttctccgccccgcccatctccaaggcctgtctctgacacaaacccacaaggaccacagcccctgttccagcttctcccacagcctttccagatgagtctggaccagcctcttcctggcccggccctcagtttccctagctggactggagcggtggccctgaggactccctgaggagtgagagctactcttctgtttctcagattattcaggtggaggtgtccaaagccccattttacgaatggggaacagggagagagaggacttgttctgggccacagcatgaaaaggctgggctggagaacaaactcagactgcaagcctagggctcctgccactgcccacagccctctggcctgtgaccgacaactggaataaggataggacaggaacagcattgtgcgcagtgaacaccacctccaaacaccaggtcaccccagggaagaggggacttcagccacaggaggcagcagtgcccacgctagcctacgggatggagggggctgggcagaatagaggaggggcagtcttatttggaggagttggcctgtccagggactgagctggggacagagctggggaactgagcttggaccctgcccctaggtggctttctggtaacaggcctgctggctcaggagagggtgccctctgcacccactgttaatgcagcagccatcctgattattaccctggactctggagccagattgtccaggttcaaaccccagcaagttgtcaccggctggcagacattgctgctgcttttttttttttttttttgagatggagattcactctcgttgcccaggctggagtgcaatggtgtgatctcggctcactgcaatctccacctctcgggttaaagcaattctcctgcctcagccttccgagtagctggtattacaggcgcccaccagcatgcccgactaatttttgtacttttagtagagatggggtttcaccatgttggccaggctggtcttgaactcttaacctcaggtgatccaccagctttggcctcccaaagtgctgggattacaggcgtgaaccaccacgcccagcccttacttctgaatctctctgtgcctcaggatcctccccatggagcaaatatcttagagggttgctgtgggggttacctagataacgcacatgctcggctaagtgctgcgtgggcgcccagtgaatgacggccgttgctattactgcctttttccaaactcaccaggccctctcggcctctagactttttgcacaggcagtttctatcagctggaatgccttcgggcactttttttcttaatttttattttttagaggtggagttgttgcccaggctggagtgcagcagtatagtcatatttcactgcaacctcgacttcctgggctcaagggatcctgctgccgcagccacagcctcccaagtagctggtactccaggtacgagccacgtcgtcctgccctcctggcacttttcacagctaattcctactcatcattctagtctcagcttaaatgtgacctcttccaggaaagcttctgtgaagcctgcgtcagggacctcctctgtgatcccagtgccctgatttctcccaccgctcagctctgattgaatcaatggattcggctctgctacgaatcagctaacttctaggcaagttgctggatccctctcctggctcaaaggggatgattccttggttctgttgacttctcaggtgtgggagtggagggatcacagaacttgggattctccaccctgaggtctctggaaggaaaatgatgtgaggccccgcaagggtagaacccgacctggagaagtgaaacctccaggaggccaggcctttactagcttgtttctgagcccagcagctcaggacaatcggccccgcccacttcgagactggagcgcgaacgccccgcccgcgccgcgcacctggctgcctggcggcctctcggacccgacgtcacgcactggctcgcgctccgcttccggctcggggccgtcgcgcgtctggtcggcgaccccccgggcgcccctcagccgcgccagctcgcggccccgtgcctcgcactcgccctgcgcctcttggcgctcgcgccgtgcgcccgccagctccttggtgagcgcgtccaggcgctggcgcagctggcgcacctcctcgcgcgcgcggttgcgctcagcgcgcaccttgctccatttctcgcgccaattggcagtgcagtccgaccaccggcgcatggtcttctccatctgcgccgcccgcgcccgcgcctcctccagctcccgcagccgcagctcctcgcggctctcccagtcgccgtcggccagcagcgcgggcgcggggggcaggggcagtgcgggcggcggcccgggcgagggcgtgccgctgggcggcgtgggcggcaaggagtcggcaggccccatgcgctccggcgacgggctgcccaggatggtcaggaggctgcccttggacagctgcggggactcggccagccgggggctgggcccgtggctcatggtgcggccgggcgggccctgagctcgaactcgcggtcgggctcaggggcggctccggggacgcgcggcgggcgcgatacaactgtgcatgatgacgccgtgccccgcttccctctgggccaccgggcggaggacgcctcctcggacctacgggagaacacaaccgttattggactgcgaccaccgtcagtctcgaagatcagccgcgccaaggccctggcggagggaacagaacggccaaggtaggaggagagagttctgttccaggagagtcccaatgaggcaggattggtggagcaagggcccgcaaaggcctcctcagtggcctcgactccctgctccaatcccttcacccagcggcgctaatctgaaaccttgatctgttctttattctcccggtcccggctcacacactgatggcttatactatactactatgcaacttccgcacaggacccaggcgggggcactgggctggtgccaggagtcccctccctgc

SEQ ID NO: 6852 - DNA, 6000 bp, Homo sapiens
cagtggataatcctgaaaacaaacatgacaaccacagcccaggaaatgctgcccgtgctggccacacgctgagccctcctgcctttgcccgcaggtgctggatccgggactccctggtcagctacatcaccaacctgggcctcttcagcctggtgtttctgttcaacatggccatgctagccaccatggtggtgcagatcctgcggctgcgcccccacacccaaaagtggtcacatgtgctgacactgctgggcctcagcctggtccttggcctgccctgggccttgatcttcttctcctttgcttctggcaccttccagcttgtcgtcctctaccttttcagcatcatcacctccttccaaggtaaggagaagacccgtcccttggcccaggcagggtgtctacacatggagcaagggcagggaagagatcacccagggaacctgaagacttcccttctctgggcctcagtcatcccattcataaaatggggacatccaggccacagtcaacaagtcttgattgagcacctactatgtgcaggccctgtgttaagccacagggcttatggctgagctggttgggtgtgggccttgttcttttggaactcagctctactggggaagactgcgcatgagcaggcaagcatatagccatcaaaggtggtcccagatagtagggacatcgtcgtgagcacgtgctgcacagggcctcggctggggtgggggacaccctaagaagggtggccagggaggcctctctggatatgagacgtgtgaagacaagagaaggatccccccatggagagatgggggggcctccctactccaggcgcggtccacagaccagcagcagcagcgttgttaggagctttttggaaacgcagcctctgggccacccgggccctgccacatcagaatctgcattttcacaaatgcccaaggggtcacgtgcacatgataggatcaggagccctggtctaggggaaggaagctccaggcagagggagaggcaagaacaaagatcctgaggttggaaccggttgtgtgtaggaaggacagtgagggagagcgtggccagatggcggcgggtcggggcggagaggtgggatcccagggcagggtcatgatggctctggcttgatgccaacagggtccctttctgtgcatgtacctgtgtgtgtacattgaggtgcacacacaggcatgcacacccctctgttcctggccgtgcagaatggaagggggttgtatggccaggcccaggggctctcatggggttcaaggccagcctcccatacagggtcaccctagaatgggagctgggagttggtggtggggagatgttaccacatttcggttatttaacattcaagccttcattcctgcctgtgagatgaggggactcaggattgtaagtgaggcccatacattcacacagacatttactaagctgtggatacatcatagtgctattaatttgaggggtgcaaaatctcacagtgcttaagtgggtggacttcagagcctgttcaccacagtttgagccctggctcagccacgtccctttacctgagcctcctgggcctcagtttccttgtttacaaaagagaatagtaatgaataggatgggcctaggaagtttgtgacagtgagaggccacacggggacgcagcacagtgcccggctcataggaggtgctcgctgggtctcatgggtgcccgacagcacgtgcttggcaaacactatggagaggtggggcagacccgagtcacaatggctggggagggaggaggagggatggggtggggctcccccacctgctgaccccgtgccctcactgcccgcaggcttcctcatcttcatctggtactggtccatgcggctgcaggcccggggtggcccctcccctctgaagagcaactcagacagcgccaggctccccatcagctcgggcagcacctcgtccagccgcatctaggcctccagcccacctgcccatgtgatgaagcagagattcggcctcgtcgcacactgcctgtggcccccgagcccggcccagccccaggccagtcagccgcagactttggaaagcccaacgaccatggagagatgggccgttgccatggtggacggactcccgggctgggcttttgaattggccttggggactactcggctctcactcagctcccacgggactcagaagtgcgccgccatgctgcctagggtactgtccccacatctgtcccaacccagctggaggcctggtctctccttacaacccctgggcccagccctcattgctgggggccaggccttggatcttgagggtctggcacatccttaatcctgtgcccctgcctgggacagaaatgtggctccagttgctctgtctctcgtggtcaccctgagggcactctgcatcctctgtcattttaacctcaggtggcacccagggcgaatggggcccagggcagaccttcagggccagagccctggcggaggagaggccctttgccaggagcacagcagcagctcgcctacctctgagcccaggccccctccctccctcagccccccagtcctccctccatcttccctggggttctcctcctctcccagggcctccttgctccttcgttcacagctgggggtccccgattccaatgctgttttttggggagtggtttccaggagctgcctggtgtctgctgtaaatgtttgtctactgcacaagcctcggcctgcccctgagccaggctcggtaccgatgcgtgggctgggctaggtccctctgtccatctgggcctttgtatgagctgcattgcccttgctcaccctgaccaagcacacgcctcagaggggccctcagcctctcctgaagccctcttgtggcaagaactgtggaccatgccagtcccgtctggtttccatcccaccactccaaggactgagactgacctcctctggtgacactggcctagggcctgacactctcctaagaggttctctccaagcccccaaatagctccaggcgccctcggccgcccatcatggttaattctgtccaacaaacacacacgggtagattgctggcctgttgtaggtggtagggacacagatgaccgacctggtcactcctcctgccaacattcagtctggtatgtgaggcgtgcgtgaagcaagaactcctggagctacagggacagggagccatcattcctgcctgggaatcctggaagacttcctgcaggagtcagcgttcaatcttgaccttgaagatgggaaggatgttctttttacgtaccaattcttttgtcttttgatattaaaaagaagtacatgttcattgtagagaatttggaaactgtagaagagaatcaagaagaaaaataaaaatcagctgttgtaatcacctagcaaactggcgtaagcattttgggtcatttccttctgagctttttcctgtgcttctattgaaagagtcactgatactaatacaaataccttggggccaatcaggaaacatgaaagagagaagagggctgtgtgtgaagaaaaaaaaaaaatcgactgctggaaacctcatcaaccagggcacaggggaagataaatggcaacttggtgtctgtgctggggaggcaatggggagtggtggggcctgtggcgaactggagactcccaaccccatgctgagagcgtggctgctcatcagctccagctggtcactaccttgcagggatgagggcccatgtagccagaccacctgccttttatgagaaatgggaaatccagactgtggtttgacatcccctgattttaaaattttggcgaatccaaaacattttctggccaaagagattacagtcaaaagctgcctggtcctgggatttatgcaaccagtttactgatcactctgcagcaggtgggctgcaagaattaaatcactggacttctctcccatccctgcctttaaccttgttccaccaaatcaatctctcctcccgctcctaaggcccaggtgaggcagatcacgcaggttcccatcttccctgtgatgagggcagtcacaacggatcattgctactgtgttcaggtaagaggtcccagtgcagccaaagtcctccccaaggcccacagtccactctctcccttctgcaggctcctccctcctcccctggccactctagggggatgcccagcaggggaagaggctcagagtcttggattggacaaggtgggtgtgaggcagctgggtctagactggcagtgccctctgaggggcgtgaatgtgggatcttgggacctgcagggaccaagaacccctgtgccctgctgctctcccagccctccctccaccccctccactccctccactgacctctgtccccacctttctgcaggtggggggctcctcttatgcccccagctccaaaggacagaggccaaaccttcccaagcctcccctaccccagtgtccggattgggcagccccgggggatcaaagccagcttccctccttacaggcttctaggtctccgtgaggggggtctctcagagccccatggctgggctaggtcctgggatgggggttgaggcaactccccccatcttccagaatgggggggaaatgacccagccccgttcctccgcaattctcctgcttctcaaacattttgtttctgcatctgaggctggctcaggtagtggggaggggtcttgggttgggtctcaccttctcaggtaggccctgcacagggcaccaacagttccatgctgatccttttaccccgatggttattatcatgcactttcccaggctgtggggctttggacagtgggatcgccctttctgccagcatgtggccaggcgtgcatctggaaacatccctttagcttgggaaatggattggagcagctgagggctgaatgctggctgggtctcgctggaggacttgaggccctgcccactggagccattgggagaagctggggcaggaggcggcaggaagggacactactgttttgttggccctggggttggggggggtctcagggttctgtgagtggctccaggctagtccctggtccccagggggcgtttcagggaaggggccttaggaaaaggtggccctccttccagccctgcctgaccttcccctgcacctgccctctgcccacttcccaggtgggctggctgctcggaatctcagtctgctcacccccaggcgcttcttcacacactggtacctgcgagcctctctgagggcccaggtgccaggatggggcttcagcgatgggcccagcacatccaagtccactgccccacctcaccctcacctgcagctgggagggaggtctgcagatcttccaggagaaggctggccaggtgtggagcagtggcaggcccagccattcatctgccttcgcagccctccctgcagaggaagtttctggggctcaggaagccctgggctctgacctgctgctccatgctgaattcccacctgctcccacaccatgagtgaccctgacatcccctccctaccccttcccagacccagagggctcagcaggagacactgagtgggaggaggaggaaatggaggccagcaggggctgagcggctccccagttcaatcccaaggctgagtagggctagtgccagccccgtgggccagagggggatgccagcaaccacacaccttggtgggatgcccttcaccttccaattgccaagtggccatggcctcatgcacagtgcatccgtggggcctccagagttggcccgagtggctggcgccctaattcctttaggctgaagcccaggagtgtttgccacccccacctcccacctgatcagtgaccatttggggtgtaaagacaacaatttcacagctctgatgatcagaaatgatgtaatggccacaggcggctccgcctgcgtcatccatgatttcatcacacacctcgggaggctcagggtgacagacagtgc

SEQ ID NO: 6853 - DNA, 6000 bp, Homo sapiens
cgcgcccccaaagttgccgcgggggaggggctactccccgcccggggctgagaccagccgagccccccgcccctgcccggcccgctcacctcgggcgcacagcgccagccggagcagctccagcagctgcgcccccagctcgcacgcgtccaggcccagcatggcggcgcgcggcccgggcgccgcggagccgccgaggagccgccgcccgccccgccgccgccccgctcggcgctcagccccggcgcgactgcggtgagctcatcccggccgggagcgccccccgcgcccagccgcgcccggcagagagcccccagccgctccggaccccgcgcagccccgcagagacgcgcgtgtcgcccgcacgggccggcacccgggtcgcccccgccggcgtgccaggaccccgcacagaagcgcccggacgcggacgcacgcagccgcggtcacgatccccgccgcccgcccggcccgtgcccggctctggccagcagggctgccccacccccacggcgcggcgggagcccgagggggtctcctgggaaaccctctgcggggcgccgtggcgcaggtgcgcccccatccccagggtctcattatccgcggccacacctggggccggaccgcgcgcccccttcccctcccccgctcctgagggagcttctgtctgggccgagggggactccgggggcctgcccagccttggggtgaggggctggcccaacaccctacaggttcacggtcatcagtagggcgggaccacagtgggcgcgggtcgcacgcacacccaggaggcaacaagggcccctcaaaggcttagcgacctggctgcgctgtgtgagttcccaagagggggtgtccctgcagggctcttggaaacccagttaccgagccccctgtcctcagggagaggacactgacaagggggcggagtacagagaccggagcacagagggggcttctgatattgacacctaaactgagacctgtgggtgggtgggggggatgggacccggcaggggacaggggtgagcaggccctggctgggacagctggaccaaaggcctgcgtctggataagggagaaggggtccgaacaccagcctgagtccctttcttagacacccctggccggttccagggacaccagaaattagacccgcccttgccaaagagctcctcaattgagagaagaccaccttgggtgctagggggcattggggtttgggtggggactgtctcccttgccccccaactgcccacaacctttccagggcaggatcctatgaacttgtgcccaggcccccctagagcgccacctctgctgacccttcgctgcagggagcgggggctgttaggacacttgtccccaggcccacagctccagctcctgcagctgttaccagatagaaggtcttggaggtgagttgtccaggttcttggtgggttgaacaaagaattgaacaaaacgcacaaagtaacaaaagaacaacgaaacacaaggaaacaaaactgagtcagaagaacggagtaaggaaagcacagatttaacggaaggcaattcacagagtgggagtgggctggagcaagtagctccagagcctctgtaattaggatttttattaagcaaagaaacctgaccacagcccttgtgccctttagaggcctccaattggctacaccctatgaaggattggcccgagaccaatcagaggtgaagtggaaatttctgtcttgttatcacagcagccaggatgtggcttgtgagctgcccaatcctgcctagaactggctgcacctgctgttccgtttcttatgcccaacccttggctaccctcattccctattctgcctcacagctaccatgggtgcccacccctgcagacagggcagccagacctgggccacctcaccccacctgggtgtggggcatgggagggctcactgggatccaagcgagatggtaccctggagtaagagaccccacaagccccctgccccagctcatgctgaacgtggcctctccggcaatggaaatggactcagaccactatgttaggggctcccagcccaaggccaaccgcccaccctgcccagcccctagcaccctctgagtgggtaaggatggggagaggtactctgcctccaagaaagcagaaatagaccagatgcggtggtacacatctgtagtcccagctactcaggacgctggggtgggagaatcacttgagctcaggagtttgaggctgcaatgagtttatgattgcaccactgcactccagcctgggtgacagaatgagactgccatctctcaaaaaataaatacatagccaggtgccatggctcatgcctgtaatcccaacatttgggaggctgaggcaggaggatcacttgaggccaggagttcaagatcagccagcctaggcaacacagcaagaaactgaggcccttacagacagggataagcgaggggctacgtgtatatttatctacaaaaataaaaatgaaattaaaaaaaaaattagtggccaggtgcggtggctcatgcctgtaatcccagcactttgggaggccaaggcaggtggatcacttgaggtcaggaagtttgataccagcctggccaacacggtgaaaccccatctctactaaaaatgcaaaaaaaaaaacaaaaaaaaaaattagccgggcatggtggcgcatgcctctgatcccacctacttgggagctgaggcaagagaatcgcttgaacccaggaggcggaggttgcagtgacccgagattgcaccattgcactccagcctaggcaacaagagtgaaactccatctcaaaataaataaataaataatttaaaaaataaagaaagcaagcagaaatagatgcatttgcaccttttaaaaatggtgctgaggctgggctcggtggctcaggcctgtaatcccagcacttcgggaggccgaggtgggcagatcgcctaaggtcaggagttcaagaccagcctggccaacaaggtgaaatgctgtctctactaaaaatacaaaaattagccaagcgtggtggcgggggcctgtaatctcagctactcaggaggctgaggcaggagaattgcttgaatctgggaggaggaggttgcagtgagacgagattgcgccattgcactccagcctgacagagcaagactcagtctcaaaaaaaaaaaaaaaaaaaagatgctggctgggcatgcctttaatcccagcacgctgggaagctgaggcaggaggatggactgagcccaggagtttgtgaccaccttgggcaacatagtgagacctcgacttagtttttaaaaaatgatccgaccgggtgtggtggctcacacctgtcatcccagaactttgggaggccaaggcaggtggatcacctgaagtcaggagtttgagaccagcctggccaacatggtgaaaccccatctctactaaacataccaaaatcggccaggcacagtggctcacacctataagcctagcactttgggaggccaaggcaggcacatcacctgaggtcaggagttcgaaaccagcctggccaacgtggtgaatccctatctctactaaaaatacaaaaattagctgggtgtggtggcgcgtgcctgtaatcccagctacctaggaggctgagacaggagaatcgctggaacccaggaggcggaggctgcagtgagccaagaccgcatcactgcactccagcttgggtgacacagtgagactccgtctcaaaaacaaaaacaaaaataaaaattagccaggcgtggtggtgggagcctgtaatcccagctactcaggaggctgaggcatgagaattgcttgaattcaggaggcggaggttgcagtgagccgagactgcccggtggggcctgaagatcctgggcctggctcggggtgcacctgggggacaggcatagccattggaggagggagagagctgggagtggagtggggcctgaagcctggcggccgccggtgacactaagtgggtgtgtgttgagggcctccctgcagtaaagctcctctccaacagtgtcagggtgccctgggcagggtttctgctcattccccagcgggccacccaggcctgcgtggagctgagggaagtgagccatgagccatcagccactttcccggaaggaccccggataagggacccacagcaggagatggggacagctgggtcacactctgcagcagccacgtgctccactgacagccggcatccggcccatgtagaaagctgacccaatctctcatgcaccctgcccctaaccagccaccgtcacagcaatgtatgcagtcttggccacaagcatcgcaggacacaaggcctcgggcagtcataccgctggccctggccccggccccacagccaggcctctagtccctgtatgtcctcagggccccacacataggaccggggttacagtgggccctaaaccacgtttcccaccccagttcactctccctacgggtctcctctactcacggaacccctctccctctctgaacccccatcccctccgctgccctccctgagaccctccccatagtaaccccccctcgctgatgagcccctctgcctctcccagagaccaccccctgctccagctgagctccatcccctcacatcccccctcggcccccggcccacaccctcccccgtcccacttcgccttcacccacgagggcctcagcgtcccgggacctgggtcgggggggtgactcgggtcgctcgtggggggccggctcgtttgcctctgggccgtggccgtgtctcttaaaacccgaaccggggcctgggcgactctggcctcgcggcccgagggttaacccgggcgcggcgcggcgcggggcggggccgggcgggacgtcggtcatccccgccggcctcgccccgcagccatggccgccggccccgcgccgccccccggccgcccccgggcgcagatgccgcatctgaggaaggtgcgaggcgggtgggtgtcccgccgtcccccgatttcccggcgcccgaggccgggaggggccggagagcatggggacacgggggcgcgcggggcggggcgggcctggggcggaggtctgcgaggccgggaggggcggcgaggcctggggcccttgggggtctccggggtctccccggccctccccggccctccccggcccgccccgcgtccccgccgccagctgcggcctggaatccgccgccgccgcgcgttaatctccgcgctcccggatccggggcatcccggccggtgccagggaatcagggttgcggggcggccagacaccccctgacgactccctccgcccagatggagcgggtggtcgtgagcatgcaggaccccgaccagggcgtgaagatgcggagccagcgcctgctggtcaccgtcattccccacgcggtgacaggtgaggcgcgccggggcgggggtgcgtgcgcgcctcggcctccctccacctctgtctctcccgtgcaggcagcgacgtcgtgcagtggttggcccagaagttctgcgtctcggaggagggtgagcgccctgcctcccactgggccctggggtcactgggctggtggcctaggcctgggttttcctggagtctggcagttctcagagccctgctgagcgcgctgtgcaagggtggggagcacataggggagaggaggcccggctcgtcccgccctcgcccgcttccgcggccccgcgctcaccgtcccacccctccccagaggccctgcacctgggcgccgtcctggtgcagcatggctacatctacccgctgcgcgacccccgtagcctcatgctccggccagacgagacgccctacaggttccaggtcaggctcgggggtgcaggtgggagccggtgggacccccacccccacccacccagcttaccaactcggggagacaggaggggcgccgagcttgctgggattggagtgggactccgccatgtcgccgtgggct

SEQ ID NO: 6854 - DNA, 6000 bp, Homo sapiens
caggcgggtgtcttcctgccccatggggtggtagagatagccaggaagtgagtgccggccgcccagggccccaggcttatttcccgagacggagcttggccacctgtggtctggtctccacgtagcaggatgcacgttcgaggcctgtgacccatggggtggtaagtggggtgtgcagctgccccacccgtgttggggtgacctggctgtccccagcagccacctctgcacgggggcttctggtcagttcgggccatcctagcatctggctaggctctgccaaacccatttgccaatcagatttggaagactggacattctgtggtttccctagccccggaagcagcagcagggccatcccctgcactgggggtcccaggatccctgatgggctgtggcgtgacccatccagggtcttagaggccaacctggattcacagcatgtcctgtggttagaggtacaggcgggtccttgggccctgatgcacttacagtggtggccacccagcccgggatgtttgaatgaagccgtggggacagccagaggccagaacacaccgtcttaacttctaggtgtccttaggcaaaatcacgggacctttgtcatccctttttttttttgagacaaggtctccctgttgtgagctgtggcatgatcacagttcactgcagcctccaccttccaggctcaagggatcctctagcctcagcttcccaaagtgctggaatgacaggtgtgagccactgcacccagcctagtcatcccaaagcaagtgtccgtctgtgtgggcagggactctcccaaagccagaagccctgtcaggctgctgcacggctctggccaccaccctgcggatcacgggctcctaggaaagccgccccagggaccacgacacaccggagggtggcctggggcagaaggcgcgactcactctcccttcccttcccccacagaccttggaaaggtctcgcctcaaggcctcccaccaccctcggctgagcaaatgtgtctctcttttggaaaatctgcgacttctgagctggtactcttggaagagcgtaatttggtggagccggcagtgggggcctctgaacccagcaggctgttattttgcccgtcggttccccttaaacacactcaagttccgaatgggggcagcaccccatccccgggagcccagctggcattgctcctggtgacacactgacctccagtcctcaggccaggagctagggcgtccgagcctgtggggatccaccgcccagcctgcttctgtccttccaggacctcctgcctcaggccatgcttctggttagcaaagacatacctagcttttcaggagacgggcgtctcttaagtaggaaacctccggcgactgtaaccacgcactgacctgcagctgttcagagtaaaccgagctaaggcaggcacgctaccccgaggctgcagcgcgagcgtggctacggccaagcccccagcaggcccctgactacacaatggaggtcaggtgtggatgacagccacgcacccgggactcccttgaagttgttttttttttttattatactttaagttttagggtacatgtgcacaacgtgcagctttgttacatatgtatacatgtgccatgttggtgtgctgcacccatttactcgtcttttaacatcaggtatatcccctaatgctatccctcccccctccccccaccccatcccttgaagttttccgttgtgttttctgtgcttgggtttaagagcttcaattgtttttgaaaatcactttgaaactttcacagatgacagaaaagtcgttgccgtgagctccagttaactaggcggagtgagtttctttggtgaggagctgccttcgttatttccccaggccccacgcttgcagttttgtttgcagggactgagggaagtcagcgtgtcctccacacacattcacccaccacccccgggctgcttgggtcctgcaggccacagggtccccctaggacagccagagccctctgcagagcctagggcacaggcgggtggaggatgggactggtccttggtccccagctcagcactttatccctctgttccccggagagttgactggtgtcgggggctgtctcccccacccattcggagttgaggccgcagcgagaggccagtcccgggagaccctgctgcagcttcccgctaggaagggatcagagccccctatgccagtgtggtaccaagccctaaagtcagcgtgaagggcctccggcctcctgtgcttcccccacggtcttggttggctgtaaatgggaggtctcgatgctcctgccccaagccaggcccagcggcacagccccacgcctggtgggtcaagagcccctcgggccagggacagctatttctagggcagcggaaagagccctgcgtgttctcagccagcggcccaattagtggcctaatttcagaaaggagcccctggcctcgggaggctgtggtcactccgttgggggactggctgccattcctcccaatgagaatcgctgaagccgggtccagctgtagggccgggggaggcagattccagacccgaggctgactccagctcaaggcgtcagcgcccggatgtgtttgggggtttccgagtgcagccttggtaggaaggtcgaagtcagtcttcaagacccccgtcttactgaggatgggacctcacagcccctcacacgggagcagaggttactgcacccacccaggtcagcacaggacctgcttctgattctgggggtccacacgacaccgaggctgactggtgcccccccagcgaccagaaacgccacagaagtggggtgagagacgggacccacatcacatgcctgggacatgggcctgcagcagacccaaaaccctcagcttgccctggccctgcccccacttccctcaacctcctcctgcccttggccttgggggtcacccagaccctgctcaggtaggcaggccgggtccaccatgcaggtacacacagccacttctctgctgagatgctgaggactggcaggacctgcccggaccacagggcagtgctcactccaggacgtgaccccacggcccgtctcacctgtcctggtggcccacaccacactccaacctgtgtcctgattcactgggggcactggccgtgttggacagagctcaggcaccctcagggaccttactgggtccagtgaattgaccaaaagccagaacctggagccttggcgaccccattaggagacctcctaggtccttccagatgagcagatgcaaaggccgcttggggtcctgagagtggccacagaacccccagctctcacaactcagctgcggacctcagggtgttcccccgcctggccctggctccaagccacctgctgtcccagggaacgtgggggacatgccctggggtcccccccgccttgcctgcatcctggggtggcacacacccctcccctaacagccattccactctctggcgcccaaagtggtgcccccagccacagggagagccctcagcagcccagaaactaaggtgcatccgaagtcacagcaccagggggcacaggcagggcagggcgggcactgggatcagggagacgtctagcccccaccatgccaagaggggcaaccatctgccctgaggaggaggcctcgtgccctgggctttaagctgccccaccccacccccaaatccataataaaaataatcccttccctaatgtgccccagttccagaggcgcctctgatccagccgacacacatcagggcgggaggtgcaggtggccccgattcacggagtcacactggcagggagtcctgctgagtgacttcagggacctgagcgcctgagagggacagggcccacctctccccgacaacccctgcagaggtctgggccaccccaggcaggccgggcggttccctgtgacactggggaaggcagagtgacctgctcacaggcccctggccctgccagcacccaccgagggcctggcccacgcttccccgggggtggcccagcttctgcagggactgtttggggagcttggccctgtgcccccagaggctgctgttgctgcctgggcgcccccacctaggatgcagcctggtatgtacgtcacctgctggtacatagggcacagctcccacaggagcccaaggggtacacccaagggcagggtgggaggagacacggggaaacgtgtcagaggaaaaggggccagtctcagctctgcaggctgacaggtgcggagccccaaagggaagccctctccccagagccttgaggtcacacaacccgagcccaagtgctgcagctgggggcacctctcccgaggcagcgtgccccagagcacccacagtggaccggtgttggggacgcctcaggccgccactctcagctcagatcagactgaaaagcacggcactctcctgccctcgggagctgccccgtgccggccactggtctgggaacaggggatcgggctggagcagggagctccacagagccccggggcccctagcagtaagaggctcacatcccagggtgagccacatggcccacacaggatgcctctgtcaggggggcacagctgagtgtcacctgaaccctgcaggctgcagaggcttcagagggcaaagggtcccagccccatccccactcctcccggctggcccaggacactggagggggaacccaccccctcaagtggaaggagacctctccaccagggcccaagctggcccctcagggaaaatggaccagccccacactggcccctggctgcatgtccatccgctgggtgagcccaggggagggggcagcacaggctatctctggggtcagcccagccctgaggagggtgtgggggcggcgccagggcccaggtggcgggaggggcggggcacagccagggctctgcctggcggactcccggaacatcacttggccctcgctctcactcgcggtcgcctggccgttgtcattgtccctccgctgtcaccttttcaaggtaggtccgatgaacaggcgcccggggctagggagggcccggaggcccctcgactctcagctggcccaggtcagtcccctgggctcaccctaactcccggggcgagggcagctgccccgcaggcagcaaaacccaacccgagccggtgctgcaggcagggaggcggctctcgcggtgcgggggagctgtgtccatctgagcgccgtgcgccgcctgcagtgcccaccgagtcccgtggctgggggcgtccacggggtgcacggggtgggtggccaggcttggcggcagctgcgcgaaggtagggctgggcagcaaggactgggctgtgggcggggcgccaacaccccgggcctgggaggacccgcacgcagctagtcctgcgcccacggggctgagtgtagggtctccgagaaaaggcctgcaccggggatgggggcgggtaggggtgctggaactccagagtctccgggagggaatcctctgcatgaccctgatcactcccccagaaacctgcccccgctcgctccccggcctcccaccccactacgggcagaccctctgctggctgctgggagtctgcccaattcaccaccgggaccccaccagcctcaggccctgggcccctccctaggtggccggtgcagctgcacgaccaaaggatggggagactgttgggccaggagcccccttcacagccagaggcaggctccccgaaacttgacgccaacccccacccaccctcccaaggttcagccctgtctcccaaccttggggacgggggccagagttgggacggagtgagggactccctgggcccctggagtgggtagggggagaggcagggggcaacccacccccacttgcctcgaacttgtggcagttctgaggggtgtcaacctgtggctttcccaggctggccacaagcagaaagcacgcaggtaacgtgtgtggttcccagacacactg

SEQ ID NO: 6855 - DNA, 6000 bp, Homo sapiens
agcttcccgaggcctccccagaggccgagcagatgctggggtcaaacgtgtacagcctgcagaactgtgagctaatacatctcttttctttataaattacccagtcccagccacatgtggtggctcacacctgtaatcccagcactttgggaggccgaggcgggtggatcacctgaggtcaggagttcgagactagcctggccaacatggtgaaaccccatgtctactaaaaatacaaaaacttagctgggcatggtggcgtatgcaatagcttgtagtcccagctatttgggaggctgaagcaggacaatcgcttggggaacccaggagatggaggttgcagtgagccgagatcatgccattgcactccagcctgggagacagagcaagactccatctcaaaaacaaacaaacaaacaaacaaacaaaaaactacccagcctcaggtattccttcatagcaatacaaaatggactaagacagaggtccttccacagtgccctgtcctaacccccctcacactctaccgagaaggtcaacctcctccattgacatggagcatcctgagtgcaagatcacaccatatccatctagggaccaccaacgggatcaggcacagagcctggcactgaagagaccctgctgaggtcccatggtcaggcactgggatcacagtggaaagtgagaagaccatgggtaactgggtttgagtcctgcctctgacacatacagctgtgagaccaagggaaagtccctcaaccttcccaagcctcattttaccacatgcgacacagacaccaacctcagaaggttctgttgttcaggcaagatgattcatggaaatcgactttgacaactccaaagccctgagtgccacattcctttaggagatgttctgcttattagcagagacaagaggatgatcatgaaaggtctggacacagaatagacatacttgaaaggggaaagcaaagctggaattcaattattcttttttttattttcttaaaaaaaattttttttttttgagatggagtcttgcactgttgcccaggctggagtgtagtggcatgatcacagctcaatgcagcctcgacctcccgggcttaagcgattctcccgcctcagcctcctgagtagctaggactacaggtgcacgccactatgcctggctaatttttaatgttttgtagagacaggtctccctatgctgctcaggctggtctcaaactccctggcctcaagcaatcctgctaacttgacctcccaaagttaactattcttttagtaaacaaatattcgatgagccatgccctgtgccacgcactggatgccaggataaacaatagacatagttcttgtcctcatcaagcttaaggatatgctatgcatacagtagccacatgtggttattgattatttatttacttatttatttattttaagagacagagtctcactctgtcacccaggctggagagcatgggtgcaattatagctcactgcagcctcaaactcctggcctcaagaaatcctcccacctcagtttcccaaagtgctggattatagacatgagtcatcatgcatgtccagcctaaatttaaatcaattaaaaataaataaaactgaggccgggctcggtggctcacgcctgtaatcccagcacttggggaggcctgggcaggtgggtcacctgaggtcgggaattcgagaccagactgaccaacatggtgaaaccccatctctactaaaaatacgaaaattagccaggcatggtggtggacgcctgtaatcccagctactcaggaggctgaggcaggagaatcacttgaacccaggaggtggagattgcagtgagccgagatagcgccattgtactccagactgggtgacagtgactccatctaaaaaaaaacaaacaaacaaaaactgaaagttcaatcctgtagtcatacaagtcacatataaagtgcctagtgggcacatgtttagcggctgccattatcagacagtgtagattggacggcacagcactgagatacagtcttgtaggggagacagacaccaagcagagagccatgcaaatatctaattacacactgatatggtttggctgtgtccccacccaaatctcatcttgaattgtagctcccataatccctacatgtcatgggagggacctggagggaggtaattgaatcatgggggtgggtttttcccatgctgttctcatgatagtgaataagtctcacaagatctgatggtttaataaagggcagttcccctgcacatgcactcttgcctgccaccatatagccaccatataagacgtgactttgctcctcttttgccttctaccatgattgtgaggcctacccagccatgtggagctttgagtccattaaatctctttttctttataaattacccagtcttgggtatttcttcatagcagtatgaaattaatacacataccatgacatttgtcagtgggaagccatgggcagtgcactgaccatttctcaggtgaggaatagagccagggaagccactggttttcattagacaaagtgaactgggcacttgagagcctgacatggctccctggacctcctggagccattctctccaaggctggagacccagtgaactctcctgggaggtgaggttcctctgtgacaatgtctgacctgacagcaaatgacaccagtctaaccattggtggataatatggcctgcagagccagatggcctggattggattttgtctttgccaaccgtctaaccccggggcagtacttaacccctcttggcctcagtgtctccatctgtaaaacagggagaataacagtctctggcctaaagggtaactgggaggattaaatgaattaaagaatttaaaacacttagaatagctcctggcacacagaaagcactatgtactcagctattattgttattattatcatccatgggtgtttgaactttttggagggaaggaatgcacctgccactcaatgtcctccttcattttcactctgtgctccctgtggtatcatcacccaaagtgaaactgaccatcacagtcagggtcctctgtaaaacaagtgggaaagggaatataaccgtaactgcaatgttaatcagctcatattaaggattttccacatgccagaccctgcgtgaagcactttatatgttagcacgtgttagaccttcacaacaaccccaataggcatgtgcgatgaaaaagatctccattttgcagacgttgaggacatgtggctcacgaaagtgaacttgcccacgttgacaaaaggatctcggcgtcagttccaagagctgccaccaggtgacagtgcccatccactttccaattgcgcagtctggcgggaacacactttgggtcgtcccgcaaacatttaatgagcgcctactgtgcctggaactgttctgggctctgaggatccatgcaaataaaccaggagtggggcgaaaaactgccattatggttcttcctttccattttcccttgaatataataaaaggtatcccagagatgcgtgcccaagggggatgtggcctaaccggaccggaactgggaggctggcagggagggatgggagtatctggaagggccacggtccccaaagatcaggggctgccactattcccagaaggaggtgttctgcatctccccttcctgcagcccccgggagaggggagcaggggtccgtcctatcccttttggtcttatgtggctgggatggttgcggcgacgggggtagagattggggggcgcaccgcggagggagaaaggaaatctcaccctgagaatctggagtgcagggaagggatgctgctcaaaggtctgtttctggctttggcggggggccacctgagactgccagggtttgatggtctgaaggtcacccagggaaccagccccatatggggtgccggagcgcagctcccaggcctggtcgaagcaatgcgacctcggagaggcctgaggactaggacggggtgagggggactcagagacggctgccccggacccctccttcaagcaggtcccacggccgcccagcggacacgcgtccgggctgtgccctgaccgtctgcggagcgcacggccagtggcccgggccgctgagtgtgtgagccctgaagggcagtggacatgtgcgtacgtgggtgatgtgtgcggtaggggtggtggcgatcctgcgtagggacccacgtgaggggtgcaccgactggacgtgtgtgtttcgaggggccaaggaagcgggtgttggtcccagtgtgcgtaaacggacaacgacatctgggagttgggcagtgaggagagagaagagtgtgtccaggaggaacctgcctggaggaggcctagcggtgtgtgtgcgcctaggtgtataccggggcgttggtgacttcgagaggcaccgggcgggatcgatcctctctgcgtcctggacctggtgctggtgtgtttcggggaagttactgcttatgaaccccccttggagcgtggcctgggggcaggaaggcttccgcgctgggacccctgggtcgcgatacctccctcggtaagtgtattggctaggggagtgttcccgcaaatggatctaccctggggagttgcccggctcgtctggactgcttacgggcgcactgacgttgtggggggaatgtccccgaattgggggcacgaggtcgggggaatcgtctctgagatccgggctagaagctacgagcttgggctccgggggtgcatgcagacggcgcctagccccgcgcggaaccgccggcgggaccgggggtggggctcggaggcccgggggcggggccggccgggggcgggggcgggggcggggccgcggccgctgcagcagcgcgggccgggccagggggcgcctcgcgcggcagcgactctggcaggcgctgcagtgaagctggacccgcaggcgggcgtgcgtggagcgggggccgcggccgcgccgcagagatgtgactcgggccgaaggccagctggagcgtcggcgctgcggggccgcgggggtcggtaagtgcgagctgcgccgatgcagtggaggacgctgtggggaccccagaaacttttcccgccgtggatttgggagaattggggggtccgcttcttgtgtttttctaagcgcccccccaacccaagccagggagtttattgctgggggagatgtggaatctgggcgaggggaaccacggtgcgacgagagcagagccgtagaggggtgggcgggggaggggaggatctggggacctttacggggggagggagactgtgcccggaccaggtagagatccaagtctcccaggagggtgtgggggcgaccacaggtgaagggcagctgggagggtaaaggagcccagccgtgtcctagtgactcgtcatgtgtgaggagctgcgggctggtcctggggccgcgttgggggctgactgtggacagggcagacgcagccgggggcacaagggctggactttgggggtgaacagccgcacctgtcgcgggggctgggggtcaagcccgcagccggcttgagtgcgcattactcagcaaggggagggggggacacggcggtgggagatggcagagctgagacctgggctggggacgaatgacggggaggggtggggaggagggggcggctgcatacaatggcggggggggcagtggcgtttcccttccagacagggggcacttggacctctggaagaggcggctaggctggagataaggactagacctgttctcggtcccctctccttgggggacacaggcttccagccccacaaggaccccacacatcccggggtccctagcgcttaggccgaaaagggagcgcgcgggaggagcccgcacccgccttggccccgggcagccggttgaacagcctgggaaggggccaacgaccttgccccagaaatctcccccgtgcagcgggttcactcctccgtcc

SEQ ID NO: 6856 - DNA, 6000 bp, Homo sapiens
agccccaaccacagttggcttgagtgcgccattgtcatacagaaccaatcaagtggatcagccccttgagcaaattatccgtgggggtgtgtgtgtgtgtatgaattgattcatgcctatatcttgcacttgacttaaagatccaggaaagcagagaccacgtcaacttttaaaaacaattgtatacccagaatcccatacagtgactagcgtacgcatatctagtttgttacagtccccactactccctattgccttccaaactctgagtaaagtgttagttgcaatttaagttatgtttatgttgttgtttatcttaaagaattatcccttcataccgccacctctatcaaagggtggagaaacagaatctagaccaagaggaccaagagtttccaggaaaaatgggagatagcatatttcctatgaaagtgaagaatgtggctgggcacagtggctcatgcctgtaaccccagcactttgggaggccaaggcaggtggatcacttgagatcaggagtttgagaccatcctgaccaatatggtgaaaccccatctctactaaaaatacaaaaattagccaggcatggtggcaggtgactataatcccagctacttgggaagctgaggcaggagaatctcttgaacccaggaagcagaggttgcagtgcactccagcctgggtgacaagagcaagactctgtctcaaaaaaaaaaaaaaaaaaaaaaaaaagctgaggcaggagggtcacgaggtcaggagatcaagaccatcctggctaacacagtgaaaccccatctctactaaaaatacaaaaaaaaattagccgggcatggtggcagaggcctgtagtcccagctactcgggaggctgaggcaggagaatggcgtgaacctgggaggcggagcttgcagtgagccgagattatgccactgcactacagcctgggcgacaaagcaagattctgactcaaaaaaaaaaagaaaaagaaaaagacagtgaagaatatttattacctgcccaggctcacaggcattcaagtgtgaaactcctcctctaaaattctgtatatatttctattatatttatttattaactaatctaagttttacttctggacacctacctggcactgctcttggcactaaggatacagtgaaggataagacagatgaagatcctgccttcatgttacaaagagcctacgtgacagtgtgtgacgtttcctatcacttacctatccttccactagtctgagctcctgatggtttcagcacaggctctggagccaactgccttggattcaattccaaccaggtgttcttgggcaaattactaaacttctctctgccttggttttctcatctgtgaaatggggctaataattataccttccttccattgtgataatgaagatgcaatgagttaagtcgtggctgtctcttaacaaaccctcagtaaatgttaactcttatcactcacctgtgtctcctaagccggactggcctcatggatgtgtgacctatgtagtcactcaaggtcccatgcttgaaagggctccatgcttggtttaatgctctactcttggtgtcttgaaattcttaataatttttgaacaagagacctcgcatttttattttgcactgggccttgcaaattatgtggctggtcctgaccagcatatgttacgtgtccggtaacattctgttgaaagaatgaataaatgaatgaattcagccaaccactgttgttgaactgagtctgccattgtcatacagaaccaatcaagtggatgagccccttaagcaaaattaaacagacttttgttgttaactcatcctgcccattccctgggacccaggaacactcaaagcttgacttaagtctttaaagatcttctcatccaggccaggtgcattggctcatcaccataatcccagcactttgagaggctgaggcaggagtttgagacaagtccacgcaacatagtgagaccatctcttcaaaaaaataaaaaatcttctcatccaaactatccattttccaggaaacttggaccttgacaaactgccagtgttcctgatggagccagcagaggacccaatccaattccccattctccagaactgcagtctgcaccatacgcaccacacccctctttttctcccagctcagcattcctgggacaaaggcatacctgatttctttcatccccattttacacggagaaataaagattcagacacaataaggtccgtcaagatttcccatgcagtccagtccctctgcctagccaagtttgtagttctgtgaattcaaaccactcaaatcatttttggagtgacttgtcatacatgatcattatatgcttaatccccctaaccccaacagcattctgagaccctggcctgcaaagacaagcaaagataaactcatctccctgcaggccctgggtgctgagtccattcattctttcgatgtctgttgagagtctgcagcatgcaggcaccgtgtgaagctgagacgcaaccaggaacgacacagacaaaaggccctgcctttctaagagaaagaaaagtaaataaatacaacgtgtatggtctgctgatggcgctatacactatgcagaaaaattaagcagcgagggacagaggatgtgaatactttgaggtgggagaagaatagagatttcaatagggaggggagtagagatttcaatgtaaataggattataagggaaagcttcaaagagaaaaggacggataagcaaagaccctaagaaggtgaggaaacagctttctgtagctgtgcagaggaagaacattccaggcaaagggaatggccagtgcaaaagcccagaagccttatccatcattcccaatgcagagggcatctttgaagagactaggagggctttgtcagatcacatacatttcccccgcccctggctatccccaacttctcatctcagtctagctgcctgcagaccaatccaatctataggtttttgaacaattatttattgagcttctacaatggccagccactgctttattcatcaatgcagcggtgttctcgttttctttgtgtttgcagtagtcatatttaatcgagagaggtcataataaaatttcagtatctaatggggcttgaaatctcagacctggcctcactgggctgggtccatgtgactctaatctgcccttttgtggggccacgtgcctccttgcttaccacagacccagctagatccagtagatgccccccttatgcagactgcctgactctgtatgctttggagatttccactctgccctagagtgtcccccatccctgcctggggtaacctctaacaaagacaagaactggatacatgctctttgctggtcttgagggacaggggtctgctccacgttgggagacctggaagaggctggggaaagcttagccagttccttctctccaggaatggatgtgatataggggtgaggggcgttgggaagcagcgggagtggggggtttgagggcggggggtcttaggcttctcagacccatcacagctctttgcataggcagctgctacagtctgctcctggggatgcctggcctgggtgttcctgcagaatctttaactctctcacactcactgtcttgagccccagacagacactatgtccctctctctctctctctctctctcctctctctcctctctctctctctctctctctttctctcctctctttctcctcaagtctgtggtggccacacccggaaccctccacctgcctgccctgaggagaaaggaccacccacccacacattgcttggatcccacctgccttacaaatgctacccttcacacaaccttcaagcactctcgacaagcccccatgactcccgcgtgcgttttcgtatgtttggagcgccctgtgagtgtggtcttgtgcatggtgatgaggatgcctgcgtgttttcaagggtctgggtgtgggatgggagagcatccgcgtgcctgagtgagcgtgtgagtacaccgcatgcctgggtattgtgtgtctttgtgtgagcgtgggcgagtgcgtgtttgagtgtctgcaacatccttattcctgactgaagggcggcatgcaggaggggcttctcttagccagtctgtatcctcttcaaacgcactccagttaggggacagttcaccggcggccacccccagagtcgccacacacacgcacagggaggcacgcacccctctttccagagccagcaagctcagcttcccttgtcgaggaaaaccgacaacgctttagcatcctcgctgctccaacagccccaccccttcccccgttctttgccctaggtatagaatcctctatccggagatggactggaagcattggagaggggcaagagaggtggctgcgaggagagtggagaaaggcaaactgaggacacgctggaggagtgaggagccgctgcgggagaggcagatcctacccacaccacgcccctccctcggggttggagattggggatagcctgttttccactccggtcttccttcggggctcccaggtctaactgcatcttctcccctgaaagtggagccaagcgaggcggctgggaccccctcctcttccgcatccctcccaccccacacacactccgcttccaggcagccgctgattggctgcggggagcggcgtcccagccccccggctttgaggcgggagtggagcgggtccgaggtgggaggcgcacagacgggctccgggagcccctcccgaggccccgcgcagcgcgccccgcaccctgcgccccgcgccctgcgggagggctgagccaagactccaggcgggcaggtgcggagcgagcagaggggatcacggccaagggtaggagccagtcctgcggggagagaggcgctgctgctccagctgccgctgcctccgccgccgccaccaccgagccggcgaccagagtcgggctggcaggccgggcgcgaagcggcaaggggagcgaggggcgcgctcatggagcacacgcacgcccacctcgcagccaacagctcgctgtcttggtggtcccccggctcggcctgcggcttgggtttcgtgcccgtggtctactacagcctcttgctgtgcctcggtttaccaggtgaggggcgtgggggagagggagggaagccaggaaccccaagtgccgggcaaccctacccagaatcccccgtcctcccccgtgcgttccctggcgccccctcggaaaaagtttaagctttaagggcaactatggatatttccacacggggggaaaggaagttgctgtgccctagctggggaccgtgtgtgtgtgtgtgcgcgcgcgagcgtgtgtgtgtgtgtgtgtgtgtgtgtgatgactgtgacggcgggcgatgggctgggcatgtgagcatggattcgaaggtgcatttgtgcgcgcatctggagggggcggctttcatggggtgggggcgtagagggctttgtgtgtgtttggcttgactgcatgttctggacagaaggcttcgtggaggcttcccttctcccgtggcccctgcacgtccaccccacttggggcacctctgcccctctgcgtgtccccgcctgacacgagatgaagctggagaccctgacattgagcactctcttgctcggggggcactggaatggagaaagaatgcctagcaagaaaagggtctcccagctggctaaggagaatcaggggttggctctgggaccatgccctggccagggcaagggtgcagagacacacagggcagcctgcggtggctgccacctcagggggtcacagtctccttgaggacatgcctggccccctggcttggcctccaggtctacccaccctgggcagctcacggctgctgtggatgtctggctggtcccacatcttaatgtcctttccaaagtgtggctgagacttgtcctgaattcctgaagagagctgagctgccgagaagga

SEQ ID NO: 6857 - DNA, 6000 bp, Homo sapiens
gagctgtgttcataccactgcattccagcctaggcaacagagggagaccctacctgaaataataataattattatgatgatgaaaataaaaatatataataaaagagattaaatagctgggcacagtgtctcatgcctgtaatcccagtatttcaggaggctgaggtaagaggattgcttgagcccaggagttcaagaccagtcgagaccagcctgggcaacataatgagacatcatctttacaaaaaatttaaaaattagccaggtgtgttgatggtctcactatgttgcccaggctggtctcaaactcctgagcttaagcgggcctcccaccttggcctcccaaagtgctagtgttgaccattgatatgataccttggtttatgtattcttggtttaaaagaatttaaacaagagacacacagcaaaacaaatgcagcatagagtaacttcttgcaaaagaaaaaggatattttgaaagttatggctggttgcagtggctcacacttgtaatctctcagcactttgagaggccaaggcgggcggatcgcctgaggtcaggagtttgagaccagcctgaccaacatggagaaaccccgtctctactaaaaatacaaaattagctgggcattgtggtgcatgcctggcaatcccagctactcgggaggctgaggcaggagaatcgcttgaacccaggaggcggaggttgtggtgaaccgagatcatgccactgcactgcaccccaggcaacaagaacaaaactccgtctcaaaaaaaaaaaagaagaagaacaaagttaggtgcagaatagacagtacaccctgagagagagggaactgagggcaggccgcttgtaagaatgagacagcaaagatgcacgagggagactccctttatgggagccttaaatggttattcataaggagatgagagaggtgttactagtaagcctgttctgggtggtcttcttctcagtgcacaagtgctgtagctgtgaatgcttgttcataggttgcacgtctcgttagcatcttaaatctccacccagggatatgttttttactattaaaatgaggaaaaaggctgggcatggtggcgcatgcctgtaatcccactttcggaggccgagaggggcggatcacttgagctcaggaattcgagaccagcctggccaatatggtgaaactctgtctctactaaaaatacaaaaattagccggacatggcagtgcatgcctgtaatcccaactactcgggaggctgaggcaggagaatggcgtggacccgggaggcagtgagccaagattgcgccactgcgctctagcctgggcgacagagcaagacgtcatctcaaaacaaacaaacaaacaaaaaacgaataaacaaacaaagaaccaggaaaaggtcaatttgaaggcaggtaagatcagaatgcacatgctctacagaagggaaagtacctactgaagatagctttgctttaatgacctcaattacaaggtgaatgctgaggcttactgtgtggactgtgtggtcaccacagttgctgtgtcccaagaacatggtcacattcttgactacctatcctgcctcactaggattacaggtgtgacccaccatgcctgaccaatggcattaattacattgacaatgtatgcaataatcaccattatctgtttccaaaacgttttcgtttcaaacaaattctgtaaccattaagcaataactccccacatccccttccccagctgttaataacctttaatctacttcctgtctctatggatttgcctactctagacatttcatctaagtagaataatacattatgtgttcttttgtatctggcttctttcacttagcataatgtctcagggttcatccacattgtagtgtgtgtcagtgcttcattccttttttatggatgaatgatattccatcataaggatctaccacattttgtttatctattcatctgttgatggatacttgtgttattttcacattttggccattgtgactaatgtacaataattgttgtacaaatatctgtttgagtccctgttttcaattcttttgggtacaaacctaggaatggaattgctggattgtatggtaattgtatgtttagctcctgggggaacaacccaactgttttccccagcagctgcatcattttaccttctcaccagcaatgtagagctctagtttctctacatccttgccaacacttgtcatttttgtctgcttgtttaattattgccaaatacgtggaggaaaaggggaattcctatcctcctccatttagtcctggtgacaatgtccatcactggattcccgcatggaatggattgagctgatgatccagaatgatgagagtactctgttcttccatgcagaatggtttgttcaggtttggacacatgacccacgaagggatgatcacaaccttacctggagttgaggtaggaagcagggctcggacactggaccaaattgaggattagctaaaagagatggggcggaagcagctttccataagacatacccaccagtgacacccaggcgtcactgcccctttccatggcaatgactcagtgacccaaacgttactaccccttccctagaaatttctgcataaactgcaccttattctacatgtacttaaaaatgggtataaatatggctgcaaaactccctagagctgttactctcagcacactgcctatgggggagccctcctctgcaggagcagtcaggcagctgtaacactgcctgctgctttagtaaagctgttttcttctaccactggctcgcccttgtattctttcctgggcaaagccaagaacccttgcagactaggcctcactttggggctcgcttgtcctgcatcagtacaatgttattaataaataaacattggtagagggaagtttcatgtgccctgtggctgctagtctggaaggatgtgaatttggagccactgttggacatcttgctgccacatgaggagaggtaatctgcagaatgaagctgagcagaagccaatgcagtagtgagatagagaaatacagggtcttgatgttatcattcagctccctgaatttggtctggcctgaaacacaaaggctttgcaagaagacaccttggattttgtaatgacattaacctgtcatttctccctaggctgatatgagttggttttctatcgcttgcaaataatgtctttgctaattcagtgtccattctcctcctcctccccagatctttcgtaattagctttatgggttgtttgttgttcttgttgtttgtttgtttttaagacgaattctcgctctgttgcccagcctggtgggcatggtagtgcacgcctgtagtaccttgcctgggcaacaagaatgaaattccatctcaaaataataataataataataataataataataataataataataataacaatttaatatcttcagccttcacctagtggacatggtcttagcccagtgcattgatgaggttaagagtcacgagatatttaacataaattacctagtttagttattacaaccctacaaggtgaatattatttctccactctatagatgatgggagctggtgattcagtggaggttactagcttttctaaggctatacaactggtaatggtggatctggaaattgagtgctggtctgtgaaaatccaaaggttatcttcttaatcccagtacagcttcacaggtatctcccaacaagatcagcatcccagctgggtgggggataaaatacagggtcgtgagtttcctctagcagaaggattgttgccaatgattaccccttagattgcatcactttcagtgttgccaagtgctgaggcaggaattatgtatgacaaagctttatcgtcagtgtcggacacaaaagagccaaggaggggaagggacaattactctctgcttttctcaatgaggctctcagggaatatgaccctagtggccatggaggctcctgtgaagagcttgccctgtgattcttccaaacatccttcctgcatcaagggctgagtctgtgcagcccagctcctgattcatgagatactcagcctcaaagctccagtgacgagtcaccctccctcagaccaataacctctggccaggtctgaaaaagggaagccaacccaggacttcaggagacagtgaggactgctgctctttctgggtaagagtcagatcattggccaggtgtggtggctcacgcctgtaatcccagcaccttgggaggccaaggcgggcggatcacgaggtcaagagatagagaccatcatggccaacatggtgaaaccccgtctctactaaaaatacaaaaattagctgggcgtggtggcacgtgcctataatcccagctacttgggaggctgaagcaggagaatcacttgaactagggagctgaaggttgcagcgagccaagatctcgccactgcactctagcctggcgacagagcgagactccgtttaaaaaaagaaataaaaagagtcacatcagtgggacttcactgataactgcttgtcaggacttaaagcctcagagggaccctccttcctttcaattatgtggagccagaaaaacagtcctgagctcagcagcagtcccttgcaatcacccagtcaggaccagcctctgtcccgtctgtctgacatcctgaactgtggggaacacaaactgactgagtttctgcccagacctctgggttgttccattttaattttacaaattggactcagggtgctccgtggatatagccaagaaggcctggctcagacttctgtaaacctgagccctgaacatagcagtagcagccccagcagggttgacaatattatcatttacatcctgcaagcaaaattctactgccattcctgtgccccatcttaaccagcattttccaagcttttgcatttcgtcttctttgtctgcctctgtgtccaggatcccaggcccatgagcgggacaaaccagtcgagtgtctccgagttcctcctcctgggactctccaggcagccccagcagcagcatctcctctttgtgttcttcctcagcatgtacctggccactgtcctggggaacctgctcatcatcctgtccgtaagcatagactcctgcctgcacacccccatgtacttcttcctcagcaacctgtcttttgtggacatctgcttctccttcaccaccgtccccaagatgctggccaatcacatactcgagactcagaccatctccttctgtggctgtctcacacagatgtatttcgttttcatgttcgtggacatggacaatttcctcctagctgtgatggcctatgaccactttgtcgccgtgtgccaccccttacattacacagcaaagatgacccatcagctctgtgccctgctggttgctggattatgggtggttgccaacctgaatgtccttctgcacaccctgctgatggctccactctcattctgtgcagacaatgccatcactcacttcttctgcgatgtgactcccctactgaaactctcctgctcagacacacacctcaatgaggtcataatccttagtgagggtgccctggtcatgatcaccccatttctttgcatcctggcttcttatatgcacatcacctgcactgtcctgaaggtcccatccacaaagggaaggtggaaagccttctccacctgtggttctcacctggctgtggttctcctcttctacagcaccatcattgctgtgtattttaaccctctgtcctcccactcagctgagaaagacactatggctactgtgttgtatacagtagtgactcccatgctaaaccctttcatctacagcctgaggaacaggtacttgaaaggggctctgaaaaaagtagttggcagggtggtgttttctgtctgatgaaataatcaagactgaatctcattcccaaggaaatttatttttcaccaattgagtttaa

SEQ ID NO: 6858 - DNA, 6000 bp, Homo sapiens
tgaggcgggaggattgcttcagcctgggaggttgaggctgcagtgagctatcattgcacactccagcctgggtgacacagtgagaccctgactcaaaaaaaaaaaaaaaaaaaagaacttaagatatattcagtgccttcaggcaggcaaatctctaagcataccttatttttctcttgccaaagaatttaatcaatattttatcacaccaacacctcaaaatgccctatcgtaatttctcctgctctgaatttaagtcttttttctttttttctttttctttttctttttttttttttttttttgagacagagttttgctctgttgcccaggctggagtgcagtggcatgatttcggcttaccacggcctctgcctcccaggttcaagcaattctcctgcctcagcctccctattttttttgctttccatagagaaggagaaggagagcacctgcttatgaagcacacatttttaaaatctcctcataatagtgaagacattaattggaagaaaatttgttatggagaatggtctgagaaaaaaataattggaagtaaaaaacccacttctccctttaactatttcctcctaagcaagtctcccgtcttggccatacttcataggacctatgtcctccttctccctgttctctaaaaatctgtgtactccattatcctttttaaaatgctaggcaaatcaggtaagaccctcggataaggaattgctaatacagtacacagcagaaagcttactccccagcccttacatggaacctccttttgttcatttttctctctgggacacccattgcaagttgccttcagcttgcagagatgtaaccttgagagctactcctgggatacttgtgcttctctagccttttccagtctaaatttgtgctgttgaatttttgtacttatttgatgtattgccaagcatttagtcttttttttttttttttttcgtattttgtaagatcctgggcttattagaactgccaccttggctcagcccatggtccattcagccagaattgtttctttgacagcagaattagaaaatacattttaaaggagcttgattgttttccctgatgcaagcatcagaagttaaagtcccttccgagtggcctagatttccttaatcatgcattgtatctgtgtttgttaaatttaaattttaatttttttttgagacagagtctccctctgtcgcccaggctggagtgcagtggtgcaatcttggctcactgcaagctccgcctcccaggttcaagccattctcctgcctcagcctcccgagtagctgggactacaggcgcccaccaccacgcccgcctaatttttgtatttttagtagagacggggtttcactttgttcgccaggatggtcttggtttcctgacctcgtgatccacccgcctcggcctcccaaagtgttgggattacaggcgcgagccaccatgcctggccaaattttaatgtttttaaacttatgatgttttaatgtttttaaattttaatgtttttaaacttatgagtttgaatgtttttaaacttactgatgtctcttagaagtaataatttacataaatttactattaactatgtatttttttctttcattcatccttaattgactttttctaagattcaaactcccccatttctagttcttgaattctaagatttggggaggggaaaaatccctgttcactttgtctaataccagccccccacagaccaaacaactttggaagaagatgagcagtgtctttctgtctgtttctttctttcttttttttttttttttttctgaggtagagtttcactcttgttgcccaggctggagtgcaatggcattatctcagctcactgcaaactccgcctcctgggttcaagtgattctcctgcctcagcctcctgagtagctgggattacagacatgtagcaccacgcccggataatttttttttatttttagtagagacatgtttcaccatgttggccaggatggtctcgaactcccgacctcaagtgatctgcctgcctcggcctcccaaagtgttgagattacaggcgtcagccactgcgcccggccctgtctatttctttgccctaaagggacacaagggaacaagcacctgaactggcaggaggtagtagaatgggtttcaggaagaacttctgaaaagaaagatgagctgattatccggttagtaactcagttcctcagctctcttaagtcctagatgaaaagaataagtaggccggtcgcggtggctcacgcctgtaatcccagcactttgggaggctgaggcgggcagatcacgaggtcaagagatcgaaaccatcctggccaacatggtcaaaaccccatctctactaaaaacacaaaaatgagctggggatggtggtgtgcacctgtagtcccagctacttgagaggctgaggcaggagaattgcttgaactcaggaggtggaggttgcagtgagccgagatcccgccactgcactccagcctggtgacagagcgagactccgtctcaaaaaaaaaaaaaaaaaaaagaataagtaggccgggaatggtagctcatgcttgtaatcccaacactttgggaggccaaggtaggcagataacctgaggccaggagttcaagaccagcctggccaacatggtgaaaccccgcctctactaaaaatacaaaaattagtcaggcgtggtggtgcactcctgtaatcccagctacttggttggctgaggcaggagaatcgcttgaacctgggaggcagaggttgcagtgagctgagatcacgccactgcactccagcctgggtgacactgctagactccatctcaaaaaaagagaaagaaggaaggaaggaaggaaggaaggggaagggctgtggtttatgatcttcagaaaagttgagatcctggccaaggaaaggggatggtgattggcccattattaacaagagctgatttttttgttcatgagatgggttttttgtttgtttgtttgtttttcttttcttttcttttttttttttttttttgagacagagtctagctctgttgcccaggctgaagtgtagtagtgcaatctcaactcactgcaacttccgcctccctgtttcaagtgtttctgctgcctcagcctcctgagtagctggggctgcaggcgcccgccaccatgcccgacaaattttttgtattattagtagagacggggtttcaccatgttggccaggctgatctcaaactcttggcctcaagtgatctgcccactttgacctcccaaagtgttgggattacaggcgtgagccactgtacccggtctcatgagatgttaagaattatttgatgatttagacgtggacacagtagttatatacctcaaaagagggatctcctctgtaaatcttctaatttcccttactaattatgaatacccattaactattttaacccctttttgtgtaacctctgtttatatcttttgccttttccacctaaacttatttaagcttaagtgaagttttgtttgctctacattgacctcctcttaaattgtacattcccagcttctgtatttggagcataagtctgtatctactctttccattatttctgtgactttatagattcatcatgttattcctcaaacatcatctttctagatccagcactgaggtaaaactcagaggggagggatgtagaagagagcagaggaaatttaacagaaaattctggggagcttttccaaatacaatgtgtctgcttccccccttccctgagcgtatcagaatcttggctggggaaatgtgttgttgctgttgttttcaagagatagggtctccctctgtcactcaggcattggagtacaggggctcactgctgccttgaacactggggctcaagagatcctcccacctcagcctcttaaaatgctgggattacaggtgtgagccaccatgcctgactgaaatttcagtctgactgaaagtttttgagaactttcacatctaattctaatggtcaactctctctatcccgtcatagccattgttctgaactgaagggctcttcagttcttggggtcttttggttttgtcatcatgaggcacttccttcatttccgtgttagctcatacctgacattctgatggaatcaacttttccattcggtgtgtaaccaacagtagatggggattacaacagaagtttgaaatctaggccacgcacggtggctcacacctgtaatcccagctttttgagaggctgaggctggcatatcacgaggtcaggagttcgagaccagcctggccaacatggtgaaaccccgtctctactaaaacaaaaattagccaggcatggtggtgcatgcctgtagtcccagctactcgtgaggctgaggcaggagaattgcttgcacctgggaggcggaagttgcaatgagccgagattgcaccactgcactccagcctgggtgacagagcgagactctgtctcaaaaaaaaaaaaaaagcttgcaatcttaaaaagtaagttggagtccaggtgcagtggttcatgcctgtaatcccagcactttgggaggctgaggcagatggatcacttgagcccaagagttggagacaaccctgggcaacatggcaaaaccccatctctacaaaaaatacaaaagttatttggatgtggtggcacacacctgtggtcacagttacttgggaggctgagacaagaggattgcttgagccagggagaaggaggttgcagtgagctgagattgtgccactgcactccaacctgggtgacagtgagagactctgtctcaaaaaacaaacaaaaaataggttgttacttaactatggatcccagagaactattagaccgttcctgatgcaaatccacctcatccaacagctttttcttgacttttcttccagcagcttgcgctaaatgaattcatcaagtgactgaagacaaccagtgatggacggggtgaatgatagctccttgcagggctttgttctgatgggcatatcagaccatccccagctggagatgatcttttttatagccatcctcttctcctatttgctgaccctacttgggaactcaaccatcatcttgctttcccgcctggaggcccggctccatacacccatgtacttcttcctcagcaacctctcctccttggaccttgctttcgctactagttcagtcccccaaatgctgatcaatttatggggaccaggcaagaccatcagctatggtggctgcataacccagctctatgtcttcctttggctgggggccaccgagtgcatcctgctggtggtgatggcatttgaccgctacgtggcagtgtgccggcccctccgctacaccgccatcatgaacccccagctctgctggctgctggctgtgattgcctgcctgggtggcttgggcaactctgtgatccagtcaacattcactctgcagctcccattgtgtgggcaccggagggtggagggattcctctgcgaggtgcctgccatgatcaaactggcctgtggcgacacaagtctcaaccaggctgtgctcaatggtgtctgcaccttcttcactgcagtcccactaagcatcatcgtgatctcctactgcctcattgctcaggcagtgctgaaaatccgctctgcagaggggaggcgaaaggcgttcaatacgtgcctctcccatctgctggtggtgttcctcttctatggctcagccagctatgggtatctgcttccggccaagaacagcaaacaggaccagggcaagttcatttccctgttctactcgttggtcacacccatggtgaatcccctcatctacacgctgcggaacatggaagtgaagggcgcactgaggaggttgctggggaaaggaagagaagttggctgagagaacactccttcgttatttattgcgtcttcatctctacatgcgtttctcattaactctc

SEQ ID NO: 6859 - DNA, 6000 bp, Homo sapiens
tcttagccaaaaccagacattcttctaaatcatattcaccactaagttggattgtgagttatcaattttataacagaaacacttagtgcagaaacccaaaatttctagtgacctaccattctccctaaaatgcctaattcactgcgtgcatgggctcacacctgtaatcccagcactttgggaagccgaggctggcagatcacttgaggtcaggagttggagaccagcctggccaacatggtgaaaccctgtctctactaaaaatacaaaaaaaagtagctgggcatgggcgctcacctgtaattccagctactcgcgaggctgaggcatgagaatctcttgaacctgggaggcggaggttcctgtgagccaagattgcgccactgcactccagcctgggcaacagagtgagattccgtctcaaaaataataataataataataataataataataataataataataaaatgactaattcactggatatttagtttcatttaggttatgaaccacatattttagcctattttcttcccgtgagagtagtattcataagcaattttcatagtttttttccctttcacagaaatacaaaaaaactactaaacataaaaaaatgttgaatttagaaacatttgaggtatctgggctttaagaaagtaagctcttaacagaattaactggcacatacagattctgcacaagaccaaactctgtacacagaaaaatcacctggggagtggctatcaatgcaaatggctgaagaatctgagttggtaaaagtaagatggataactgaatttttaacaagcaccccagctaattctaatgtaaattgttttgagaaaacattccagaattttcaagatttcaagattccaagctcatgacatcccaacctgtcttcatgtctaaatcaatatattaaacacagtagactgccaatgcatacatatttaaataattaaagtaattttatatttaattaaagtataaaagggaacaaacaggggaagtcagtttacctaatcagagcccacattctgtaagtcagagctggggaatcttattgatataatgaattgccctccagatccaggagccacatgcagtaaagggctttgccgttgtttcttttagagagtatataaaatactctgattacctacttataaaattaaaaatatactgaatgatgtatgtgtgtagcaaagggaatggctgaggttggagggagagttattctctggacatcaacaataatctgagaaataaaattctgaggatcatataaaataaaaccaaatagaatctgtccttggtctaagcatctcccactgctgatgttaggatagtaatttcctcattcccacaggaattaattgtgaacaattaaacacgtggtattatctaattactaataattcacagagaactgagagattcttatcctcacgtcctttgggggaacctgaatatgagtgggttctggggttgtatgctttctgtaagtctgggaagcacactttatatgtgcatatagcatgcagtttctcagatagtccacaaacatgtgaaaggagcactggcttactacttacaggtagtagtaaggagaataactgttcgtgaccctaaacagtggctcagcttcttcagctataaaatgggtactcaggttgatctgtattcatggtccaggttctttgcactcagccatgatgcttcccacgccatgtgcttaactgaggtttatgtgggaggatcacatgagacaatttttgtaaaagtgctctgtaagctgtaaagcactatacagatgaagcggattattattagtcttttacgaagcccagcgataaagatgcaaagtgacccagaaaaagaaaactgagtagacaaacctgaaatacaacatctatagcccctagaacagttaccctgtacatggtaggtaggtgcttaataagtagagtgagtaaagaaaaacgcaaaacaggtttgtgcctccatcatactaggtctgataccaagaagaaataaatatacctaaggtcaatgatagtttcattcaaccatacaaacccaaataatccaagagcctaagattttaaattaaaaattacttcaaagaaagagcatggaaacgtgaaatgtgacccggaatccgcaattaaatcggtatattcttacctcttcagtctttccaacgcagtcttgcagggatacaggacctgggtgagggtgtggagtgcttccctgcacctggtagatctacataactgttcctagcaacctcttgaggaaataatacattctatagaatgttgggtacctaagctctctgttttggatttgaaaggctgcgttttagtgatttttaagccaaacaagatttatcccataacagccccccaaaaacacgcacagaaaagaagaatgagaggggcgggtaggtagagaagcagttattcactttataaaacaattctctataggattcttttgtcagtttcctagactatgtaaaatgtgattcaaattaaaatatttaaatcacatacccacatcttgacatgggcagctatttgtaaaatgaggcaaacccacactgggaaataccaaattaaaaaaaaatcagggaaaaaatattttcttctgggtggccctaaactgctttctttttccccattgcaaatgtatttttatgctgggttacatttccaaaacaggagtgttttttttctatcgttgaaatgaaacaaacaagtttgctttcagagctacagaaatgcccaactgttaggaaaaaaaaaacaaaaaaccgttttccactggccgcttgcctctcttatccccatgcaaccttgcctattggcccctttccctaggagagcccctggggctgtctgatggaactgattgtaaaactattttgtgcagtaaaaaagtcgtttcttcaaaatctgagaccacccagaacatgcccaatctttggcaaatatcgactggtttcctcagtatttgactagctgtacaccgagtaactgtcccgggtttctgggtctttatctgagaagaaatgagggggaaatgtttcagaagatgaaaaaaggaagaaaacctctcatccaaaatctgttcaaaattcattttgtgcgtttcgaagggggaggacaggagaatttagtgcaaagacggcctccaccaaacgaaaccgtccaacatttgcaaaagcttttaaaataaactgctcagggatcaggggtttgctggaaactcccggtcgcttgaagccctgtccctccactccgggcaccctggcctccccagggtgggcacccctcctgcacggagagcggcggctgggatctcggagcagggtcggctatggccctggaggcagcggctcacagagaaaaagctctggcttttctccgcccgctgcgttcctcttcttacagcctcgggtgtcacatattaggtgctcaataaatgtggacataggaaacgaaaagtccgaatctgtccttacgcccccaaggcgaattctggggcgcgcgggtttattccgacccactaccacatcgcgtttcctgaggtaacccggcctcggctctgcggccccagcggctggagagccacggagaaggcgggctacgggcgacaagatggagagccggcccgagagggacagaggccgcgctggcagcgagctggggggcccacctgaccgtcctgcgggcagcccggccccgcgctcccattgacaaggaggtccgcgccgccggcgcgtggggcgggggcggaggcggggtggggcgccccggcgcgcgcccggccccactccccgcccccgccagtcccgcaagcacccaccccgggggagccgcgggccgggagggcgctggggggaggggcaggccgctccgcgagcgcgtgtgcgcgccgccgccggctgacgcgaactccggcgcgcgcctcccccgccccgcgccctccccgtcccgggggcccggcgcgcggccctgctgacgtcagctggcggcccgcggagccgggtgcgcagagccgctggcgcactcgcgcgctgcgctggcctcctccccgccccgggcccaggcgcgcgcgcgcttgttcgctctcccattttttttttcccctccctccctgcctctctctctctccctctccctcgagctcccggctggctgcggctccctggcgctctccctctctctccggtaggctcaccgagcgatgcgagctctgggagacagcgacgccgcctcccgctagagacctgcccctcggcccggccccctgcccaaccctgcccagcgcgcgggggtcggcgaaggcgccgcggacgcaccgacggctgaagagcggcgatgcacatgcactagcagcaccccctaactcactccctccacatcccgcgccgccgccgccgcctcctccacctcctcctccgccgccgccgcctcctcctcctccggcagccgcggcagcaggacccaccctgccccccaccccaccctctgtcggctccggctgcggctccagcctcgactattattttatttattttgggtcgtgcacaagcctcagtgcctgcagtccgcgcctcctcggcccgcgggcgcctcctcccttggctccggagccccagaccccggccaccctcgattcgacaaccccagacccctgccagctgccgcgagtctccgctgctggaatcttgttagcggctgtctttttggagggttctggtttcccgacatttttgtttccagcccaggagaggatatcgtgattttccccccttgagcccaggctctgctctctgggggggtggggggcgctccaagccggggagccgtgccagccgagtcgtgcgggctgtggcagggaaggggccaccatgggatgtactctgagcgcagaggagagagccgccctcgagcggagcaaggcgattgagaaaaacctcaaagaggatggcatcagcgccgccaaagacgtgaaattactcctgctcggtaaggaccgccgctgctacccccatcccccgaccccggccactccgcaccccctgccaccagctcccccaccccactcgcgcccgggagacctggtccccaagttggcaccaccatgtgcccaggatcgcccaccccctcgcatgccttagtccccccctccccctgttcccttaagctgacactcaccagtttttccccactgtctgtgtcccaacaggggctggagaatcaggaaaaagcaccattgtgaagcagatgaagtaagtccctgtggcattgggattcgtacttttattaagaataatttttaaatcgtttttattacattgcttactccacattgctctccaggcctgttttttaattcgtgcacacacacacacacacacacacacccctatatttgactcccctcccccactccctacgttggttctgggtcctccaccctaactcctgggtgggtgttttttgggagggggaaggggagcgcctgtagttgtatgaatgacagtgtccgccatattgatcagaacatcacactattggcatgattatgatcattactcttgcttgtggaatattttctgtgtctcactgcctccatttctgtctgtgtctctgtttcattctgtctctatttctttctcctcttccctccatacctccctatcccccaaggtccgtaatcccacttccccctgctcttttcctggggcagtgattttgaacttggctaacatggaggggacccagccctagactggggtggaggatcaagtgtctgctgttcatgcgtttggtgctgaattggaggctgtggtttctacatcccctcgcaccccctcccccgcaaaaaaagagggccagggttaggggaggggtcgtgtgctaggggaaggagtgggtttccaaacgtaggtgacgggcacagttttatccaaggtag

SEQ ID NO: 6860 - DNA, 6000 bp, Homo sapiens
agacgttccctttctctgtgggcagcggctgttccatttctcctgctttgcttccaccaacttcatgaaatcccatacgttgcaagactggcagtttcacttgtcgattcatttgctttgtatttgttatgcgtggctgaatgttgaaagcgtctgttcaccagccagagatagataggagatgtatgtggggtttgagtactcagaggacaagggcatccacattttacagctgaggaaatgaaggctcagagaggctcttggctcagacttgcacaaggtcctacagccagtaacagccttggatcaagagcccagaggtcttgcccagagtttttggaggtggaaatggggctggggaaggtggtggagactgagttgatggtgcacctgaactccagctataacctcatcactatcaggccttctctccttaggaagaagcagtaaatattgtcctgaggatgtcttttgcaggggctagggtggggtgacgtgacccacccgatcgtagaaccaaagtaggtgctggccacaggttttggcagctcgcatgatgttatcttagttacctaggggctgggtgttattaccaccctctcataatgagaaaagtgaagatcagaaatgactggactgggcacggcggctcacacttgtaatcccagtgctttgggaagccaaagcgggaggatcgcctgaggccgggagttcaagaccagcgtgggaacatagggacactctgtctctacaaaaagataaaaagtttagacaggtgtgatggtacgctcctgtagccccagctaacttgggaggcagaggccagaggatcgtctcgagtaactggcccggggtcaccctatgagatgtcagatcccagatctgactgtttcaattttaccatagttctctttctagaacaacacccccaggcgcctctctgaatgcaaggctaatctggcgtcaacctccccagtggtctcggcagggtttctctctggcagcctgtcccactcagttcaggacagtcaggtttttgaggcgtgtgtcaatatttcccacacttcagcagttctgttttcctgtattactgccaccactttttgccactaacacatgcccttatttacctagcatttttctttaaatcatttcactttgtaggacctacttgtatcttaaagcctatttcatatagctaggtaaatagaaaatttgtataacttgccacaaatagaaaaagatcataaaaataaatagtatgcaaataaaacaacgttagtaaagtctagctagaaacgttctctttgttaagaaggggcatcatttctacacccatgttgattgtagcattattcacaatagctgaaaggtggaagtaactgaagtgtccatcaacagatgaatgaacaaaatgtaatatgtattatacacatagtggaatgtgattcaacctttaaaaggaatgagagtctgacacactacaacacggaggaaccttgaagacgtcatgctaagtgaaatgagccagtcacgcaaggacaaagactgtatgattctactaagatgaggcacttagagtggtcaaattcaagagacagaaaatagaacggtgattgctaagggcttgggggagtagagaacaggaagttctgtttcatgggtatggagtttcagtttgagaatatgaaaaatgttttggacatgggatgtggtgatgtttgcatgacagtgtaaaggtagataatgccattgcactgtaccccttttttttttttttttgagacagggtctcactctgtcacccaggctggagtgcaatggttcgaacacaactctctgcagcctcgacctcctgggctcaagcggtcctcccacctcagcctcctgagtaggtggatctacaggggcacgttaccatgaccaactaaattttttttttttttatagaggcagggtctgctatgtttcccaggctggtctcgaactcctgggctcaagtagtcctaccactagggctttgtccaaagtgttgggattataggtgcgagccaacccacctggtctgaatctacacttaaaaatgcttaaaatggtagcttttgttacatatatgtatgtgtgtgtgcgtgtatatatatatatatcttaccacaataaaacatttaaaagtcagacgtcctgttttgaagtctaataaaagattgaaaaatggggaaaaataagggacatagtctgtgttagagaggggttaaaacaatttagccctcggcggggcacagtggctcacacctgtaatcccagcactttgggaggcaaaggtgagcggatcacttgacttgtcaagagatcgagaccatcctggccaacatggtgaaacctcatctctactaaaaatacaaaaattcgctgggcgtggtggtgtgcacctgtagtcccagctacttgggaggctgaggcaggagaatagcttgaacctgggaggcagaggttgcagtgagccgagattgcgccactgcactccagcctggcgacagagtgaggctctgtctcagacaaacaaacaaacaaacaaaaaacaaaagaaacagtttagctctaagctgaggcttttgctggacacaaccaagattgaaaaagatgtgtaaatgactttttttgcattgtgactgtttatctaaagtcctgtcggggtcccacctacaatcttcttgcaggctactcaccagggtaagtagcccccatatagggagacactttactgagatggtatgtggcctcctccctgcctgggggcctgagaggagactggcaggcttcctactgctcaagcatccagagtgttttgtagaggagcaggaggcagagaagccttcctggaggagcaggaggcagagaagccttcctggaggaggcaggatccagtggagccctgatgggtggagaggagctggagggcttcccaggtacatgtgtgggaccacagctgggaccgagcagggaggtgggtattaatatggcaagcacaatcagactgggtggcaatggaagttggacggggttagactgtgaaggcaatagggagccaccactggttttttgtttgttcgttttgtttttgaggtggagtctcactctgttgcccaagctggaatgcagtggtgcgatctcggctcactgcaacctccacctcccgggtttaagcgattcttgtgcctcagtctcccgagtacctagaattacaagcatgtgccaccacacccggctaatttttgtatttttagtagagacggggttttgccatgttgcccaggctggtctcaaactcctagccttaagtaatctgcctgcctccacctcccaaagtgctgggataacaggcctgagtcaccgcacccagcctcaccactggcttttgagcaggagagtatcttggtagtgagcttcaggatcaggagtgcagggctaagtaacgggcactaacttagcccccaactgaagcaaggcacagtgaggctggtacagacccaggctagaggggctatggggtaggcagggcctcctcctgagccctaagaatagccagttgggctcacattcagcatgaggaaggaggaggttggcatggcaatcctagaggtagctgggtgacctcggaaaggaagagcctggaggtcaaggtctggatcctgatcaaagaaaaccgaagcgcaaagaagggccaaggcttgcccaagtcacccagagggagtgtagcccaggagtcaggacacaggtgcaccggtgtccctgcaaaaccttcaccgtgcagctggggtggggacctggctgccctccaaggagcagctccctcctgcttcagcagaggccacttgtactacctgcaagctgtatttgggctgatgcgggaagggccccagtgaggcagagagcggggagaccatgttaggacctgtctggtttctcccttttgctgcctctccatctttcccccagggctggaagagcacattcctgagtcagttttcccaggagtctggatggggcccaggcaagagagagcaccgtctccccattaccaacactctctctctatcccccacacacacctccttgctttcccttagagctcttcagagggtatggctgatgcaggacaggcctatccagctgcctggctcaaggagaagctggccagctttccagcctcatgttttctgggctctgtggccagggaggcccctctccaccatgctctgccacttggcaactctgggccaggcccaggtcctctctgggcttcaggtccctcatctgtgaaatatgacggcttcatagagcacttccagtgactttgccagccttaccttttgtaagccccacactgccctgcaagatggtactgtcattatctccattttacagaggggaaacaggttcagagagcatgagtggcttgccccaagtcacccacccagtaagtggtgggcttggtacttgaacccaggcagtctgaccaagctgctgcctgaggtctttgccatcatcaatatgccatcaattgtcaggtcaggcagggatcattttcccttttctatagatgggaaaactgaggcccagaggggcaacatgtcttgcccaaaggtgcagagctcaggtgggtcttgcgcactgcataaggccacgttgccatgtccttgagcacctccacagaggagcagccaccccaggaagtagctgcagactctacggggtgataccctcaaagggtgaccagggcatgaccgacagctcgaaggaagcaaagaggctgctgctggtgaaagaagaagtgaagtgagagtgtggtgcctgggcctggggtgaagggagcagagagaagtgcagtgggggtgcaggtgtggggcaaagggagaggccacccacagacgcctcccgacttccccttcttcctgcagaagctacaagacagcagccgagacagcagctgagacggcagcggcagcttctcaggtcagcctcctccgggcctctccccactctcctctgcccagttctctgtccttatccacaggcccctcagtgggcactggccatacccatgtccaggtgggcacagacctggtgatatcctggtgagcaagctggggacccaccctccttccctttctggttggcagctccacatctggggcaatgtagagatctgtgcttttggaaggaggggcaatttaaattaagaagtggttaggcatgggtctcgaatcttagcttccccgcgaggtctgggacaagtgaagagaggtttcttttctggacctcagtttctcatctgtaaaatggggtgagtctgggaacctgcaccttggatggctgtcaggggctcagtagaggacctggcacacagtttgtgcttggcaatctggagcaggtgcagctcctttcagagtgacctggattggatcctggggacagcatgtctcaggtaaatggacctgctgctggcttggtcacagacttcctgttgggctccagggtggcctctctttcccaacctgggaaatagggttactatagcatttcttagggcttttttttttttttttttttttgagacggagtcttgctttgttgcccaggctggagtgcagtggtgcgatctcggctcactgcaacctccacctcccaggttcaagcgattctcctgccttagcctcctgagtagctgggattacaggcaccagccagcatgcctggctaattttcgtaattttagtagaggcgggatttcgccactttggtcaggctggtctcggactcctgatctcaggtgatccacctgccttggcctcccaaagtgctgggattacaggcgtgagccaccgttcctggcctgttagtgcttttttgcagagaccacaggttgattgattcctcacccaggccaggggcaggggctccagactgtggttggcaggggcaggtggggctgtgtgcgga

SEQ ID NO: 6861 - DNA, 6000 bp, Homo sapiens
caatccctgctgggcctgggccctgaggcgggtgtgatgggagatggcgttatcatgggactatgggtacccccacgcctgtgtccaggaggctttcccacaggagatagcagggaggtggctgggaacattggccgcaaaacacatggtctgagatcaggtcctgactctgttgccaacttgctgcaaagctttgggaagttcctctctctgagcctcagttttcatctctgttaaatgggaacaatcatcactgttttgtagaggaggtagtagatgtgaaagggttctgcaaactgcaaatggtggagttctgggcctttggcattcatgtggactttatcataataataatgatgttggccaagatttattgagcacctactgtgtgccttgcattgtgctcaatgatttatatggtcactcagcttgcaaggggagaagcctggatatgaactgctcttgtctaaaaaatacccacctctgaggctgggcgcagtggctcacacctgtaatcccagcgctttgggaggtcaaggtgggaggatcgcttgagctcaggagttcaagactagcgtgggcaacgtatcaagaccctgtctctccaaaaaaatacaaaagttagcctggtgtggtggggcatgcctatagtcctagctacttgagaagttgaggtgggaggatcgtttgagcccaggagattgaggctgtagagagctatgattgcatcactacattccagcaagggcaacagagcgaggccctgtctcgaaaacaaagaaaaaacccacttctgagcaggcagtggttgctcatggccatttgcacaggtggggacagctcttcactgtttgctaggctggttcccactaaatgctgctgctctggccagagggttagagatagaaaaaggggctgaagacctcctcctagccctcccagccccaccatgtcttcctactcccccaggcctcagtcacagcagacaataaggatgccctaaccccttatccctgtcctgaggctctcatgttcttgaagatctcctcctacctccccggcagcctcctctctacctcctttgcaggcccctctgaataacagtgccctggccaatgcattggggtgcccattgtctgccaggcctgggctgcaagatttacgcatgtggcctcatttaatcggcccaatagaaggtgctattttggtccccacttggcaggcgaggagataaatggatggagagatgcttgcccaagtcatccagctggccggctgggagtagaggccagctggcctgaacccagagtctgtgatcacagactccgggctcagagagggtgcagcagcattgccccctctcctctgtccctcaaaacgaagggtttcctgcaccttcagctttctgctttccccacaccatctctggactccgtcgccagccaatgatgccatgaccttctctgggcctggcgaccccagtccctcactgctgagccccaacgacgtgtttccagctgccttgggaagcaggggggacctgtggcttccccacatgacacagagctgcccccattccattgcacacagggcagtctcttctctgccttccggatctgcaccccatcctgtgccccgattcttcagggacgtttcagacatcttccccctctcctcggtccccaccttcacttgtcgggttgtggggggtggggtgtcccagcccttttcctggtctcttggaccaaagtctcctcccccgctcttcccccatctgcctccttcgaggccccatccggacccaacttcccctctactcctctgcccatccctccgcatcattgctggtacaagtccctggcgtctagaccagggcttctcacacctccaattctggaatcccctgggcatcttattaaaatacacattcagattcagcaggtctcaggctatctgtaggtctgaagaccacattttgagggctaatcaggcctctccctacccaaacatcttctctggctccccagtacctttgatttaagcccaaactctacactttcaaaatcttccagaatctgccccttgctgcccagttagatcccacttccttccaagcatggctccatgccctacctctccacctcagccaatgctgttccctctgcctggggtgcccttcctgctggtctctgtttatcgaagcccccttcttctccttcaggtcccagcaggggctctggggtctacacgcttagttcagatcctggctgttatagaaaggcgtgggtagccctccctgtacctcggttccccttctgtaaagtggggatagactgttgtgagaacagaaggagaagatgaagtgcctagcaggggccggatatctggtgtcccgtgtttggttacagcccacacacctggaggcccagccaggtccaagctgtgcgaccttggctaagttacttcatgtctctgaccatctctaacatacaagtggtacccaacccacagggttgtgtggataaaatgagaatgatctgtacaagcagagcatcttacaccataaaacctccagacatagcaggtgattattagtcctgttatcagcactcataacagatagtgttgtgtttaacaagtcattgaatttctccccctttactcccagagacccctggatgctgaataccaactccaggtatcgctactatgagaaccaggcttgtctctctagccagactcagagctgggggcctgcttcctcacctgcctgcccctagctcatagtaggtctctgcaaagtccgacggtgagagaggcaggcagagctgggcagccaactccgcccagccaggcagccccataagcctctcctatgtggccagagtggcagctggctccgcactctcttcagccatctgcagagagagtggtgccttcaactctccatctgtgcccttctggtcagcacgctctgtggggtgtgtgtgtggtggtggtggtggggggacagctgccctgtgggcctggtccctggggaacagctgaggctgcccgggttaccagttgatcaggccctgaaggactgaccttggggaaactgaggcagaggtggtggtatgtcagggacaacccatcctcccctagataactcacttgtcctcccttgttagtgggcccccagtgtaggctggcctctgctgctttggcaataagggagttcccactgcagccccgggagagagcagagggtatgacatgggcccagtccccactgtgcctccctgccccaggtattggcccacagcctggactggggactgtgaatgtgggaagcacagtgccgttttctggaagctctcaccttatggcctccctgcaccccacggggtggctttgtggcccttcctttctgcagcttgatttcaagcaggtaggtgaggagtgcagttcacctgcagcagccctggctcctaggctgcccgagacgttccattcattcttcctccacgtggcatggggaagcttttcctggcccccttgtttagaaggcagatctctaccggagagaaggaatctcaagttccccaagcatccacgtgtccaggccccaggctgaggcctggggtgctggattgctgagtggttaggagacccgctatggagccagacggcctgtgctcccgccatcccaactcgggcacctccctgctgtgtgatcttgggcaggttaattctcatctctgagctacatgtatctgccttaagctccctcttcttcatcaccacattcacagggagtatttattgagggcttggcaagtaccaggcactggtctgagtagcaggtttgacttctctccactgccaggggcgctctggagctggaatgcagacggtggtcagcgagtgtaattactgttattgtcaccactcacccttctggcattgtaaaagcctcccagcacatctgactgaggaatcatctatcctcattgctcggaggaggagggcagacaggagcctctgcagggagtgtgagttatccaaagcctcctgactcgagaagggcactgaaccccagcagcgggaggtgctgctgacagaggaatgaccagaagggggatggggcatggtccatttccacacttctctgtctgagcttttggggccactgggaatggctcttcacccaggcctcggtttcccctttggctcagcagatggattaaaggaggccgtttccagaagcccctggggtctcagaatccaaaatgacttgggatgttgaaactgtgggtgcttgaggagcactgagaggggagacgggtcaccccccggggggacgcaggtcagccggtcagtcgtgcgtggcctggctggcctcctgcccggctgcctgtcacccgctccctcccgactgccttccgctctgccggtcagcactggctcccgtcggctgccaaggaggctggactctccttcaggaaagggcagttgtcgccctgacctggggggtgggcggacagcatccaagggccctgttgccgtggcaaccccggcctctctgtgggaactttggggagactggccctgggaggcgacagatggaggctgaggaagcagagtgatccccggccccttcctgtccctgaacactgtctgcctggatgaggggtgaggctgaggtgcccccttgcccggcgctgagtcatgggcatcccccaggatcactgcctcagcgctctcagccctgccccctcctggtctccctctgagaaatccatgactcacatatatcgtccgtcatccccagtcaagctcagggaggagggaggagcccagctggggcaggagaggggtgtctccccaccaaacaaacccggtccctccctctccgcactagctgtctgccctgccctgccgtaggagatgggctgggagcctcccacgctctccagctcactcggcaggcagcggggaccagggctggcaggttaagcctctgggggtggatcctgaaaggtggtccagccgcctggccctgcgtgggaccctccacctggcagcaggtacccaaacaagggctggacagcaggtgggaaggggaatagtgtgagtgtgagagtgtgagtgtgtgagcgtgagtgtgtgagagtgtgagtgtgtgagtgtgagtgtgtgagagtgagtgtgagtgtgagtgtgagcgtgagagtgtgagagtgtgtgagtgtgagtgtgtgagagtgagtgagaatgtgagtgtgagtgtgagagtgtgactgagcgtttgagtgtgagagtgtgagtgagtgtgtgtgagtatgagtgtgagtgtgagtgtgggagtgtatgtgagtgtaagtgtggatgtgtgcatccgtgcacgggtggctgttggacagtgggtagggatggtggtgaaatggggaaatgggggggtcttggtatcttggtgggatctagtccaggtcagcatggctgtgggtgggtctctagagtgggggcggacccacaaggagatgcctgggaggggactggggcccaaggggagcgacacctcccggggctcccaggcattttgttgctggagaaactgaggctcagagtggtacagtcactgggcccagcaagctggggtctgctctttaggctgtgagatcagtgctcctactacacagatgggagaaccgaggctctgggagggcaggtggcttgcccaaggtcacctagcacatccaggtatagaaagccaggggccaggctcagggagggggtggcacttgagggaactcctgaggacagctttcctgcagctgtccctggggctgggtccggggtccccactgagcaagggacagccgtgctcttcatcaccaaggccagctttgggagaaggtggccccgcagggtctctgaacgtgggccacgtgggtgagagtcctggaaccggtgacaggcagacggggaagcgcaggctgcgggctgaacaccctg

SEQ ID NO: 6862 - DNA, 6000 bp, Homo sapiens
tggcaaacactatggagaggtggggcagacccgagtcacaatggctggggagggaggaggagggatggggtggggctcccccacctgctgaccccgtgccctcactgcccgcaggcttcctcatcttcatctggtactggtccatgcggctgcaggcccggggtggcccctcccctctgaagagcaactcagacagcgccaggctccccatcagctcgggcagcacctcgtccagccgcatctaggcctccagcccacctgcccatgtgatgaagcagagattcggcctcgtcgcacactgcctgtggcccccgagcccggcccagccccaggccagtcagccgcagactttggaaagcccaacgaccatggagagatgggccgttgccatggtggacggactcccgggctgggcttttgaattggccttggggactactcggctctcactcagctcccacgggactcagaagtgcgccgccatgctgcctagggtactgtccccacatctgtcccaacccagctggaggcctggtctctccttacaacccctgggcccagccctcattgctgggggccaggccttggatcttgagggtctggcacatccttaatcctgtgcccctgcctgggacagaaatgtggctccagttgctctgtctctcgtggtcaccctgagggcactctgcatcctctgtcattttaacctcaggtggcacccagggcgaatggggcccagggcagaccttcagggccagagccctggcggaggagaggccctttgccaggagcacagcagcagctcgcctacctctgagcccaggccccctccctccctcagccccccagtcctccctccatcttccctggggttctcctcctctcccagggcctccttgctccttcgttcacagctgggggtccccgattccaatgctgttttttggggagtggtttccaggagctgcctggtgtctgctgtaaatgtttgtctactgcacaagcctcggcctgcccctgagccaggctcggtaccgatgcgtgggctgggctaggtccctctgtccatctgggcctttgtatgagctgcattgcccttgctcaccctgaccaagcacacgcctcagaggggccctcagcctctcctgaagccctcttgtggcaagaactgtggaccatgccagtcccgtctggtttccatcccaccactccaaggactgagactgacctcctctggtgacactggcctagggcctgacactctcctaagaggttctctccaagcccccaaatagctccaggcgccctcggccgcccatcatggttaattctgtccaacaaacacacacgggtagattgctggcctgttgtaggtggtagggacacagatgaccgacctggtcactcctcctgccaacattcagtctggtatgtgaggcgtgcgtgaagcaagaactcctggagctacagggacagggagccatcattcctgcctgggaatcctggaagacttcctgcaggagtcagcgttcaatcttgaccttgaagatgggaaggatgttctttttacgtaccaattcttttgtcttttgatattaaaaagaagtacatgttcattgtagagaatttggaaactgtagaagagaatcaagaagaaaaataaaaatcagctgttgtaatcacctagcaaactggcgtaagcattttgggtcatttccttctgagctttttcctgtgcttctattgaaagagtcactgatactaatacaaataccttggggccaatcaggaaacatgaaagagagaagagggctgtgtgtgaagaaaaaaaaaaaatcgactgctggaaacctcatcaaccagggcacaggggaagataaatggcaacttggtgtctgtgctggggaggcaatggggagtggtggggcctgtggcgaactggagactcccaaccccatgctgagagcgtggctgctcatcagctccagctggtcactaccttgcagggatgagggcccatgtagccagaccacctgccttttatgagaaatgggaaatccagactgtggtttgacatcccctgattttaaaattttggcgaatccaaaacattttctggccaaagagattacagtcaaaagctgcctggtcctgggatttatgcaaccagtttactgatcactctgcagcaggtgggctgcaagaattaaatcactggacttctctcccatccctgcctttaaccttgttccaccaaatcaatctctcctcccgctcctaaggcccaggtgaggcagatcacgcaggttcccatcttccctgtgatgagggcagtcacaacggatcattgctactgtgttcaggtaagaggtcccagtgcagccaaagtcctccccaaggcccacagtccactctctcccttctgcaggctcctccctcctcccctggccactctagggggatgcccagcaggggaagaggctcagagtcttggattggacaaggtgggtgtgaggcagctgggtctagactggcagtgccctctgaggggcgtgaatgtgggatcttgggacctgcagggaccaagaacccctgtgccctgctgctctcccagccctccctccaccccctccactccctccactgacctctgtccccacctttctgcaggtggggggctcctcttatgcccccagctccaaaggacagaggccaaaccttcccaagcctcccctaccccagtgtccggattgggcagccccgggggatcaaagccagcttccctccttacaggcttctaggtctccgtgaggggggtctctcagagccccatggctgggctaggtcctgggatgggggttgaggcaactccccccatcttccagaatgggggggaaatgacccagccccgttcctccgcaattctcctgcttctcaaacattttgtttctgcatctgaggctggctcaggtagtggggaggggtcttgggttgggtctcaccttctcaggtaggccctgcacagggcaccaacagttccatgctgatccttttaccccgatggttattatcatgcactttcccaggctgtggggctttggacagtgggatcgccctttctgccagcatgtggccaggcgtgcatctggaaacatccctttagcttgggaaatggattggagcagctgagggctgaatgctggctgggtctcgctggaggacttgaggccctgcccactggagccattgggagaagctggggcaggaggcggcaggaagggacactactgttttgttggccctggggttggggggggtctcagggttctgtgagtggctccaggctagtccctggtccccagggggcgtttcagggaaggggccttaggaaaaggtggccctccttccagccctgcctgaccttcccctgcacctgccctctgcccacttcccaggtgggctggctgctcggaatctcagtctgctcacccccaggcgcttcttcacacactggtacctgcgagcctctctgagggcccaggtgccaggatggggcttcagcgatgggcccagcacatccaagtccactgccccacctcaccctcacctgcagctgggagggaggtctgcagatcttccaggagaaggctggccaggtgtggagcagtggcaggcccagccattcatctgccttcgcagccctccctgcagaggaagtttctggggctcaggaagccctgggctctgacctgctgctccatgctgaattcccacctgctcccacaccatgagtgaccctgacatcccctccctaccccttcccagacccagagggctcagcaggagacactgagtgggaggaggaggaaatggaggccagcaggggctgagcggctccccagttcaatcccaaggctgagtagggctagtgccagccccgtgggccagagggggatgccagcaaccacacaccttggtgggatgcccttcaccttccaattgccaagtggccatggcctcatgcacagtgcatccgtggggcctccagagttggcccgagtggctggcgccctaattcctttaggctgaagcccaggagtgtttgccacccccacctcccacctgatcagtgaccatttggggtgtaaagacaacaatttcacagctctgatgatcagaaatgatgtaatggccacaggcggctccgcctgcgtcatccatgatttcatcacacacctcgggaggctcagggtgacagacagtgcatgcaaggtcacccggccaggaagtggccaggatggatgttagctcaggcctgaccagcccccggggccgcactgctgtcttcccgctaccctgcctctgggtccgtcctgttatccaggctggtgggggaagctcaggctgcagggccagctcctgctctcctcccacaccctccagcctggttcaagccataggcaccatctgggtcttcgtcctcatgcccagagccaggctctgtgcccagcttgttgcaggtctcatcaaaccctgacacagccttaggaggcagccccattgccatcttcactttacagaggaggaaactgaggctcagagaggctcccagcttgtgagaggaggggtctgagtaggtgcgcctgactccaaagcctgtgctcaccacagttcccagggatccgctctgagccaggcccctgtggccacccagcccctagccccgtagatcccaccccagtggggccccgggggcacatacctgggtgggctcagcagctccctctgcaggtggacccagggtgcggtgagactgggagcactgcccagttccccacactcacctttcacaacccaaccaatggcgccatcgagcaggaagggtgagaaagaggacacaggaagccagagtggtggggctgcagggtgggggcaggccagctcagcagagcctggggccagagggccagacagccacagagctcctggcgtgggcaaggctggccaaggatggcgacgcccaggggcctgggggccctgctcctgctcctcctgctcccgacctcaggtgagtggctggcacctcatcccctcctgccacgctgggccgaccctgccctgccgagggagggatccagggacagacgcagggactggagaaggtgaggagttggggtgtctgggatgtgtcctccgataccccccgtggccgcctcagcaccttctctagccctgtccctttgggtcagtcctgtccttccactaaaccttgctcaggactggtctcaggttccctttgttgctccacagtgccctggagataggggaggtcggagggtgctccctgactccccaacctgggctgtgtctccctgacaggcctggctctgagacaggggttggccccgggcaggcaattctccagctggcttgtgagatcctggggacgggattcagacactctggaagctgaggccaggaaggtctgtcacctcgttcttctggacctctcctcccgcacatgtcaccccacaccggctccctctcccagtctcagccacaacctcttggtcctcagtggcctgagccaggatccacactcctccccgtcactctcccgtctcacacacaaacacatggtgcgtctccagaggccatggaagtgcccgggccttgcctttgctggcctctctcccaggaaagctgtccccctaccccttgcccacttagccagctccatttacccttcttggcctctgtggcgtcttagcaaccctctcggacagagggaggtgctcccccgttagtgctccctcctcagtgctcctgtctcagggccttgcaggccactctctttttgctcctgactcggtgaggggcctgcatgtccatctccctgtgtgtccagcgtgtggtcgcgtgactttggccacatagatcaacttatttggtcttcaaataaccctcttcttttcaaacattggaagattcagtggagtg

SEQ ID NO: 6863 - DNA, 6000 bp, Homo sapiens
tgccggaactgcatagactaggctggcttcaggcatggatgaatccagccattcagtgtattaggactgtggtccatcccatagctgtttcctctgggacagctttactctcagacaagttctcaccctgtgtgttctccagcttcaggcctccatccttgtagtttttcaaccccagcagaaagagaagacctctttccagtgagtgctagaacaatcctagagcggattctcacgggcctggctcaggccacgtgcctttccatgaaccactcactgtggctaagggtagcataaatgctctgattggccaggcctaggacagatgcccatgctgggagctcagacgcaaggtagctctccaagggaaaatcaggtgctctttccagaaatgggagaagcggatgctgagcagcgaaaacaacagctgtcccggaagagcagagcgttccaccctcagggatgaaaacagaaagcaagagtgtatctatttcccatgtcagagaggagtcaggagctggaaacctggaccagggccatagaactctgcaccatttcagaagcttggtcgccatcttggtgttggcatcctccacataggttttctgttgcgactgcatggctgagcaggaagtgggaggagctggagaaacaaaagtcccaatttgcagccaggtctggaaaagagagaaccccctcagggagtgaatggaaacagcttcagaaggccaagttcttgcaaggagacccagggtgcaggcctgctgctgaggggcctggctggttttgtggcatcttccccatcgattctctctttacgtgcctaaaccaggcttgctccaccttggcacagttgacctgtagggctggataatcctttctcatgggagctgtcctattgtaggatgtttggcagcattgctggtctctatccccctgataccaattgcatctccctccctagttgtgacaaccgaaaatgtctctagacattgccaaatgtccccttggggtcaaaactgcaactggttcggaaccactggcctactgggtgaggaggggttggggaatcggtggtagtgaggactgcaaagcacattcctgcctgtcatcctcccagccaccctggggctggatgggattagagaggctgcttgcagcattgcttgctgaaacttgctgagaagtctcttaactgagctggccattgatgagatgtctcaggggaatccattccagggcccctccactgggtcggggactgttggcattttgttctgacacctccagttcttaaattttgatccctcgtgtgctttagtacctcgtgacaagcaattgtgctaggatgatgtttctccaaagggtggtaggttgaaatgcgcccagtgggtatgcaacatgggttacatcaacgagcgattttattttatttttatttatttatttattgagacagagtcttgctctgttgcccaggctggagtgcagtggcaagatcttggcgcactgaaacctccacctcccaggttcaagcgattcttctgcctcagcctcccaagtagctgggactataggcacgtggcaccacgcccagctaattttttttatttttagtagagacagggtttcaccatactggccaggctggtctcaaactcctgtcctcaagtgatcctcttgcctcagcctcccaaagtgctgggattacagttatgagccactgcacccagtctcaatgagcaatttaaaaatgtctggagataaatacttgaatgtgtttggttttcttgtaagtgggttgattcaaaagttaagtaaataaccgcccaggtggtgtgtggacaaagcataagtagctgtggtggcacgtcagtgaccgacgtggcaggaccacgaataagtgctggattgcaggccgaccgatgcctggggtgcatcctcaccccggaaggtacctgagcaggatgctggggcggaatgctggccggatgccttctattctgaggctgcctcctctcatcagtaggcaaaggacatgagcccgacagccccaggcaccttttccttcagtaacatcaataatttatgccactggaaagcctcacagccagggcaggatctgagatgctcacaggatctctgtaacagtgaggtggtcgataccgcatttacttagggaagccccagggacgtactggagcccggggagagcagctggtcacaaccccacacgtgggttgagctggggcagtaagtctggcttgagaggccaggaaacaagcatccagccagctgtgcgggctgtggctttcctaaagaccaggctcccttcaaaagcaaggggccgttagagaaaaaaaaaaaaaaagggaaggagctggtagccgtgaggtaggggacagtcctcactatgtttctcattcattcagtatttactaaacatcgtgccaggtgctgtgtgtcgagcttgagtctacagccatggttctcatccaggtgattttgctcccccaggggacatctagcactgtctagagacattttgggttgtcacagttggaggaggggacgtgctaccggtatccagtgggtagaacccagcgatgctgctaagcatcctgcaacgcacagtcccccatgacagagaacaacccagcccaaatgtcagtcgtgccaagactgaaggagccttgtctgccggtgaacaagagagaccatgtccctgccctgccacgtcttgcaatggaggaagtgaggatgggaggacaggaggaagggaaggcagaaacaaagtaaacagccaaaaaatgacagacgtgattagaccagaggctgtggtggagaggactggggtgtgaccttggccaagtctgagttgatggcatcagagctgagctcagcactgggaggaggagtggccaggcagagggagcagaggggcaagaggagacttgggttaggcccatcgctgaggctgctgtgtggactccagctcgtatatgggcaagagagagggcagcagggagaattctgcaggtttcccagggagagaggcactctggggaatcctccagagatgttctagagagcgagcgtgggaggtgagggagagacgcagcctggaaccaaggaagacagctgcttttgtgtttactacatttgaaatgctgggattccagcactttgggaggccgaggcgggtggatcacctgaggtcaggagttcgagaccagcctggccaacatggtgaaacctagtctctactagaaatacaaaaaaatttagccaggcgtggtggcgcacgcctgtaatcccagctactcaggaggctgaggcaggagaatcgtttgaacctggggaatcagaggctgtagtgagcctccgattgcgccactgcactccagcctgggcgacagacagactccgtctcaaataaaaacaaaaaaggaaagaaatgctgggagcccgcggagtgaggtcgcacccaggagttgagttgtgtgaccttgtgcaaaggttgtcacctcctggagactctgtattgtcacctgtaagatggaggtcctaataggagctgtctcacagggcattgtgaggactggatgtgtccaattcctggctgttagctgttagcctcgagaggctgagaccaggtaatgtgtgccactcattctcccagtgcagcacttggcctgtggctgtgtctttaaagtttcatttttttccccttatttttctttctttggtttttttttttttttttggagacggagtctagctctgtcgcccaagctggagtttagtggcacgagctcagctcactgcaaccttcgcctcccaggttcaagcaattctgctgcctcagcctcccaagtagctgggattacaggcgcccgccaccatgcccagctaatttttgtattttttagtagagacggtgttttactgtgttggccaggctggtcttgaactcctgacctcgtgatccgcccgcctctgcctcccaaactgctgggattacaagcatgagccaccacgcccagccttcctcttatttttcaagaggtcagatgtggcacagagtatccaattcaaagaatacaaaagggtatacagagaagttggcctccctcctaccctgtccttcagccaccagtgatgatgattcacggttcttcactgcacccagccaagggtacagatgggtcccaaaacctccgtgcctgaggaaaggagcacgttttcctatgtgtgcaaaggtgccgtgtgcgcttgcaggtttgaaatgaggcgagtcttcttcaagaagtcaggagagggggagtcttccaatgaattcatctttccttccccccaaccattcccctcttggcttttctagaatgttcgtggcatcagagagaaagatgagagctcaccaggtgctcaccttcctcctgctcttcgtgatcacctcggtggcctctgaaaacgccagcacatcccgaggctgtgggctggacctcctccctcagtacgtgtccctgtgcgacctggacgccatctggggcattgtggtggaggcggtggccggggcgggcgccctgatcacactgctcctgatgctcatcctcctggtgcggctgcccttcatcaaggagaaggagaagaagagccctgtgggcctccactttctgttcctcctggggaccctgggcctctttgggctgacgtttgccttcatcatccaggaggacgagaccatctgctctgtccgccgcttcctctggggcgtcctctttgcgctctgcttctcctgcctgctgagccaggcatggcgcgtgcggaggctggtgcggcatggcacgggccccgcgggctggcagctggtgggcctggcgctgtgcctgatgctggtgcaagtcatcatcgctgtggagtggctggtgctcaccgtgctgcgtgacacaaggccagcctgcgcctacgagcccatggactttgtgatggccctcatctacgacatggtactgcttgtggtcaccctggggctggccctcttcactctgtgcggcaagttcaagaggtggaagctgaacggggccttcctcctcatcacagccttcctctctgtgctcatctgggtggcctggatgaccatgtacctcttcggcaatgtcaagctgcagcagggggatgcctggaacgaccccaccttggccatcacgctggcggccagcggctgggtcttcgtcatcttccacgccatccctgagatccactgcacccttctgccagccctgcaggagaacacgcccaactacttcgacacgtcgcagcccaggatgcgggagacggccttcgaggaggacgtgcagctgccgcgggcctatatggagaacaaggccttctccatggatgaacacaatgcaggtaaagtgggcaccacccggctgggtcaggccgggggaccattcatctcaaaagatactcttcttcctcttcagtggggatgggcggtcccagtacctggggcagtcctagcagatcagaacccacaaatgttgactcctgggctgaaactgacccagatatgggtttgggttgtttgtttgtctgtttgtttgagacagattttcgctcttgtcacccaggctggagcacaatggtgcaatctcagctcactgcaacctccgcctcctgggttcaagtgattctgctgtctcagcctcccaagtagctgggactataggcgtgtgccaccacgcccagctaatttttgtatttttagtagagatggggtttcaccatattggccagcttggtcttgaactcctgacctcagctgatatgcccacctcggcctcccaaagtgctgggattacaggagtgagccaccacgcccagcagggtttgggttttttgttttttgtttttttctttctttctttttttttttttttttttgagacagggtcttgttctgttgcccaggctgagtgcaacagtgtgatcata

SEQ ID NO: 6864 - DNA, 6000 bp, Homo sapiens
tctcctagtacgcttgggaagctgaggcctgacaagagcagggcttttcccaggcacagagcacagctagaacccaggggctctggggcctcagagcaggggcctgacgggtgagctggttcccagggtcctgctgcagcgctgtgtccccacctgcagtaacatgcgtgcactgaggcctgctccgtcctgtggggaagagaggccagcagagaaggggagggcagggacccctgctgggagagctggattctaatattccctgcctcccatgtccccaactcctgcccgctcctgttcagactgaggggccgaggctctgggcccaggaacccctaggcctccgcagatctggggagcaaaaccttgggcagagcagccctgaggggcctctcttgccttcccaggctccttggtctctcctgctcccccactgggagcacaggatggggatctcagctcaacccagcccagcaaggcggggtctgagaataagcattctggaggggccacagaggccatctgccaacgcccctgcatttcagatggggaggtgggatccaggggaggatcccctgattgatggaatgagaaccagacccattccttgctctgagcccacactaatctctgcctgcagtcactccgttgtgtccggtgggaccagagatccttccctgtccccctctggcaggctgtgtgtcagcaggcatcccagatctaggaggctacaggactcctcgctctggggattggggtgggagactgaccttttacttccaggacgtaagtcccacctgcccacagtctcttccagaatttttgtgccccctcgggagtagagtctgagagggggaagaggccaggctctgatctgccagaaaggggccgtactgggcagaggtgagagcgccagctttgtccacagccagacccagctccaccacagctggactctcgccagcttgggcatgtcctaagcccatgggtggctcacttctgccatccacataacaggtgacatctcctgcctgcctccctcccaggctggtttggagtttgcccagagcaaacccaggaaggaatagactgagaggagggtcctcatgcgaggaggactctcagaggcacttcctgggggtggctcaggtgcgccctcttagtaaaatgctcctcagatgcaagggcaggtctttgagtcatgatctgtgagcacagccagtcccaggacagactccaggggtagtgcctggggatggcagtgatccagctgtctgtcatcacctggagtgacaaggtcttctagtgagggcttttagcaaggctctgagcaccatggcccccatcctctgcctctcagcgtgctcacagcttaatccccaggcagccctcacctgcctggaccctgcgcctaccagctccctgcctcctacaggctgtttgacgtcggaggccagcgatctgaacgcaagaagtggatccattgcttcgaggacgtcacggccatcattttctgtgtcgcgctcagcggctatgaccaggtgctccacgaagacgaaaccacggtgagtggcctgggccccccgggcagggggcagcgctgaggagacggccgcaggataggccagccctctgagcactgggcctcgggtgcccacaatggctctggggtccagccagctgttgtggttagaggtttccatcatggacaggccgtgccggcactccaccaattctgtattgccaaggcaaatgcctcatgatgccagtgtggcagagcctgtgtatgcaacctgatcacacagagccgtgcagaatgtgcctcttccataaacttggtggagtcacagaggccatcaggccatagcaaatttaagcaaaccctaaaaaaaccaggaggcagccaagcaagaatgtacaggcaacagaaatagcagtcttagcctgacagccatccctggggcactggcgtcagatgctgctgaagcagcatggggccggggatgctgagggagaggtggggagggcccaggatgctgcaggagagttgcgtggggttgggggtgctggggagcagtgtgtggggctgatgggccaggaagggcaatggggatgaggcatgctggtgagtgacagtcgtggctctgggctcctttgccaaatgccagaccaggctcctaccttctgtcttgcgtcacattcagcctagggcctcagtgaggggacattcccctgggagagtgcagccttcctctgggtctagtcctggctctgctactcactggcttgctgctgaatttaggcagcaccctttctggctcagttactattttccataaaagggagataataatagtacctgcctgtggggggctgttggcagtggggtgggtgatgcgtgtgcagcgctctggagctgtttctgggacagcagcgccaagctggtggttgtacagttgctggtgattgccctgagcctgcaggtccactgcgtggtccccttctgggctgcagcccgccaggcaccgagcatggcccacagggtcactggagacaagccccaacactcctgacagcggggcccataggctatggggtcacagcctggcgtctgtcatctccttctgtctggaacacatgcaaatcccccaccccacgcctctgaaggctggcaccgagggtttgaggttggaggtggggcttgttgtcatgctgggccttgagcgaggcctgtcctctctctgggtctgtttcctcgtcatttctggcccagctggtccactgggctttgtgaggatgggatcaactttggggtgtgggctacggggcacagtgctatagggaggaggagccgccgccctgaggggcttacacagagtgatggggctttgggctggtggtgtgggtagtctggacccgttccgtgtacaggcttacccacctgactcttcctatttcaggcccacctgtacccctgacttgggtttctgctgtaattgttctcaatggcatctgcaggcagtgatgtcagtcaccagcccagtcttgatgctgagtggggcaagggtggatgcgcttcctgggccgtgcttggacccagactcactgaccacccaaagcccaggtcagcttcctggccatgtgcccctcacagtgactacccagacatttcccactccccactgctagactctatgctattacggccactgctccaactcctggggtctgagctccacttggctcatcttttttcccccatgtccaccacggtttcaaagagagcaaaggagctagaagcaggaagccaggagggcccttccccctggaatccagcctctccctggacctgccctgccaggcctgtggatggcttcaacccaagtcccaggcccaccggccatggggctgggctctcgctcacctctggaagatggaagcaagggacgtctgggtgagcctagcagccacaggccctgagctctgcagcccatgggtccccagtgagcatgagcctggtgctgggcctggcactgggtgaccttccagcctgcgggccttgctgcctggagcacttgccctccggtcttctccaccttctctcacctccctttttccccatttcccccacccttccacacaagggctggagcagaggaccttggagaagccaaagcaaatggagccaaggtcacaggcaggctcttcctgtgtccttccttccccaaggctggccacctttgcagcccggggaagagtagcagctcgtgcagggaatggggatgactttgcaacctgacagcagccacaaaggcagctcattgccgtggtggcagcaagaacaatactggcgctgtagaactaagcagtcatcgccgtgcgctgggggcgcatgcagaggtggacagcttgggagtcagacagatctggtccagggtctagcatcacccctgccgcctgtgtgatcatgggcaaccgccccaccctgcccgggcctgcacctcctcctctgtagatggtgacaatggtagaatggaccaccgggctaaaagctgtaaaagtgcctgtacacaggaatcatcactcagtgaatagctcctgtggctacaacattcagatgccatggctagaggtcaggttctaggatgtgggagctctgtctgcctcagggaggcaagagccaggccccaggaactcaggccttggtcctcagccatcctctctggtcagcgctgtgcatccctctctggcctggggtgagagcctgcaacaaaggtgtctggaagcagcttctggagccaggccaggagagccctggggctagtggctgccactggccatccagccgccctgtccgctgcatcccgggagcccgagagcctggtcctggcctcgtacctgctctcagcaccgcccagccgggcctgcggctgccacagcttctccactaccacggtcgcctccactgcctgcagggccttatcttgccaaaccaaggccaaaaccagttctgagagaccctccaagcccggaaggtatgaagcacctccctccaactgaatccatcagctaagagttgaaagcagcaggttctcagggcaccgctgggtgactttgctgtgatgcctgcccagcccgcccctgcgcccacactcctctccagccacttggcctgggctcatcccacccatcctgcatctcttgccctgcaatccacaggcccaggatggccatggcccctgtgagcccgcaccgggctctctgcaggagctagccaggatgccctggccctgagactggttgaaccaatttttcagtatttttctctctttctcttgttgggtttttatcttctctgttttcatctgttttgctgtgtttcatcttggggttcctctggcccctctactgagaaaccagccccaacaaccagttctcccagagcctcccccgctccagcccaccaacgagaccaccaaccacaccaaggccacagcaagctcacccccgagacgctattccctggtgtctgcttccaactcgggattaattcgaggatctcttagtcctcagttaatgtttcccaactgaatgcgtgcacccttccaaccttgctgtcaaaaccgaatgagaccctggtagagaaatctgcatgagcagggttccgcgcagatgcgttcggtggtggttgcggcccctgcgctgtacgtgcatggtgcatgtcctctccgtgagctggagcctctccagtgacctcactgcccccacctggggccagctctctttggaagggggcagcatcccccaaccctgcccggccctgctccgccccgccctgcctgcgtgtggaatgaaacaggaccacgtcccgtctgtccttgtgggtcctcccgtctccgtcctggtggtctccgtcccggtggtgcatccagccacattggtggaccttccctttgcttgtcccgctgtgtcattggccgcggtgggtcagggccctggatgctgccgcccctcactcacccctccactctgttgcagaaccgcatgcacgaatccctgaagctttttgacagcatctgcaacaacaaatggttcacagacacgtccatcatcctgtttcttaacaagaaggacatatttgaagagaagatcaagaagtccccgctcaccatctgctttcctgaatatacaggtagagacccctccagggacagcaggcccccgagggagcgggccccgttcccaaagcccagtccacccttcctgtgctctgtggatgcccctgactctgccacagagaatccacacaaacggtcccccaccctgcccccagattgtgctctagagaggaggggcagctagccggggcttcctcatcagggaaagccggtagagccctggctctgccacttacgagctgtgtgaccatggcggcctctgggagcctgagctccactgtctgcgcacaggggctctctgtgacgagacgagcaaacgccg

SEQ ID NO: 6865 - DNA, 6000 bp, Homo sapiens
gaatcaggcccaagagctcggagcagtcagtggtagcagagcccgaacccagtctcctgcctcttagcctggacttttccccagagtaccacagatggccattcccatgataggtagtgagttccccacctttgtaggtgttcaagtgtggcaggggcgttgcagaagcaactttggcatcgcatggggctcctcttcatggctgcttccagccctgagctttcctagccttgggggagatgggcacccaattcccacattccccggagtcgctatgtccttaagcatcacatgggtctttctagccgcatcaggccatgcttgtgggcaggtggtgcctctatctagaaaccctcttcatagcctggctgtctggcaaggttcttccaaggaacctccaccatgaaagccatgaatgcatcttcagagacccctgtccatgtgtaaatagctcagtgggctggatgggagggagcagagggggagagggacccagctgaagaggactggagtgaacagggagaggctgagggaggtcaggagggcaggacacccacctcctgaatcttcaggaccccttgctctcccttatccaacaggcttgaacctgaataggggcattcctgaccccatggcacttcccctgccccccacctgcctagagccatgggcagtgggcaaagctggaagaaaccctcgtgcacagcttcctcaaagctgtacttatcctatgccatggctgtcctggccacaccttctgggggactctgccacctgtgtgcacacctaggggaccaggtgcacacggtctgtcctccagctcctctcctgcctgcctcctggcaccttaagtggaggtggtgggagctgggaccagtgcagcacccttgccagccatggtgggggaggacagccagtgtctcttcatggagatcctgcagcaggtggtggcatgccccagggtcccgtctctgtctacctacctgggtttgggaaactggagtcagaacctttagtgattgcgatctaggaaggacggtagtgtttgcaaaccacgtgagcacaggagtgagcaaggtccaaccccgcccctgttccctgggccgtgaggctttgggccctgtggctcagcccctctgagcctccctttccctctctatggagtagctgctgccgactctccatgtcgttgccagggcatgcaggacaacagaggcagcccagggaaaggagtgcaccatgctcctttggatccagttttacgagctctgtgtccctgggcaagctccgtgtccctgtgtccctgctataaaatgggaatgatagtacctcctcatagagtggccctggaagcatgggaggccaagtgcatatcctatggtttgcacttgtacgtggctccctgccctgccccagctctgcctcgtgagtctctgcagactagtcctcgggacacaccccacccccagcctgctagatcgcaggaccccatggccataggcacgtgccctttctcctccttgcttgaccttggagagcccatggggagcccaggtgggagcttggggtctgcagcaatgggaacgggacccacttttctttgcacatctgctacctgggctccccttaggcccgaaccacaggagtgggcctttgagggtcttgggggtggtaattttgctttaatgtagagagaaaatccaaggttcagtgctcacagattcagatggaatctcagacatcttctaatccagcagccattaaagctgtctgtggccccagtggcataggaaaggcatgcgctcccaggcttccatgctgtgggacttctcagagcctttatcgggaaaacaaaggggagtttgccttgtgtttcagatcctatcaggctatgcacagtcttgggaaccgttctctggccaagcagccggcagaggtgtgtgtgctcctgatcctgttagatgctggagagtggagatggctcagtgcttgaaccctctccatcccctatcccctacccctcacatagcctgagtggcacttttgggttggatcttctagatcttctatcaggaatggctatctagtatctatcaggaatggctccttttgggaagaggtgtggagcctgcctgccctgggttagagtcccagctccgtctcagtcttcatttactcatccagcagtcactggggatcttctatggaccaggcactgtgctaggtactggagatgcaggtggtgagcaagacaggtgagacagcaaagctgagcaagggataacaggtaagcaaatggcagagtcatgtcaatgttgggtgccaatacgggtaataaatcacatggaagcgagtgatggatacggaagataattttaattgggtggtcatggaaggcttctcagaggaagggacatttgagttgaggcctgagaaggaggcagtcagggaaagggtcctggaaaggatgtgctatgctgagggaaaagtgcacgcaaagaccctgaggtgtgtctgaggacagaagtctagagtggctggagttggcgactgcaaggaagggatggggtggcgtaaggctgggggacgggagtaggcttgtggtcactggcttgtgatttcagcagtcctgctgctccctgagcctcagttctctgacttacaaaatgagcttcatcatttcagtccccgccccgaccctggtcgggaatgttgtaggtgtgaagtaagacagtgctttggcttttggctctgggcagcaatgagctattgcagttatttttattattactatgagtgggatgtttagggactatgggtggggctggggaagctgtgcctctgtttctccgggttgctgttgtaagtgagtgccaagtgtatgtaaaaggcgtggtgtgcctcgtctgtacctccccccaggtcccctgaaccacagccccttgccagctccctttaagcacaggatcctttgatgcaacagaggccgccttctccggccagcaagccttgtgagcctttccgggagaaggtttcaccagagaacagcaagtcctttctttgctttcttttcctcttcctccgggggccaaaaatagggcctgaatgggacccagctctgggcctgcagtgagacaatagcagcctcctgactgaagctgcctcctggctctgctccacggaggggcgggggagaaggggagttgcagagacaccatcccctcagccccaagcccctgctgcctttcccatggcctctgccagaaatcatcccaaagccccttcctctgttggactcccctcagaatgtgattgccagtggggttccccacttgtgctctgagaaagtgcttgtagctggttgactgagaccccaggaccttttgcacccctgagcaaccccaccctatctgctggcctggaaccgaaaacctcggtgggggttctaacccctggttcttttctgtgccctgtctggggcgtaccacagtttttatgtccttttccctttgactcagtgggtatgaaaaacttagagatcaaaggaatgtgccctcttggaagagagcgagctccctgtcactggagatgttcaaataaagttggctgagcattgaacgtgggggagagttagggattagccaagtgccagatggacaactggtcttgatagcttcatgtcccagagaaaatctccatttaaattccatacccttcccttaccagctaggtggctcacagcaagtcacatcccccgagtctctgtttcccaatctgtaaggtgggtcccctagggctaaccttgcagagtggtagaaatggatctccaaaatgcccagtgtagttcctggcacacagtaggagtttcagaagctctgcctctattttcctccttccccagactggcaaaagagaatctgagctcccagccccgccccgggagctctagaaggaagccaggaggaacctccaggcctagggctaactcagaagggggattcttggtaggctgtggcaatctgaggaggcttcctggaggaggtggaccctaaggagttttcagagaaatatgatgcacacattgtgctcacaaaagccagtggtgggattagagggtgttcagcttgttttgagggcagggccacaggctggcagcttccagaagcaaatccagctactgttaggcataatttggttactgggtggcctgcactgggttctaaaaagatttggttttgggccaggcgcggtggctcacacctgtaatcccagcactttgggaggccgaggcgggcatatcatgaggtcaggagttcgagaccagcctggccagcatagtgaaaccccgtctctactaaaaatacaaaaattagccgggcatggtggtgggcacctgtagtcccagctactcgggaggctgaggcaggagaatcgcttgaaactggaaggctgaggttgcagtgagctgagatcacgccactgcactccagcctgggcgaaagagcgaaactctgtttgagaaaaaaaaaaaaaagatttggttttaaagtcaatgttgacaaacttgcagatttcatgtaaaaacctggggctctgcctctctcgagaaattggaagctctggctctttgtggtcccttcaagacaggcaggtgtccccggggctccccataaatcgctgtcctaacccctgccctccctcctgccagctccctgtctggcctgggcagcgtctgagttgaggacttgggaacaggacaagttacggagccacgttgctttgctgggtctgagccggggtgtgacgtagtccctgcagctgccaacggttgccagggcaacggttgccaggggctgctgtcacctgcgccccttctcccgcgctggcggctggggcttctcagcctctattccctggctgtcccctttgtttgaagctccagtgagggagcagtggctggggtggcccagcttcaaagtctctgtcctcttgaaaaaaggtggtcgggggacattgacccaccagccccgcaggctactgcctgcaaacaagaacccctcatctgccacgcacgttcttaatgtatctatagtctgcctgatgccacaaaggagtccaggtacgattctcccgcctcctctcccctcctccccgtccctttcactcctgctccctctccctgctccccgcttctcccctgtcttcctccttcactccccttcccctccagctcgcctccttcctccccatcccttcccctttatctttttcctctcccgtgcattccccttctccccagcattgatggtgtagccagtgggtgggggtgtggtggcactagggaccctgggggggtcagatggtactccaagggacttgggcagtttaagacagcagcctcaactacaaggaaatagttgggggtgagagctccacacccgtccctgcagcccagcccttgctgaagattcttttgggtccctgggctgcacccccggtgtcagaaacaagcctctgacaagtccagggcgtgaggggactggaagtgcaggaaagagccaccagtggggctgggatccaaggtcacctgggtgagttctgatgggctccctgatttgggcccttgggaggatggcgtccagctgaacccatggaaacacattgttggaagctttctttactgtgacttttcaagagatgtgctttctaagagtcaggtaagttcaggagggaaataggcttgcagatggacagcgtgtgtcctggagccagccctgggttcgcatccaatcttcattacttgctagctgtgtgacctcgggcaggtaacttgacctccctgggcctcgctggccttatttgttgagtgggtgtgatggtacttgtctcaagggttttgaggaagcttaaatgcgtgaacatgtgtaaaaagctcacaatcctgtcttgcattttcgaagagcttaatgaacatagttgtgtcactggaggtggtgagca

SEQ ID NO: 6866 - DNA, 6000 bp, Homo sapiens
cctggacctcctggagccattctctccaaggctggagacccagtgaactctcctgggaggtgaggttcctctgtgacaatgtctgacctgacagcaaatgacaccagtctaaccattggtggataatatggcctgcagagccagatggcctggattggattttgtctttgccaaccgtctaaccccggggcagtacttaacccctcttggcctcagtgtctccatctgtaaaacagggagaataacagtctctggcctaaagggtaactgggaggattaaatgaattaaagaatttaaaacacttagaatagctcctggcacacagaaagcactatgtactcagctattattgttattattatcatccatgggtgtttgaactttttggagggaaggaatgcacctgccactcaatgtcctccttcattttcactctgtgctccctgtggtatcatcacccaaagtgaaactgaccatcacagtcagggtcctctgtaaaacaagtgggaaagggaatataaccgtaactgcaatgttaatcagctcatattaaggattttccacatgccagaccctgcgtgaagcactttatatgttagcacgtgttagaccttcacaacaaccccaataggcatgtgcgatgaaaaagatctccattttgcagacgttgaggacatgtggctcacgaaagtgaacttgcccacgttgacaaaaggatctcggcgtcagttccaagagctgccaccaggtgacagtgcccatccactttccaattgcgcagtctggcgggaacacactttgggtcgtcccgcaaacatttaatgagcgcctactgtgcctggaactgttctgggctctgaggatccatgcaaataaaccaggagtggggcgaaaaactgccattatggttcttcctttccattttcccttgaatataataaaaggtatcccagagatgcgtgcccaagggggatgtggcctaaccggaccggaactgggaggctggcagggagggatgggagtatctggaagggccacggtccccaaagatcaggggctgccactattcccagaaggaggtgttctgcatctccccttcctgcagcccccgggagaggggagcaggggtccgtcctatcccttttggtcttatgtggctgggatggttgcggcgacgggggtagagattggggggcgcaccgcggagggagaaaggaaatctcaccctgagaatctggagtgcagggaagggatgctgctcaaaggtctgtttctggctttggcggggggccacctgagactgccagggtttgatggtctgaaggtcacccagggaaccagccccatatggggtgccggagcgcagctcccaggcctggtcgaagcaatgcgacctcggagaggcctgaggactaggacggggtgagggggactcagagacggctgccccggacccctccttcaagcaggtcccacggccgcccagcggacacgcgtccgggctgtgccctgaccgtctgcggagcgcacggccagtggcccgggccgctgagtgtgtgagccctgaagggcagtggacatgtgcgtacgtgggtgatgtgtgcggtaggggtggtggcgatcctgcgtagggacccacgtgaggggtgcaccgactggacgtgtgtgtttcgaggggccaaggaagcgggtgttggtcccagtgtgcgtaaacggacaacgacatctgggagttgggcagtgaggagagagaagagtgtgtccaggaggaacctgcctggaggaggcctagcggtgtgtgtgcgcctaggtgtataccggggcgttggtgacttcgagaggcaccgggcgggatcgatcctctctgcgtcctggacctggtgctggtgtgtttcggggaagttactgcttatgaaccccccttggagcgtggcctgggggcaggaaggcttccgcgctgggacccctgggtcgcgatacctccctcggtaagtgtattggctaggggagtgttcccgcaaatggatctaccctggggagttgcccggctcgtctggactgcttacgggcgcactgacgttgtggggggaatgtccccgaattgggggcacgaggtcgggggaatcgtctctgagatccgggctagaagctacgagcttgggctccgggggtgcatgcagacggcgcctagccccgcgcggaaccgccggcgggaccgggggtggggctcggaggcccgggggcggggccggccgggggcgggggcgggggcggggccgcggccgctgcagcagcgcgggccgggccagggggcgcctcgcgcggcagcgactctggcaggcgctgcagtgaagctggacccgcaggcgggcgtgcgtggagcgggggccgcggccgcgccgcagagatgtgactcgggccgaaggccagctggagcgtcggcgctgcggggccgcgggggtcggtaagtgcgagctgcgccgatgcagtggaggacgctgtggggaccccagaaacttttcccgccgtggatttgggagaattggggggtccgcttcttgtgtttttctaagcgcccccccaacccaagccagggagtttattgctgggggagatgtggaatctgggcgaggggaaccacggtgcgacgagagcagagccgtagaggggtgggcgggggaggggaggatctggggacctttacggggggagggagactgtgcccggaccaggtagagatccaagtctcccaggagggtgtgggggcgaccacaggtgaagggcagctgggagggtaaaggagcccagccgtgtcctagtgactcgtcatgtgtgaggagctgcgggctggtcctggggccgcgttgggggctgactgtggacagggcagacgcagccgggggcacaagggctggactttgggggtgaacagccgcacctgtcgcgggggctgggggtcaagcccgcagccggcttgagtgcgcattactcagcaaggggagggggggacacggcggtgggagatggcagagctgagacctgggctggggacgaatgacggggaggggtggggaggagggggcggctgcatacaatggcggggggggcagtggcgtttcccttccagacagggggcacttggacctctggaagaggcggctaggctggagataaggactagacctgttctcggtcccctctccttgggggacacaggcttccagccccacaaggaccccacacatcccggggtccctagcgcttaggccgaaaagggagcgcgcgggaggagcccgcacccgccttggccccgggcagccggttgaacagcctgggaaggggccaacgaccttgccccagaaatctcccccgtgcagcgggttcactcctccgtccttgctctgtcacacccaggcctagccagtcctccctttccgtcccccgttcgctaagggggcggctccttggagcgcggacaaaggcccctggagtgtggcgggcagcggcgtccccgcctggggccccagcccacgcgccacattggccgcccaactgcaccaggccggggggcacctgaacagagcccagaaagccctgggggaccccgcaaagacaagagaagtgggggagggatctggcacaaaaaccccggcacttcagccaaggaaccttcttaattcagaagtttcttcggtggggactcgggcttgcggaggatccaggctttgagttaaactgcatgcaaatgacatgtaaatagaatgcaaattggcatctgtcgtttggaagccctcccggccagtttggtatctaagactgtggagtgaacagtttgctatctgctccctgctctaagcctggaaaggggtcagctgagttgggaagggaaggagattccaggaggaaggagccgccatttgggggcacaggcagcaagacaggcagttttgttagaaagataaactcagaatctttactggattaatatgttatttcaagaaacgtgccagggacagaactgggtgccttgtataaaacggacaaaacccctgctctcccggggctggggaagtgagtggacaaacattaaacaaacccatagcaaatggctatgaaatccgattggggtgaggacggccaggaaaataagatggggtgatgtaaaagaaggtgacaggggtgtatgtacctgagatgactgttccgggagtgacatttgagtggagcccagctagaagaggggccctccgctgggaggtcttggaggaagactgaaccaggaggaaggcactgtgcctgcaaaagcttggaggtgggaatgagcttagaggaactgaacaaaggccattgtggctggagctgtaggcagatttgggggtggggataggggaatggtagggaccagccagatcatgatcttttgggtcatggaaaggagtttagggtttattctgtttggaccagtgaacccttggagggttttgagtgggaggccatgggatctgatttgtagaagctcccctgacgttgacaaggaaatggaaaatagcccccctttccattctgcccatggggatagagagacgctgggagcctccaaggggctctgtccagccttgggggaccgctttgagcctagccagccactgcaagccaactggaggagcagctcaggttttaaaatccactccctgctttcatacagtttttatccactctaacggagccccccggagcccacggccccgtaagcactttctcgcagagcttcctgggggttccgcttagtcacattttcttctcggaattacagcctgagaggaaccaaccactgtggatcgggcagccaaggatgcaatttgcatttcaatgattgcttttatttacaggactggagctgctttgcatattcatggatcacagagcttgtgttcttgcaaccctgtttactaacctatgaggattttttaatttgagagccctcaaatgggccagtggtctagtcagcattgggaaatgaagatgatgagatcctgtaactcggaaaagatatcagagggtgagaattgggggtgtgggaaagagcgggtctgaagtcaggaaaccttgtaacagtttaatcctgcagagcaggaaatggaccagaggctccagcaggagtgagttgggacagactatgatgctggggtgcatggggatctggctctgcagccccatcctgagcctctgccacacgtgagggattcagaacagggatgcagcagaaacgccttgaggtcaggagctgggagaaatgggggctagtcccaggccagcctgtaaattccagtgaacctctggccaattttcctgacgtctctgccttcattttcgcaacaggaaaatgggaatcatgattgtctttcttttttgagacagtttaactctgtcgcccaggctggagtgcagtggcgcaatctcggctcactgctaactccgcctcccggtttcaagagatcctcctgcctcagcctcccaagtatctgggattacaggtgtgcaccaccacgcccggcttatttttgtatttgtaatagagacagggtttcaccatgttggccaggctggtttcaaactcctgtcctcaagtgatctgcccaccccagcctcctaaagtgctgggattacaggcatgagccaccgcgcctggccatgattgactttttaacaagcaattcactaaaaagctgttgcttcctctgtgtcgggcaccaaacctgacttttcttttcttgttgtatttatttataatagagacagtcttgctacgttgcccaggctggtcttgaactcccttcctcaagcaatctcctgcctcccatagtgctgggattacaggcatgagccatcacgcctggcccagactatttttcacgtacttctcacaccagccttgtaaggcagcgctatcattatccccattttacagatgaagagaccgaggttcagagaggttaagt

SEQ ID NO: 6867 - DNA, 6000 bp, Homo sapiens
caggacgggtcctgtcattatccccgtttcacagatgaggaacactgaggctcagaggagggccctgacctgctcagtaccacatagctggagagtgatagatccagggctggagtcagaccccagacagtgcacagatggatgatcacatattgacggaacttgggtgtgaccacaggatacagagagtggagaactgatctgatgaactgactgcaggaggcagggtaataccatggcctagctagccctcacctcttttctagaaagcatggtgaggatgggggtgctgatcctagggctggctgcggagcagtggcatggagaccaccttccagttgtggccagaatggaggaaagttttcctattgctctaatatgaggaggcaacactgcagaccagaatgagttaaaaggtcagtaatttatttttatttttattttttgagacagtgtctctctctgtcgcccaggccggagtacagtggcacaatctcagttcactgcaacctctgccccctgggttctagcgattctcctgcctcaggctcccaggtagctgggactactggtgtgtaacaccatgtccagctaattttttgtatttttagtagagacagcattttgccatgttggccaggctggtctcaaactcctggcctcaagtgatccacccacctcagcttcccaaagtgctgggattagaggcgtgagccatttcgcacagaccaaaggttagtaatttaaattctcctctggattttgatgtggcagatgtttactgagcacttagccacgtgccagccatgggtggtagcacttagcattgtctcatttagtccttacaactccatggatagatactgctatcacccccattctgcagatgagcaaaccaaggctaagggagataaaccaaccggtcagtggagccgggtaccgacccagacggtctgctctagagccccatggctaatcacgcctctgctgcctgctctgtgggctgttttctaagtaaatctaaggccctggtacccagtagttgctgtgcaaatatcgggttagcggatgaatacatgaattagtgaaaaatggcccaagtaaaataacctgtgagtaggaggtgattttagagaccatttagtcctccctgtagatgtggtaagtgtcttatctgcaacgccctagctgcacaactccttggcttccctctgagacaggtagctcacccccgaccttgtgggcagcaccagctctcagagggagcagagaggctgagcccgcggccctgctggagcacaagatgtcagagctggggacccttcctgcccctccacacctcctatgtgccccaagagggaaggagtctgcatttcctgaggccctccactgagtggggatgaggggtgggcaggctgagactgggcttacccagggctcaataaggggcctggagtcctggtgggagttctggagtcagactgcctgggtgggatctccgtcgcgttcctgaaccccctgtgccctatctgtaaaacccgcattataaagtggctccctgaggtcaggagttcgagaccagcctggccaacgtggtgaaaccccatctctactaaaaatacaaaaggtagccaattgtggtggcacatgcctgtaatcccagctacttgggaggatgaggcaggagaattgcttgaacccaggaggcggaggctgcagtcagccaaggtcacatcactgcactccagcctaggggacaaagcaagactccatctcaaaaaaaaaaaaaaaaagaaaaaaagttataaagtggcttccgcctctcggggtatggtgaggagtctgtgggctgattcctgtaatgggcctagcacagtgcctggttgccaggattacataatagctattattatcatctgcagccaccagacatagaactggacactctccggctccaccccttcatcccaggggtgctgggctaggtcccggattggtggtgagggaggagtcccagagccaaagccctgacctcacaaatgctccctaggtacctgatgaagcaatttcctgaccctgtctcttttcttccctttatttattttattttatttatttattttttttgagacagagtttcaccttgttgcctaggctgcagtgcaatggcacgatctcagctcactgcaacctccgcctcctgggttcaagcgattctcctgcctcagcccccagagtagctgagattacaggcatgtgccaccactcctgctacttttgtatttttagtagagacggagtttcaccatgtgggtcaggctggtcttgaactcccgacctcaggtgatccactcgcctcggcctcccaaagtgctgggattacaggcgtgagccaccacgcgcagcttcttcccttcacttttagaaggcaaacaaggcaaaggcatgtgccctcatttactagatgatctgaggcacagagaggttaagaaacctccccgagtgtacctagtgagtgaaggtcccagcccagggcctcaggcccagcccctgctgctccatcacaagccagggaccctgaggccagaggtcatgggggatggagcatgggtgtcaggcgtggcggagttgccagcgggtagacaggaagtcactgggactcccttggtgtccttatcagggtgggtgacatctctggggctgtggggaaaccccggagcctagaggtcaggctgtcatcctgcagatccccctctctctgacactccttctcccttctggtaccccaaccctgtctgtactcaagcaggagactcgtagggcagagcaggcctgcaggcccatgggtgcggcaaaggtggcatcgactgttgggaatttgccatggggaagaggggcaagagggagctgggactgggaatgccagtggggtctgggctggtcttcaggaatggacctgggctgtggccagcagataacccttctttactgccttggggagtcagagagggctccagtccagacctggatccacctctgctcccatctgaccacctgtccacatccctgtttcacctcttgcatctcatctctacctcagctcctttgttcagccacagaatcaagctggcctcctcctccttgctccttaaacaccaatccctggtctcaggggatgtcccaaaggccgctttccccactatattcagtccgtgcacaggtgtcccttcccagagagcatctaagctgcccatcccacctccatcactctttcccctttcctggcttatttttgttccataattcttaccactggatttatttatttatttgagactgagtctcactctgtcacccaagctggaatgcagtgtcgaaatctcggctcactgccacctccgcctccggggctcaagcaattctcctgcctcagccacctgagtagctgggactacaggcatctgccaccatgtccggctaatttttgttatgtttagtagatacaaggtttcaccacgttggccaggctggtcttgaactcctgacctcaggtgagccacctgcctcggcctcccaaagcactgggattataggcgtcagccactgcactccgccgccactggatatttttaataattacttgcttattcatttcttgtctctcctacagttctgagggcagaggtttctatgttttcttggctgcaggatcccccatgcctggcacaggacctggtgcacagcaggccctcaatagacactcgctgaaggcgtggtgcatcccctgcctgtccacactttcatccatccaccgtctgtgctttcttcccacacttcctcacccatcaatcacccagaatttctcgatcccaggccctgtgctggttcttgggtttggtgcgctagcagggcacacggatcaggaaagaaagaattccgacacttagggattggtcccagccaagggggagcctgggggactatgggagaaacagtggggtgaggggaggtgagggaaggtttatagggtgcattgaggtgcatgcagcacctcgcaccaggcgtgacccacagtggcacctgatagagactttgtagaataaatcagccattgcccggatggcttctagaaggggtggcggggctcagacggtgttctcaatgttgaggatgtgatgcaggaatcagaaagcatctagaggaggggtacctgggtgtgagagcttgagaaacttcccctggagaattgccagactgagacaaggagtgaagggtgggacaggggccaggcaggcagggttaggggcgagtgggccaaggcctgcctggaggactctgctgggcaccctcccaggatgccttgagcggtggccgctgagctctttcctggaagaggcttccatccctgcccctttgtctacctcagttctccctctgtcaggtgtcctgcaggagcctggaaactcagagagaagaatgagcaggactccccatccccctcgcttcccgcctcctgaccccaccagctgctggctggggcctgtttttattacaggcaggtgagtctggcccaggattccaggcggggcctggactgagggaggaggcaggaagaaactcacaaagagttggcagatcacggatggagggcagcatctcccaacagcctgggcggccgctgagacccagagaacccaaggactcccctgggctcatccagcagcctctgcttcccaggagagaggtgctgaagtccacgaagaggtgaggggtggggggactcagcacctaagggtcaggttggcccctgcaaggacacctgggaacaagagagggtggcggctgcagtggctgtggggcagccggaaatggggcgagacagacaggcggagcctcacctggggctgcccgccagcccagacaagctcagactgggtgcctgtggccctgggaggaggtggaaggggaggagcaggccacacaggcacaggccggtgagggacctgcccagacctggaggtaagagacgggtgggggacaggggtgggaaagataagtagggtgccactgccagcctgtcccccttgaccttggccatccctcaggtctagttcaatgccctgagagtcccgatgtgtgtggcctggcccttggcctgttcagggtactgggcgtctctcagtggaggccctggctgttctggggttaccccttgcagtgcacagcatggccgggcatgctggcatggtggtcatcctagcaccgggaagctggcaggtgtgaggtgtgttcccggtgtccaacggacactgcaggacgcagggcaagggtgacgccgcggagcctgagcatggacgggaggcaggcggcaggacctgaagtctcctgcctgctttccgcagcgccctgagcagcttcctcctgggatcccacggaaaccggtttgggagcaggttggcccaggtcgtttgacttttgactggggaggagaaggcagcctcccttagcgagccaaatggaaggaacagggtgcaggcctgggggggcgtgcccagccagcggccagctgagggtcccctgctccccccagctgcctgcacccagcatcacagccctccctcccctggctgcaagaggcaggaggagaacttcaaacggtccctccctccaccggctgcttgtcttctctgggccaggcccctccatggtggctgaggactctttggaacagggaactgtcgtggaagaaagggcccggccctgccactgcctcctgtgggaccctgggccaggctcccctgctgtccaggcctgtttccctgtctgttccatgaaggagaggcaggggcagtggtctgtaaacccataagctgcagcagtaggcccctcccctggtctcatgggccacacacgccagccagccagaggtgggtgtctggagttgcgggtggggtgctggcgctgtgccctctctaccaacttggctccctggggcgtgtg

SEQ ID NO: 6868 - DNA, 6000 bp, Homo sapiens
tggggaggcccagctgaaaatgcccccggaggaggtgactcagtagctcctatctcgaccctggcagaactcaggtaactcaagacacggggcaaacctgaagaggcccccagagctgtaccaggaaagctctgcagtgtcatggaacacatggaagtggcctgatgctactgactcacagaggcttggtggattgctttgagttgttttcggtcaccctccatctccttgtctgtaaaacggggacaggcactcctcagaactgctgggacagtccggggagccttttggttggcacagtgtgtttcagagtggttctctgtccccccgccccaggcatcctcatgtgattcgcttgaaaacacggcaggacgggtcctgtcattatccccgtttcacagatgaggaacactgaggctcagaggagggccctgacctgctcagtaccacatagctggagagtgatagatccagggctggagtcagaccccagacagtgcacagatggatgatcacatattgacggaacttgggtgtgaccacaggatacagagagtggagaactgatctgatgaactgactgcaggaggcagggtaataccatggcctagctagccctcacctcttttctagaaagcatggtgaggatgggggtgctgatcctagggctggctgcggagcagtggcatggagaccaccttccagttgtggccagaatggaggaaagttttcctattgctctaatatgaggaggcaacactgcagaccagaatgagttaaaaggtcagtaatttatttttatttttattttttgagacagtgtctctctctgtcgcccaggccggagtacagtggcacaatctcagttcactgcaacctctgccccctgggttctagcgattctcctgcctcaggctcccaggtagctgggactactggtgtgtaacaccatgtccagctaattttttgtatttttagtagagacagcattttgccatgttggccaggctggtctcaaactcctggcctcaagtgatccacccacctcagcttcccaaagtgctgggattagaggcgtgagccatttcgcacagaccaaaggttagtaatttaaattctcctctggattttgatgtggcagatgtttactgagcacttagccacgtgccagccatgggtggtagcacttagcattgtctcatttagtccttacaactccatggatagatactgctatcacccccattctgcagatgagcaaaccaaggctaagggagataaaccaaccggtcagtggagccgggtaccgacccagacggtctgctctagagccccatggctaatcacgcctctgctgcctgctctgtgggctgttttctaagtaaatctaaggccctggtacccagtagttgctgtgcaaatatcgggttagcggatgaatacatgaattagtgaaaaatggcccaagtaaaataacctgtgagtaggaggtgattttagagaccatttagtcctccctgtagatgtggtaagtgtcttatctgcaacgccctagctgcacaactccttggcttccctctgagacaggtagctcacccccgaccttgtgggcagcaccagctctcagagggagcagagaggctgagcccgcggccctgctggagcacaagatgtcagagctggggacccttcctgcccctccacacctcctatgtgccccaagagggaaggagtctgcatttcctgaggccctccactgagtggggatgaggggtgggcaggctgagactgggcttacccagggctcaataaggggcctggagtcctggtgggagttctggagtcagactgcctgggtgggatctccgtcgcgttcctgaaccccctgtgccctatctgtaaaacccgcattataaagtggctccctgaggtcaggagttcgagaccagcctggccaacgtggtgaaaccccatctctactaaaaatacaaaaggtagccaattgtggtggcacatgcctgtaatcccagctacttgggaggatgaggcaggagaattgcttgaacccaggaggcggaggctgcagtcagccaaggtcacatcactgcactccagcctaggggacaaagcaagactccatctcaaaaaaaaaaaaaaaaagaaaaaaagttataaagtggcttccgcctctcggggtatggtgaggagtctgtgggctgattcctgtaatgggcctagcacagtgcctggttgccaggattacataatagctattattatcatctgcagccaccagacatagaactggacactctccggctccaccccttcatcccaggggtgctgggctaggtcccggattggtggtgagggaggagtcccagagccaaagccctgacctcacaaatgctccctaggtacctgatgaagcaatttcctgaccctgtctcttttcttccctttatttattttattttatttatttattttttttgagacagagtttcaccttgttgcctaggctgcagtgcaatggcacgatctcagctcactgcaacctccgcctcctgggttcaagcgattctcctgcctcagcccccagagtagctgagattacaggcatgtgccaccactcctgctacttttgtatttttagtagagacggagtttcaccatgtgggtcaggctggtcttgaactcccgacctcaggtgatccactcgcctcggcctcccaaagtgctgggattacaggcgtgagccaccacgcgcagcttcttcccttcacttttagaaggcaaacaaggcaaaggcatgtgccctcatttactagatgatctgaggcacagagaggttaagaaacctccccgagtgtacctagtgagtgaaggtcccagcccagggcctcaggcccagcccctgctgctccatcacaagccagggaccctgaggccagaggtcatgggggatggagcatgggtgtcaggcgtggcggagttgccagcgggtagacaggaagtcactgggactcccttggtgtccttatcagggtgggtgacatctctggggctgtggggaaaccccggagcctagaggtcaggctgtcatcctgcagatccccctctctctgacactccttctcccttctggtaccccaaccctgtctgtactcaagcaggagactcgtagggcagagcaggcctgcaggcccatgggtgcggcaaaggtggcatcgactgttgggaatttgccatggggaagaggggcaagagggagctgggactgggaatgccagtggggtctgggctggtcttcaggaatggacctgggctgtggccagcagataacccttctttactgccttggggagtcagagagggctccagtccagacctggatccacctctgctcccatctgaccacctgtccacatccctgtttcacctcttgcatctcatctctacctcagctcctttgttcagccacagaatcaagctggcctcctcctccttgctccttaaacaccaatccctggtctcaggggatgtcccaaaggccgctttccccactatattcagtccgtgcacaggtgtcccttcccagagagcatctaagctgcccatcccacctccatcactctttcccctttcctggcttatttttgttccataattcttaccactggatttatttatttatttgagactgagtctcactctgtcacccaagctggaatgcagtgtcgaaatctcggctcactgccacctccgcctccggggctcaagcaattctcctgcctcagccacctgagtagctgggactacaggcatctgccaccatgtccggctaatttttgttatgtttagtagatacaaggtttcaccacgttggccaggctggtcttgaactcctgacctcaggtgagccacctgcctcggcctcccaaagcactgggattataggcgtcagccactgcactccgccgccactggatatttttaataattacttgcttattcatttcttgtctctcctacagttctgagggcagaggtttctatgttttcttggctgcaggatcccccatgcctggcacaggacctggtgcacagcaggccctcaatagacactcgctgaaggcgtggtgcatcccctgcctgtccacactttcatccatccaccgtctgtgctttcttcccacacttcctcacccatcaatcacccagaatttctcgatcccaggccctgtgctggttcttgggtttggtgcgctagcagggcacacggatcaggaaagaaagaattccgacacttagggattggtcccagccaagggggagcctgggggactatgggagaaacagtggggtgaggggaggtgagggaaggtttatagggtgcattgaggtgcatgcagcacctcgcaccaggcgtgacccacagtggcacctgatagagactttgtagaataaatcagccattgcccggatggcttctagaaggggtggcggggctcagacggtgttctcaatgttgaggatgtgatgcaggaatcagaaagcatctagaggaggggtacctgggtgtgagagcttgagaaacttcccctggagaattgccagactgagacaaggagtgaagggtgggacaggggccaggcaggcagggttaggggcgagtgggccaaggcctgcctggaggactctgctgggcaccctcccaggatgccttgagcggtggccgctgagctctttcctggaagaggcttccatccctgcccctttgtctacctcagttctccctctgtcaggtgtcctgcaggagcctggaaactcagagagaagaatgagcaggactccccatccccctcgcttcccgcctcctgaccccaccagctgctggctggggcctgtttttattacaggcaggtgagtctggcccaggattccaggcggggcctggactgagggaggaggcaggaagaaactcacaaagagttggcagatcacggatggagggcagcatctcccaacagcctgggcggccgctgagacccagagaacccaaggactcccctgggctcatccagcagcctctgcttcccaggagagaggtgctgaagtccacgaagaggtgaggggtggggggactcagcacctaagggtcaggttggcccctgcaaggacacctgggaacaagagagggtggcggctgcagtggctgtggggcagccggaaatggggcgagacagacaggcggagcctcacctggggctgcccgccagcccagacaagctcagactgggtgcctgtggccctgggaggaggtggaaggggaggagcaggccacacaggcacaggccggtgagggacctgcccagacctggaggtaagagacgggtgggggacaggggtgggaaagataagtagggtgccactgccagcctgtcccccttgaccttggccatccctcaggtctagttcaatgccctgagagtcccgatgtgtgtggcctggcccttggcctgttcagggtactgggcgtctctcagtggaggccctggctgttctggggttaccccttgcagtgcacagcatggccgggcatgctggcatggtggtcatcctagcaccgggaagctggcaggtgtgaggtgtgttcccggtgtccaacggacactgcaggacgcagggcaagggtgacgccgcggagcctgagcatggacgggaggcaggcggcaggacctgaagtctcctgcctgctttccgcagcgccctgagcagcttcctcctgggatcccacggaaaccggtttgggagcaggttggcccaggtcgtttgacttttgactggggaggagaaggcagcctcccttagcgagccaaatggaaggaacagggtgcaggcctgggggggcgtgcccagccagcggccagctgagggtcccctgctccccccagctgcctgcacccagcatcacagccctccctcccctggctgcaa

SEQ ID NO: 6869 - DNA, 6000 bp, Homo sapiens
agaagggacaggctggcctcaagattccagttggctgcagagcttgtctgaaccttatgcccctaactcctgccacccctgctctaggcatgtacattccctgggcaggtactgactggtgtgtgccctggcgcccaggaggctggcctcagctgctccttggagatggccaggtggagacttggccatgaacctctacgtggctgcagaccaccccaggagcataagctgaacaggcctggcaccagagtcttcggactgctggctctttggctctttgaggtcccttcaagacaggctggtgtccccagtgccttcctaatccctgtttctcctttaggttctaagtctcttcaatcaattctaaaagtccttttttttttttttttttgagacagggtctcgctctgtcacacaggctggagtgcagtggtgtgatcttggctcatcgtaacctccacctcccgggttcaagtgattctcatgcctcagcctcccgagtagctgggattacaggtgtgtgccactatgcccagtaattttgtttgtttgtttagagatagggtttcactgtgttggccagactggtctcgaattcctggcctcaaatgatctgcccaccttggcttcccaaagtgctgggattacaggcgtgagtcgccgtgcctggcctccaaaattcttcttttcttttttttgttaatttgtatttagagacaaggtctcactctgtcacccaggcttgagtactgcggcatgatcatagctcactgcagcctcaaactcctgggctcaagcaattctcttgcctcagcctcccaagtagctggtactacaggcaagcactactacccctggcttcaattccaaaattctaagagactttgattctcatctcctaaaactcttgcatcttcatattctttctctctcttttccaacatcctgagtgtcttagctgcttgagatgaagtcacaggcccagctggccacggccaactttaatggaatggcacacctgggacaggcctggcagtgcccttttccccacgagctggtgctgccggccgaagggaggtgggataggcctgaatataccccaggctcaccagggacctctttcctggaagtgtcagggatgatgatgagtggccctggggaatgcctaagtgtctcctctagctcatctcatgctagctaatgacctttgggacagctcaaaggggaagggaggggagggggctggaggtgctggcaggcttctgtgtggcgtcaagatttctgagagcttttttccatgtggataacaggtgtccgtgcaaaaaaggctctaccttcacgttgggttgggaaactgcccaaccaagctttatgggtttctttcctgcaggacttatcagagcctttgatatgctaatatacaacagaaagtatggcccacaagcatttctctaatctggggactagtgctccctgaaagtgctttggcaagttacctcatggtaaagatggggagactgagtcccagagaagagaaagaactcagaagaccacaatggctaaaagtttgggcttggaggttaggcggacctgagtttgagtcccggcttttctgcttatttgctgtgtgatcttgggcattacttaacctctttgggcttcagtttcctaaagtggggacactgatagcatttgcttcaccaagttgctgcgaggattgcatgattcatgggctctgctcatagggttactgtgaggattgaacaattaattttttgccaagtgctttgcaggatgccagcggctaattgagcacttggtgagtggaagctgtgatcctccctctcctcttagaatctccctggattccagggcccttttcactgcaccagataagacccctgtttagtcccactcatcatctggtgtcctgccaggcatggggactgggaggatgtgggggcctgaggccaggacactgggactctcacagacgtgtcacaaggttgtcatcacagggaggaggaccagtgtgtgcaaaggcttggaggtgggagcatccaaggccaggcttcttcctggctggatgactatatgttggcttctctgaggcctcttaagcaaatgcccagttccgcatatgggaggcagcagggcagccggctttggacaactgactctctgggaggacttggagtcccttcctatgagtgggtccttccctctcaggctggcagggagtgccccaacttctcccctttgtcactcttcccacagggtgtgtctgggcaggcagagggtgttgtggctcaagcacttggttggaccagaagccacggggacagtgaggcctgagctggcggtatggggggtggggggtgtccagcaggtctggtgtaagagtgtgaggctcaccctgggcagtgagtgggccaggcctgggcacctgccagcctccgaggcaggcagcttgcttcattttattctcctttattgtaggaaaattcctgaaaactgaagtcactctgcttctgccagtgatcctggaatacccctcttggggagctctctgtggtcacctagcttggacttccgtcactcacttggggagtgggaatgggggaggggagtgggaataggggaggagagtgcttctgcctttgcaagctgttatcccaggacccatgggtgcggctgaggggtggggggactgggctgggggtggggcgtagccctgagtgccacctgggtctgacaggggtgtctactttgagctgttgggtacatgctatttccaagtaagatttacttttattaaaaaagtttggaaaccgttggagggagggtcctctcagacgccacgccacccaccatggaggaaacacctgcaagagccctgctctttgcactgtgccccgccctccctgtccccttcccagctttgaagtctgttcctctgaggagctccccgccttctcttgctttctcctcctggccccatgcatccctgtgtatgcacgggcacacgcactcatgcacacacactcatgcacacacatgcacagtcatgcacgggcacacacactcatcacacactcatgctcaggcacacactcatgcacacaaggacattcatgcatgggcacacacactgatcacacactcatgcacgggcacacagccatgtgcacacagacatatgcacactaatgcatgggcacacacactcgtcacacactcctcacacattcatgcacatgcacacactcatgcacgggcacacacacccatgcacacacatatgcacactcatgcatgggcacacacactcatcacacacatgcgcaggcacacacatgcacacacggacacttatgcacaagcacacacactgatcacacactcatgcaagggcacacacccatgcgcacacacatgcacactcatgcatgggcacgcacactcatcacacactcctcacacactcatgcacaagcacacacatgcacgggcacacactgatcacacgcactggcacacactgatcacacgtatgcacgggcacacacccatgcacacacacatatgcacactcatgcatgggcacacactcatcactcctcacacacatgcacacactgatcacactcatgcagggcacacacacccatgcacacacacatgtacactcatgcatgggcacacacactcatcacttcataactcatgcacacacacactcatgcacgggcacccactgatcacacactcatgcatgggcacacacccccatgcacacacacatgcacactcatgcatgggcgcacacactcatcacacactcatgcacatacacacactcatgcacacgcacacacacccacatgcctgtgtaactcgcaggagttcatcctcaccctgccgcccgaccccctgggccaaatccttgcttccaaaggctcagcagctcagtgtcgtgccccagcagcccacaggagagcagctgcggacgggaggggagctagggcagtggaagttgagctgggggggtcttcccctctgcctctcccagcgagggcccatttaaggggaaggcctccaggtgggcaagactaggctggaacctggagattgcctccggggctccctcgttcctccctccttggctcccttcccaccccaccaccccccaacctgatgcctgcccttctcctgatgtctttcaggaagccccttccagggccccgctaaatgctgggggagccacagaggagcctgatgggtctgcgtcacagggcagggaagagagtgctggaacgcaggctgccctggccccgagtccaggccctaccatctagcagctgagggatgcggggccagtccctcccctctctgaccatctctaaaccagggctgctggtgcctttccctggttcataagcccgtggttcccaagcctgcagtatgtccatcaacgggatgcttgttaaagccaagctcccaagcccaccccatcagaccctctttgggccgggactgtgaatctgcatttcagctcactcccagaggaaggtctgacccaccggcaggcttgggagcctctgatgtgagcgcctgtggcaatggggggcgtgttgtgttgagggtgggttgtgggccagcaggaacatgcgttaattttggcaaggaatggacgggtaggtgaggcttcatggggaggacttgtcttagctcgtctcaaagatgagcggaatgtcacggggctaagtgctatccaaggcaaagggacaccaaggggcaaaggtctgtgggtgggatgcctgtgctcgggggcgggcagtggtcactgtgtgtaaagggaagaaggaagcagtggatggccaggttcgtgggtcttcccggcaggagacagcagagaggcgcctgcccgggaagggttaatcccagagccgtccaggtcctgtccactcaacttccacctccatcctctgaggaaatgggttttccaggagcttggcctgggcagcggtgactcgtggctccacacggaagtgactcaggtcccccgggagaaagcgagccgtgggtccccactgcccaccgtgcagaggggcagggctgagccaggtctggagctggagccctgggggtggggcgggggatgggctggtggtggggtgggggtctcagctcagacaaaccctggccaccttccactctgctggatccttggggaaccccatgatgtggcccccattgtgtcagactggactggcctgttctgtcctgtgtgtgtttacggaaggtctgaggtcaagggcggctgctctggaagctgggggttgtgggggcttccttgggcctcagccccagcaccctctatcccaggctggattctctgctactctccattctcctctccttccctttgtggggattctaaagccggggagttgggaaggatgtgcatctctggggcctttatcaatgccagctctacaaggagggggagacttggcaccacgctcgtgtgatctcagaacacacagccttccccagcctcagtgtccgcatctgtaaaatggtagcagtgagacccgtatcacagggtggttctgagggtttggtgtgataacgtggatgtcaccactaacattatcattgcgggggtgttgctagaatgccccctgctcagccactccctctggctctgtgtgagcagaggcagggcccttgcctgtggggccgtggttggtactgagcgcctgatggctgaggccctgtagcgctggggatctgcggctccagaggcagagacaggtcaggtcccaggggtctgtgcggagactcatgctacatccctggcgcctgggtgggtgggtgggcaggtggcaggtgtgtgtgcgtggggcagacctggaggggtggcataggcagggatgaaggaggggcgctaagtggacaagcgtgacagtgtccccctgcccaatctgtgtggca

SEQ ID NO: 6870 - DNA, 6000 bp, Homo sapiens
gtgtggagcctgcctgccctgggttagagtcccagctccgtctcagtcttcatttactcatccagcagtcactggggatcttctatggaccaggcactgtgctaggtactggagatgcaggtggtgagcaagacaggtgagacagcaaagctgagcaagggataacaggtaagcaaatggcagagtcatgtcaatgttgggtgccaatacgggtaataaatcacatggaagcgagtgatggatacggaagataattttaattgggtggtcatggaaggcttctcagaggaagggacatttgagttgaggcctgagaaggaggcagtcagggaaagggtcctggaaaggatgtgctatgctgagggaaaagtgcacgcaaagaccctgaggtgtgtctgaggacagaagtctagagtggctggagttggcgactgcaaggaagggatggggtggcgtaaggctgggggacgggagtaggcttgtggtcactggcttgtgatttcagcagtcctgctgctccctgagcctcagttctctgacttacaaaatgagcttcatcatttcagtccccgccccgaccctggtcgggaatgttgtaggtgtgaagtaagacagtgctttggcttttggctctgggcagcaatgagctattgcagttatttttattattactatgagtgggatgtttagggactatgggtggggctggggaagctgtgcctctgtttctccgggttgctgttgtaagtgagtgccaagtgtatgtaaaaggcgtggtgtgcctcgtctgtacctccccccaggtcccctgaaccacagccccttgccagctccctttaagcacaggatcctttgatgcaacagaggccgccttctccggccagcaagccttgtgagcctttccgggagaaggtttcaccagagaacagcaagtcctttctttgctttcttttcctcttcctccgggggccaaaaatagggcctgaatgggacccagctctgggcctgcagtgagacaatagcagcctcctgactgaagctgcctcctggctctgctccacggaggggcgggggagaaggggagttgcagagacaccatcccctcagccccaagcccctgctgcctttcccatggcctctgccagaaatcatcccaaagccccttcctctgttggactcccctcagaatgtgattgccagtggggttccccacttgtgctctgagaaagtgcttgtagctggttgactgagaccccaggaccttttgcacccctgagcaaccccaccctatctgctggcctggaaccgaaaacctcggtgggggttctaacccctggttcttttctgtgccctgtctggggcgtaccacagtttttatgtccttttccctttgactcagtgggtatgaaaaacttagagatcaaaggaatgtgccctcttggaagagagcgagctccctgtcactggagatgttcaaataaagttggctgagcattgaacgtgggggagagttagggattagccaagtgccagatggacaactggtcttgatagcttcatgtcccagagaaaatctccatttaaattccatacccttcccttaccagctaggtggctcacagcaagtcacatcccccgagtctctgtttcccaatctgtaaggtgggtcccctagggctaaccttgcagagtggtagaaatggatctccaaaatgcccagtgtagttcctggcacacagtaggagtttcagaagctctgcctctattttcctccttccccagactggcaaaagagaatctgagctcccagccccgccccgggagctctagaaggaagccaggaggaacctccaggcctagggctaactcagaagggggattcttggtaggctgtggcaatctgaggaggcttcctggaggaggtggaccctaaggagttttcagagaaatatgatgcacacattgtgctcacaaaagccagtggtgggattagagggtgttcagcttgttttgagggcagggccacaggctggcagcttccagaagcaaatccagctactgttaggcataatttggttactgggtggcctgcactgggttctaaaaagatttggttttgggccaggcgcggtggctcacacctgtaatcccagcactttgggaggccgaggcgggcatatcatgaggtcaggagttcgagaccagcctggccagcatagtgaaaccccgtctctactaaaaatacaaaaattagccgggcatggtggtgggcacctgtagtcccagctactcgggaggctgaggcaggagaatcgcttgaaactggaaggctgaggttgcagtgagctgagatcacgccactgcactccagcctgggcgaaagagcgaaactctgtttgagaaaaaaaaaaaaaagatttggttttaaagtcaatgttgacaaacttgcagatttcatgtaaaaacctggggctctgcctctctcgagaaattggaagctctggctctttgtggtcccttcaagacaggcaggtgtccccggggctccccataaatcgctgtcctaacccctgccctccctcctgccagctccctgtctggcctgggcagcgtctgagttgaggacttgggaacaggacaagttacggagccacgttgctttgctgggtctgagccggggtgtgacgtagtccctgcagctgccaacggttgccagggcaacggttgccaggggctgctgtcacctgcgccccttctcccgcgctggcggctggggcttctcagcctctattccctggctgtcccctttgtttgaagctccagtgagggagcagtggctggggtggcccagcttcaaagtctctgtcctcttgaaaaaaggtggtcgggggacattgacccaccagccccgcaggctactgcctgcaaacaagaacccctcatctgccacgcacgttcttaatgtatctatagtctgcctgatgccacaaaggagtccaggtacgattctcccgcctcctctcccctcctccccgtccctttcactcctgctccctctccctgctccccgcttctcccctgtcttcctccttcactccccttcccctccagctcgcctccttcctccccatcccttcccctttatctttttcctctcccgtgcattccccttctccccagcattgatggtgtagccagtgggtgggggtgtggtggcactagggaccctgggggggtcagatggtactccaagggacttgggcagtttaagacagcagcctcaactacaaggaaatagttgggggtgagagctccacacccgtccctgcagcccagcccttgctgaagattcttttgggtccctgggctgcacccccggtgtcagaaacaagcctctgacaagtccagggcgtgaggggactggaagtgcaggaaagagccaccagtggggctgggatccaaggtcacctgggtgagttctgatgggctccctgatttgggcccttgggaggatggcgtccagctgaacccatggaaacacattgttggaagctttctttactgtgacttttcaagagatgtgctttctaagagtcaggtaagttcaggagggaaataggcttgcagatggacagcgtgtgtcctggagccagccctgggttcgcatccaatcttcattacttgctagctgtgtgacctcgggcaggtaacttgacctccctgggcctcgctggccttatttgttgagtgggtgtgatggtacttgtctcaagggttttgaggaagcttaaatgcgtgaacatgtgtaaaaagctcacaatcctgtcttgcattttcgaagagcttaatgaacatagttgtgtcactggaggtggtgagcaccccgcctgcggggtgtgcaacctctgatggtcagtgatgctgtgctgtgtgctcaggagtggggatggaactcagtgcttctacttcccttccctggacggggcccaggcacagtcaggctcgggcccccagccttggtaggggagaactttgttcttctcagcctacttagtaggggagggtgctctcggcccctcagccagtgatccaggacctcgaggagggggaggaaaaaagaaagggagggttggtggccagcctgggaatgctaagtgtcctgcgctccaaagatgggagtttgccagacctggggtagttgaactgctaagcaaggagggaggtgactgggctgaccttgcgggcctggccttgggcaacgtgggaacacagatagggaaggggaacctcagccagacaactgaggtccggctgtggtttgagagggaagacagtctagaggggtcaggggagacggttcagcatcctctttgtcccttgctaccagcttggaggtaagctctgttcttacctgtaggcatcctgaagcctgcgggagcctggagggccctggctgcagagaaggcagtcaggggacaaacatcagagttgcccacttgacagaggagaaaataaggcccagagaagggacaggctggcctcaagattccagttggctgcagagcttgtctgaaccttatgcccctaactcctgccacccctgctctaggcatgtacattccctgggcaggtactgactggtgtgtgccctggcgcccaggaggctggcctcagctgctccttggagatggccaggtggagacttggccatgaacctctacgtggctgcagaccaccccaggagcataagctgaacaggcctggcaccagagtcttcggactgctggctctttggctctttgaggtcccttcaagacaggctggtgtccccagtgccttcctaatccctgtttctcctttaggttctaagtctcttcaatcaattctaaaagtccttttttttttttttttttgagacagggtctcgctctgtcacacaggctggagtgcagtggtgtgatcttggctcatcgtaacctccacctcccgggttcaagtgattctcatgcctcagcctcccgagtagctgggattacaggtgtgtgccactatgcccagtaattttgtttgtttgtttagagatagggtttcactgtgttggccagactggtctcgaattcctggcctcaaatgatctgcccaccttggcttcccaaagtgctgggattacaggcgtgagtcgccgtgcctggcctccaaaattcttcttttcttttttttgttaatttgtatttagagacaaggtctcactctgtcacccaggcttgagtactgcggcatgatcatagctcactgcagcctcaaactcctgggctcaagcaattctcttgcctcagcctcccaagtagctggtactacaggcaagcactactacccctggcttcaattccaaaattctaagagactttgattctcatctcctaaaactcttgcatcttcatattctttctctctcttttccaacatcctgagtgtcttagctgcttgagatgaagtcacaggcccagctggccacggccaactttaatggaatggcacacctgggacaggcctggcagtgcccttttccccacgagctggtgctgccggccgaagggaggtgggataggcctgaatataccccaggctcaccagggacctctttcctggaagtgtcagggatgatgatgagtggccctggggaatgcctaagtgtctcctctagctcatctcatgctagctaatgacctttgggacagctcaaaggggaagggaggggagggggctggaggtgctggcaggcttctgtgtggcgtcaagatttctgagagcttttttccatgtggataacaggtgtccgtgcaaaaaaggctctaccttcacgttgggttgggaaactgcccaaccaagctttatgggtttctttcctgcaggacttatcagagcctttgatatgctaatatacaacagaaagtatggcccacaagcatttctctaatctggggactagtgctccctgaa

SEQ ID NO: 6871 - DNA, 6000 bp, Homo sapiens
acatgctaactcctttaggcagttacagctcggctagtggagggtaccttggagaaaagcaaaagacactccttccttctggcaggtgcagccctgcagtgcacagcttagggtatggaatatggatggggtactggccccactcacctctgcagccagagcattcttgtgcagtgtaccacctgcacaaccgtctatgtcagccatggcctcattaaatacttcattgctgttaaaaatatgttttccccttgaaattactattcgttttcagtttcctctttttttttttttttttgagacggagtcttgctctgtcgcccaggctggagtgcagtggcgggatctcggctcactgcaagctccgcctcccgggttcacgccattctcctgcctcagcctcccaagtagctgggactacaggcgcccgccactatgcccggctaattttttgtatttttagtagagacggggtttcaccgttttagccgggatggtctcgatctcctgacctcgtgatccgcccgcctcagcctcccaaagtgctgggattacaggcgtgagccaccgcgcccggcctcagtttcctctttttatagtttgatgctgataagttttgagtgggaaagactaacacatttttgtagacccttggaatgtgtgtgaatctcaggctccaggttcacatgtactcagcctaggtcctgtccccttccatgcctctggtcagcccctgccacggggtcccatctgcagcctctgcctcctcaggtgcccacggcaggggccacagggaagactttcgcttctgcagccagcggaaccagacacacaggagcagcctccactacaaacccacaccagacctgcgcatctccatcgagaactccgaagaggccctcacagtccatgcccctttccctgcagcccaccctgcttcccgatccttccctgaccccaggggcctctaccacttctgcctctactggaaccgacatgctgggagattacatcttctctatggcaagcgtgacttcttgctgagtgacaaagcctctagcctcctctgcttccagcaccaggaggagagcctggctcagggccccccgctgttagccacttctgtcacctcctggtggagccctcagaacatcagcctgcccagtgccgccagcttcaccttctccttccacagtaaggcaacttccaggcggagggaacaactgggcagtggtctagaggcagggaaggcaaaatgcaaagtggactgggctcacaatatcagatcatgaagactgggctttgctcacaggcactggggagccagtgaaggtgtctgaggaggggaggagtgtaatccaagtgctaggattacaggcatgaaccactgcgctcggccccactgtcccttgatggttactttgtgggcaggcaggggtgaggatggaagggcaagggcccgtcctgaggctgcagagaaggtcttggtgaaggaggatgaggtctgaatagggtgagagagcagagactggaaagggactgaagatcaagagccccaggaagaattcttcctcagcatcagtgtagactgtttatttcctttcacagaggaggaaactggggcacagagaggatgcccaaagctgcacagctagccaatgggagagccaggatttgaacccagcagctgattggagtggggtaggggtgaggggcggagtatgagaggtcaaaggtcaggaaagcagtggggttgactctgaggtccagaagctgcatcttcccccttgagtgtgacaggtacatgtggccactgccattcagcaccattaaatgctgaatggtggccaggaagggaggagcatcagaaggagcttgaaggtttactggggggttttcatgtctttccagcacctcaagtttgaggcagggctttcaggggtggggggcacagcactttgattgtgtcagtgtaacaggctaatgattatgtccagtgcaacaggcaggcccaggcccgtcagtggtggggggttccccacaccccaggctgggattctgccccgcaacctgggaggatttagggcaaagttgatcctagttgcaaattggcattctgaagaccagactgaacttggtcttgtttggcctgtagagggtttttaaaaaacatggaccagggatttcaaatcacctaaaacccaggctttctcggttatgcattcaaaagatggagctacccagggcctgccttcctcagtggcacagaaagtataccctccaacccccactgtttgtcttcctcatctgagtcccagctaatccctggagacaccttagtcggccgccttagtaggccgcccacgctacctgggcagaggggcccgagcctggagtcagggaggctggtgggtgtggagtcccaggaaccaccaccaagccccgcacatccctcctaaggaggcctggctgggccctctctgctccgtgtgtgtagccgaaggtgtctgcggagggtgctgagcaaggcacatcccaccccatcccgctggggctggcattgctggcgggttctgtaagacacaacccccacgggttggcctcatctgagtggccttggcagagtccactctgcttcttgaagcctcagtttcccctttgtaaagtaaagatcgaggcattcagagtcatgtcagggtggtagggggcagaatgggagggtcctgggacctgaatcggcagcctcggcgggggcctgtccacccctcccccaggtcctccccacacggccgctcacaatgcctcggtggacatgtgcgagctcaaaagggacctccagctgctcagccagttcctgaagcatccccagaaggcctcaaggaggccctcggctgcccccgccagccagtaagtttggcacctggggctgtgaggggaggcaggaaggcatcagagatctggacctgggcagggtgggacctggagtaggggctactgcgaggccttccctgggactggaatgcttctttgatttctctttctgccttctgggagtcaacacatgccccccaggctgagccctctcctgtctgagtcagtaaccaacatcacatccaccatcccaagccctcctccccctcataaagaaaggatgggtggtccacagtacagcccagcagaccaaggctcagagacggcagagccgctccaaggccacagagtaggttggcacaggcggagctgggcccaaacccatggtgctgagtcccaggacagcccccaccacaccattgctctcctttcccttggctcccaggtcctggcctcctctgtctgaccctaccccagctcattctttctctcccacacgcagatgcctgcttttctcttttgtctgctctccactctctcttgcccaccccacccctctctctgcctctgcctctgcctctgcctcttccctgtgtctctgtctgagtctctcgtcctcctgcctcagtctccctggtggcccggccccctccccaccatcaccaccgctttctcctccctgccaggcagttgcagagcctggagtcgaaactgacctctgtgagattcatgggggacatggtgtccttcgaggaggaccggatcaacgccacggtgtggaagctccagcccacagccggcctccaggacctgcacatccactcccggcaggaggtcaggggcaggcctgggcaggaagcagatgcgggttgggccggggccagatggaggtgggggctgtgagcactccctgaagctcagtgccgtcgcagcctctccctggggcctcccgagaaggttccaggcccgaggatagccatcctaagtcagtagttcaaccgtgggattgaggaccctgtgtgggcacagtggcagggtctgcttcctataccagtctcctggggccacccgtgtgaacagaagaccagcccctaaacgcctgtccacgcaccccccccccccgttttttttttttcgagacagggtcttgctttgtcacccagactggagtacagtggggtaatcatgtctcactgcagcctcaaactcctggtctcaagcgattctcccacttcagcctgtgagcagctgggactgcaggcttgctaccacacctggctttaaaaaattctttgcaaggctaggtgcagtggctcacatctgtaatcccagcattttgggaggccgaggcaggcagatcacttgaggtcaggagttcgagaccagcctggccaacatggtgaaaccctgtctctactaaaaatataaaaattagccgggcatggtagtacatgcctgtaattccagctactcgggaggttgaggcaggagaatcgcttgaacccgggaggcggaggttgcagtgagctgagattgtgccactacactccagcctgggcaacagagcgagactctgtctcaaaaaacatttttttatttttgtaaagacaaggtcttgctacgttgtccaggttggtcttgacctccggggttcaagcagtcctctcgccctggcctctcaaagtgctgggattacaggcgtgagccactgcacccagccacacaccccatcttgagactgccccctgagtggctctggttagctgggaaccacccacactgcccacatggccacccccaagttggctgctgtaggcagagctggcatctgaagccccagacaacagaacatcatgtggttctcccagggctatttgccctggagtcctggattctaaccacaagactccccagccagagctggtagcagggaagggagggatgaggagggctgtcatgagtcaggcttgacttcctgaagaaatgggcttagaagtggcagcgtccaggaacggatgggtgtgtgtgtgtgtgtgctagggtggggggcacggatctaggggtccgcatttggctgagccctaaagggacctctgcaggaggagcagagcgagatcatggagtactcggtgctgctgcctcgaacactcttccagaggacgaaaggccggagcggggaggctgagaagagactcctcctggtggacttcagcagccaagccctgttccaggtatggggtcctcaccctcatgcctcccaggagaaagcagtttttttctgacagaggtggaaagaaggcacgcagatgagctccttcctctgggagtcaaagcctttccttgtaaagttacaaattgcactgcaatgtgcaaatctccctgtgagagggctaagcaatgttcttcttactatagtgtaaatgactacatgggcaaaagtggttccagagggagacgcagcatctcaaggcaatgtgctgggagagggttatctagagagggtaaggggcttctgggcccttcttctcagtcctgaactccctccctactctcttcctccaaccccatgtatctaggacaagaattccagccaagtcctgggtgagaaggtcttggggattgtggtacagaacaccaaagtagccaacctcacggagcccgtggtgctcactttccagcaccagctacagccggtgagtgggggccagccatcaagagaacaagcgcccctcggccatgtcaccctttcctctccctccctccagactcatttgtctttataatgaaacgattgcctgatcgagcagtcaggtccaaatggggcgggtggtggcttgactgtgttctagacttcctctgcctggcctgtaaagttggaggggtggggggctgtcacagaaaccactctcctttcttgtccctacagaagaatgtgactctgcaatgtgtgttctgggttgaagaccccacatgtgagtatgcaggggtctctgggctggacaagtatctggaagagaaatagagtcctggggggtgggggaggtggggttaatcaccgagggcttcctggagaaaggaggactttgaagagagagcgatggcaggctatgagtaggccgggtggaagaa

SEQ ID NO: 6872 - DNA, 6000 bp, Homo sapiens
gacaacagaacaaatcacagagcctgtgtcactttttttccaaatccacagtaacatatatattcatcttgtcagattgctatataaatagatgaggtaaaacaacatggcatttgttgtacttcaattactttcttgtataatgtcaagaagtaaaagctaacaaaccataacttttcttgacatttcctccctcaagtgaccaatgatggatttgcctttaaaaagcattcatcattttaaagaagggtagagacagtagatttctttgtgttattttttttttccattttttaagccagtggttaaattgaaaagcccagctctcctgcagacgggaaccaaacctggttgataagattatatgtttctaatcctgggggatgtttgaagtcatccaagtagagagggcatttgctgtcataaatggtccagagatagaactgaattcccagagaggccaagaggccaccgtcaccatcacagccccctccttccccctgccttcaacctacattcccattaaacagtgtacactttgccaagcaaacctttttatgtggccagatctgacagcccagcatgattgttaagaacactggcatttaagtttgaggtgcatagtttcaaataccatttctaccgtttaccagctctgtgacctcgctaaaattacttacgttctctaaacctgttacgtcttctgtaaaatagcgacaataatatattattcacagaattattgcaaatgataaaatgagatagcatgtttaaagtgctcactgaaaaggctgctcaaaaaagaaaatgcccctattagcaaatacattgtaagctttatgaaggcaggaaaaatgccaggtctagtcaccatttctatcctcagagcctagtacagaatttggcccataggtgctcagtatttgctgaatggatgaatatatatatattattataatgttgatttttatcattagtgtccttggatgccagggatcggtgtattaaaataataattacagttaccattaactgagcgttattaagtctagacacctatgatttcatatttgttaaatcatttaatcatcacaactaccctaggagacaggtgctattattgttacaattatataaatgaagaaattgaggcacagagaggttacataacttgtccaagattacagagttagtgtgaagtggagcagggatgtaagcccaagtgcaaagcattaaattatactctgctaggaagtagagtaaatcattgttcaaataataatggtaatgtacttctttttgtgcattagaagtgatagttatctcaagtttttcttttatttaacattcacaaagaccctgggagataatcataattatcctcattttccacataaggaaaatgaggcacaagttggttaaacaaacacccaagagctcaggttagaatgtggcccttctaggattcaaacccaggcctgtctgattacaaagacatgctttttgaaccctgtgttttagaacacagtaggatagtttgaggatgaaccttgaattccagttttctcagattttctattgtgctagatatggctaagattgccacctgttcaccaatatgtttccttttcttcctgggcacacagctagactacatttcccaacatccttagcaactgagtgttgccagatgactgatttctagcccatgaaacatgaggggaagtgatgcattttgcttccaggcttgacctctagattccttccacacttgtttctccttgctccttccctttctctgctgaatacagaagagtatgaccaggttttggggcaagggtcagcaaaccatgtcccaagacccaaattcaacctgtcacgtctttttgtaaattatgttttactggaacaaagctaggccattaatttatgtgttgtcaatgactgcttttatggtacaatggcagcattgaataaaggtgacagagacattataacctgcaaaacctacagtaattatgatctggtactttctgctgtaaaaaaaaaaaaaaaaaaagtaacttcagctctaggggatggcagagtcacaagatggaaggagcctgggtccctgaataaacctgccaacatgaaccagtcactaagtaagaaataaatttctatgatgagtcattatattcctgggtctctttatgagagcagctgtcctaccataacttatttgcaggacattctagttacagaaataattacttccttccacattcaataggaataacctatttggtttcccaaaatgatccaaattgcttctccatatcatgcaattcttatttctcaccaccacactcagtaatgcagccactttccccctttcagagagtataacacacaatcatccccattgcacccaggagagacctgccaacagcaacgttctatctggtatcccaacttattgggtttttttggtttgtttggcttttttttttaatttggggtttcaaaattccaaagagaaacagaatcgcagcacttatccaataattctgtctgtgttgagaaataggattctggcaagcatagaaaaaaatatatttttattagtatgtccaaatctagaatgcaataaaatacagacctttcagaagaggaggaaaaaaaaatccttagtaaagggaaggaaagccaagagccgattacttactgctacagaatccaatattgcaaagccctttttttcttttcctatgccacatttttaatgtctctgtgagctcagtgtgctgtgactatcaatcacaggaaactactgacattgtgaaactgcttttaagatatacagagttttcaaagccaaagttgtctgaagaataaaaatcttcagagatcgtatattttcaaaaatatctatttgcacaccaagctgagtaatgaccagctgtccttactctgcaactgcttgacagaatgcatgaatattgttttgtagaagacattaaatacgggaaaccaaaactttgtatgaggattgccagttctgctatggtcaatgctatggcctgaatgtttgtgctctcccaaaatttatatgttgaaatcctgaccaccaaggcgatggcatgaagagatggggtctctgggaggtaattaggtcatgaggtcagagacctcatctatgggattagagcccttaagagaagacaccctgagagctcattccccgcttctgcctggtaaagacacagagagatgttggccatctgcaacccaaaagaaggttctcaccagaaatgaccatgctgatatcctgaccttggacttccaagcttcagaactgtgagaaatacgtttctattgtttataaatcgcccagtctatggtgatttgttatagcagcccaaatggactaagaagtcagtctttctatctgtgggaagcagagtccatattgatgctgaggcactgagagtggacaaatcagaatcaagttaatttgtgagtagacagagtcctccaaattctacttggatgctcaggaaattttgatgtttgtcaggcacatatggacataactccatatgtggatatgatgccaagtctgctgatatggaccagagcctgtgggaatttgcattctcttcttggtggtccaggaagaccacctagaaaaaatatattctgatcatccaggattaccatcaatattaatcattgtttcattcaataaatgttgagttactactatatgccaaccatcattgtatacactgggaacatgatggtgaattaaacagaataaattctgttcttcacatggatcacattccagtcagaaaatatagaaagtaaataaatacatagatagatatattatagatactgaaacagagtaatattacacagaccacagcctctgacaacaatacaataaaattcaataatgaaaagaaaaccagagaaactttatctgtttggaaattttgaatttataaatattataaattcatgaatccaggaagaaactgcaaaggagagtagaaaacatttaaaacttattgacaatgaaaaacactacctaccaggacctgcagagtgggattaaagcaaatacatatatatattataatataatgtgtatatataatatacacacatatatataaaatgtataaaatttaatgaactaagcatccaacataccccaaaatgatattaggaataaaaaggaagccataaatacagatatagcaacattagacattaataagaatatgctataaaaattaggccaataaatttgaagatttaaatgaaatgcgtagggcatgatggcgcacacgtggaatccgaacactttgggaagtcgagacaggaggatggcttaaagccaggagtttgagaccaccctgagcaacaaagcgagactttgtctctacaaaaactttaaatattagccaggtacagtggtgcacacctgtagtctcagctattcgggaggctgaggcaggagaatcacttgagcccaagatttagaggctgcagtgagctatgattgcaccattgcactataggctcagcaagacagtgagatcctgtctctaaaaaagaaaaaaagaaaagaaaacttaaatggacaaactgctagaaaaatataacttgccaaaagcaagtcaagaagaaaaaaataaaatcaagtagattaatgacattaaagaaattgaataagtagctaaaacatacccacagaaagaaaaacgttagacggttttgcagatgaatgctacccaacttctgaaacttatcatacctttcttatataaattttagggactgcaataatagtaataatagctaaaactaaaaggttggttgctatgttatgaagactgttctaattgttttacttattttaactgtttaatcctcaaaatatacgtttgatgttggtattttcgttttcctcattttcaaattaagaaactgaggcgggggaattcatgtggaggtcaacgtggaagcaggtgtgagggggtccagcagaagaaaacatggctgccaaagtgtttgagttcatcagcaagtttggcctggccttagctgttgcaggaggcctggtgaaatgaactctgccttatagaatgtggatgctgggcacagagctgtcatctttgacctattccgtggagtacaggacattgtggtaggggaaaggactcactttctcattccatgggtacagaaaccaattatctttgactgcccttctcgaccacgtaatgtgccagccatcactggtagcaaagatttacagaatgtcaacatcacactgctcatcctcttctggcctgtcactagccagtttccttgcatcttcaccagcatcagagaggactatgatgagcaggtgctgccatccgtcacgaccaagatcctcaagtccgtggtggctagctttgatgctggagaactaatcacccagagagagctggtctccaggtaggtgagcaatgaccttacttacagagcgagcagccacctttgggctcatcctggatgacgtgtccttgacacatctgaccttcgggaaggagttcacagaagcggtggaagccaaacaggtagctcagcaggaagcagagggccagatttgtggtggaaaaggctgagcagcagaaaaaggtggccatcatctctgctgagggctactccaaggcagctgagctgattgccaactcactggccaccgcaagggaccgcctgatggagctctgcaagctggaagctgcggaggacatcgcgtaccagctctcacgctctcggaacatcacctatccgccggctgggcagtccgtgctcctccagctgccccagtgagggcccatcctgcctgcaccgccgtgggctgactggggcacagctccgatgattcttaacaccgccttccttccgcccccaccccagaaatcacgtgaaattccatgactggcttaaagt

SEQ ID NO: 6873 - DNA, 6000 bp, Homo sapiens; identical to SEQ ID NO: 3271

SEQ ID NO: 6874 - DNA, 6000 bp, Homo sapiens
tagatgatgatgtctggagggcttctgggtctgtgaacacatctgcatgccaagagggtaatgcaccccagataccacggggacagatgatcctgtgctcaggaccttctgcaccttctaccacttcatctggtgtttgcttatatcctttaaaacaaactggtaatagtaagtaaagtgtctcccaagttctgtgagctgttataacaaagtattgacaccaaggaattattatagccaagtcagagagaattgtgggtagcctggggatctactacttacaattggtgtcggaagccgggggtagtcttgtgggactgagtctgaacctataggatctgttttaactccaggtcattactggaagaattgcaacaaactgtatatacccagttggtgtctcaaattcaagaactgcttggtatggaaaatccacacatttggtgtcagaagtgttgttagtagagaaacagtatagctgtagagtcccaatatcttgtaagcttctagaagctatgctgtccaacatggtaggcactagctacatgtgactgactaaattaaattacaattaattatattaaattaaataaaaaattaagctcttcagtcacaatggccacatttcatgaaatcaatagccacatgtcactagtgggtactgtattgctcaagagtaatatggaacatttgtatgctcataaaaagttctattgggcaatattgttctagagggaggttacatctttaccatctccaagtgccctacacaaacaaatacagccctccttatgattaaagaacctaatcagcaaaataaaagtctgaacctatcagtatgtaatcaggacctagagaatgggtacagttagggatgtaagttctctactgataaagtgacaaagccatctggtgttaattcagagaagatgactatcccttctcaatatctgaaactgctggcagtaatctgaacctacacaaatagaaatcaatgtggtcactctttttgcactattatcttgaagtcctgaatattattctgagctcctatataaaaaataggtaaaattgaagcaaaacacattttaaccacttgatacagatctaaaaggataaggttttatcagtttaataaagtgactcctgcagttgacaaggtggtgtttgtcatttgtcttcaagacatgcaagaacccagcaggacaatttatattcaatcactatgtcaggggaaaagcaactactaaatgattaaagttgctcaaatgggggattacataagtacattttgagttttaaagccattaaaagacaagtaatttaaaatttcagaaaaaaataaggtccaaagtataagctttgaagattaatggggcatgctgtatgtcaattacaaacaaaaagttctcttgaaagcagtcaaaaacaagaggatgctaattagtattttgtatgattctggcatctggcaaataaaaataaagataataattaaagcaaaagtttctagactaaaataaatctagaataatgcctcttccactcgtattttgcttagatttttcctgaaaacttttattattgtgaataaacagtttatcatttgggaagaggtaattgagtattttgtcatccatttttaacttatagccttaaaacattcatttagagaaaaaaatcttctcataagggaatcctggaaaaataaattttataaaagttaatgatttctcattaattagaaactagcatttaaaaaaaattttcagtagatagatacagcaacatttatagcctattataaagcaaatgtctgccctccaaactaattgcagattgaatcaactctgaaaaactctgaatgcctctctgtaggcagaattataaaagacagtaaataagagaataggtatctgcacactgagaggtaaaacatagctgacattaataagcaggcattaagataagtgtcaagacaataaaacccagaaaacagactgctctaaattctttaaataaatcaagaataagtctttgtattcactcaaattcataatcaatttaaaatatctcttttagctagtatttttagaaaatacatcaggaagcatgttttatgatgagaaatcaatagaagtggagaagggagactttctaggtcatgattttacttcaaaagacaacatgaggctagaggtcaaacagtgaatgaacactactaatgtgctttgcttcagtttcaagggaagaccaacacagaaatatttcacatttcaagatatgtttatatttcctcttgcaacagtattgtaaaggaaatggccaagacaggaggaaaagaacggcaagcagcaacaagatgtgaaggtatggtgagaggctttgagctgggtgcatgcttcaatctccctgagtcagtccctcacactcatatgcactagaataatatactccttacatttcatatttacattaatggtctatatcatagctacataggaaagaaataataatcccttgtaatttaaagaatgtaagatagcttaactgggccagacatggtggctcatgcctgtaatcctagcactttgggaggctgaggtggaaggattgcttgagcccaggagtttgagaccagcttgggcaatatagtgagaccctgtctctatttttaaaattaaaaaacaaaaacaaccttaggtcacactcaaactgtatcaaaagaaaacatattacaattgtgatgactggttaataaggttgagtaagaaatgccattataaagtcaaaacacctttgtaaagtcaaatctcagtagaaaaggccactaacaattggctaatggccaggtgctaatggtctacatcatagctacataggaaaaaaaaaatgataatcctttataatttaaggaatttaaagtagcttaagttggccaggcatggtggctcacgcctgtaacccttgcactttgggaggcttaggtggaaggattgcttgagcccaggagttcaagaccagcttggggaaacatggagaaaccctgtctctacaaaaaatacaaaaattagctgggtgtgttggtgcatgcctgtagccccagctacttgggaggctgaggtgggagggttgattgagcctgggaggtcaaggctgcagtgagctgtgattacaccactgcattcaagcctgggtgacccagagagaccttgtctcaaaaaaccagccaaacaacaataaaaaaaccaactggctaaccgtgccacaaggaaaaaaccttaatccaagcttgtcaaccagcagagcatgacagctttgaatgcagtcaagcacagattcgtaaactttcttaaaacattatgagatttgttttgcaattttgttctttttttagctcatcagctatggttggtgttagtgtattttatgtgtggcccaaaacaattcttctccttcccatatggcccagggaagccaaaagattggaaacccctgccttaaactaatacattattagacttccttctgataattctactttgtcagcttgtttggcaaacccatgaaagtcatgattttgattttcacaatgtgtcctagagagaaaagttgaattcataaagacattatgcattcatgaaatgatacaaatgaaacaaacaataacatctcacacttaggaaaaaattaactttaatcacaattatttcaacataacatatgacatactagtttaattccagtatgtcaatctgtgacatactactttatttcaagcatctgaaaaacctttgcaatattgatttgtacaaatctcaatagacaaattaaaggtttttcatatgtctctattatcagcttatgaataaatatactttttctctataacattttcttgttgccatattctagtagcagaatattaatgatttttttttattttgacttgaattacaggcctgaagaagaagacttgttatcactctttttattattttttttctttcttttcttttttttttgaggcggagtctcactctgttgcccaggctggtctcgaactcctgacctcattacctgcctgcctcagcctcccaaagtgctgggattacaggcgtgagccatcatgcccagcttattattttctcttttttcttttttcttttttttttttttttttgagacagtttcccctctgttgcccatgctgggaagcaatgagatctcagctcactgcaacctctccctcccaggttcaagtgattttgtgcctcagcttcctgagcaggtgggactatgggtgcgcaccaccaaatctggctaatttttgtatttttggtagagacggagtttcaccatgttggccaggctgctctcgaactcctggcctcaagcgatccacccgtctctgcctctcaaagtgctgtgattttaggcgtgagccaccatgcctggcctattattttcaagtgcaaattaaaacaatatgtttgtatgataaaaaataaacaaaatattaagtgatcaaaactgcctgcaaagttacttgtgtgcatctctgctaaaatacagaagttggaaacgcatctgaaacacggggtctagaagggaaagggaatactactaatgataacgacacaaatatttactgtatgttcacccggtaccagcccttgtgctatgtgctctctctcatccaagtactgaccaggcctgaccctacttagcttctgggatcagacgagatagggcgttcagggtggtatgggggcagacaccatgttctctatacattctctgcccttccccacccccacccactctgacttccgtggccgccctcctcctgtatcaaccaacaccttttctggggtctgatgagtgtgtgggcattgggcaccttaatccggcattcggttcatcccgcagagccaggtctgcttaccagaagcggcccactaggcactcacattccatacccggctccacacgccagcaagccgggcttcttacccaactaaagtgtgagagtaggtggagatcctttgggtcgtaaaacctccaatcattcactttacagatgaaaccatgtggggtgggttttggaagagtgccagccatcctgagagaaaccttggagggaaccagacactagatggttccatcagtctttcacccctatacccaggttggatgaccaatcgatttacacatcaggactgctagggacttccactagtttcctccagctttgccctgaccaggcacagttcatcatctttcaggtcctaacacgtgccctggtgctccacctctggggcaccgccctgggtgagatgggccagtggtgcaccctcaggggactggagaggcctcgggatcccacctcagccagggagtgcgctggccttcaccttcactgcgccaaggcggctttcttgcaaaacactgactcactcacatgagttatttcttaatccttacaaaacctaataagggcagtattactggtatccatatttaacagaggaaaaaaacggggcacatggaaattaaataatttgtccaacatcacacagttggaagcagactggaaaccagtacattcatttatgcagattgtcctgaaaagagttaatatagtaggcctgagactgctaaccacagaaagaattgtttgtaaggttgccccttggctgatatgtggacactcagatcatgaaagggtttccactattctctcacaagaggggctaaacctaaatgtaaacctaaagtgtttacattaacaatatggttgatactacacacctggtttccttctggatgtctggaactttggtgagtgctagacagaggatacccacatgaccaaccactaacaaaaaccctgagcaataaaaatctcaagcttctattgaacttccctgacagacattttacatatgttacaattagtcacaatcagttgctgggggaatgaagtgcatctgtgtg

SEQ ID NO: 6875 - DNA, 6000 bp, Homo sapiens
aattgtctatcatggtcaaagtacataatataaatgtaccttttaaatcatttttaagtgtccaatttggaggcattaagcacatttacaatgttgtgtcaacactactatttccagaacctttttatcaccccaaagagaaactctgccactgttaaacaacagctgcccacttccccctctggcctggtaaccaccctctgctgtctgtctccatagacatttcacgtacacagagccacatggtgtcttccttctgtgcctggctcccttccctccacgtcccccagccccgtgctggcgcggtggctcacacctgtgatcccagcaccttgggaggccaaggcaggaggatcgcttgagcctgggagtttgagaccagcgtgggcaatatagcaagaccccatctctatgggaaaaaaaattggctgggtgtggcagtgcatgcctgtagttccagttacttgggaggctgaggtgggaggcttccttgagcctgaggtccaggttacagggagccatgattgcaccactgcaatctagcctggtagcctgggtgacagagcgggaccctgtctcacacacacacacacaagttcatccctgttgtagcgtacatcagagtttcatttctttttatggacaaataatatcagattgtatgaacagaccacattttgtttctacactccattaacagactctggggttgctgcctcttgaaattattatttattttattactttttttgagacagggtcttgctctttcacccaggcaggagtgcagtggcatgatctcagctcactgcaatctccacctcctgggatcaagcgattctcccgcctcagcctcccgagtagctggaaccacaggcatgcgctaccatgcccggctaatttttgtatttttagtagagacagggtttcaccatgttggccaggctggtcttgaacccctgacctcaagtgatccacccacctcagcctcccaaagtgctggtgttgcaggtgtgagccacagtgcccggccaaaattattattatttttgagacagggtcttggcctgttgtccaggccggagtgcagtggcgccatcactactcactgcagcctccacctcctgggctctagagatcctcccacctcagcctcctaagtagccgggaccacaggcaggcaccaccacatctggctaattttttttttttttgaggcggagtctcgctctgtcacccaggctggagtgtaatggcatggtcttggctcactgcaacctctgcctcccgggttcaagcgattctgcctcagcttcccgagtagctgggattacaggtgcctgctgccacgcctggctaatttttgtattttagtagagacagggtttcaccatgttggccaggctggtctcgaactcctgaccctgtgatccacccgcctcagcctcccaaagtgctgggattacaggcatgaggcaccatgcctgcctggcatgcctggctaatttttattttttgtatagatggggtcttgctgtgttgtccaggctggtctccaactcctggccacaagccattctcctgccttaggcccccaaagtgttgggattacagacgtgagccaccacacccagcctgaaattaatttttaagtatagacaagtaatggtgactatgttatcattggggaaaaagttacaacctgcatgataaagcttaaagtccctgtgacccctcttgccctggcttttcctctctcccaaggggacctgaccattgttgctctcccaagactaagtcactggccgggcatggtggctcacacctgtaatcccagcagtttgggaggtcaaggcaggcggatcatttgaggtcaggagttcaagacctggccaacattttgaaatcccatctctactaaaaatacaaaagttggccaggtgtggtggcacacgcctgtgatcccagctacttgggaggttgaggcaggagaatcactagaactcaggaggcggagggtgcagtgagccgagattgctccactgcactccagcctggacaacagtggcagactttgtctcaagaaaatacaataaaataaaaaataaatcactgttttaaacagtgacaaaaataaaaagcaacagcaagttgagaaagggctcccagctgtgggtcagtgggacaggagtgactttggacttggaatctggaaagctgggtgcaaaggccggtctattcctttggcaaatggttatcccgctctggcccttagcgtcctcttctgcaacaggggttgagttagaacacggtccaaattcctgaacgggcagtgaactgggcacaggtgggctcccctgcccttgcccgccccacctctccctggctggcaagcagagatctttttcagagtatttgtctccattttgctaattttattttgtgaataagtgaattatgtatgaagcaaaatattaaaacagcaccaaagggtataggtgaagaccaggtctccctcccaccccaagtgggtgagcgtggccctgagtgtagctgcttgcttttcccaattgttagcactgtaacttagcaattgttcctccttgataacagagcaattgcgggattctctctaaccgctgctacagagtgccattgtatcttagcttcatgttgatacaaaacacctagccggattctgttttttacctgctgtgtagcactccactgtgagacacgctatcatttatttgacaagcttctgtgggcagagtttttctgctttttgctgcttgaacaattctaggacacatacatcctctacctttgcaagtccatctgcagggcaagctcccagacttccccacctctgcagcaacttttcaaagcctgaccagagggtgagacttgcagagaaagtaaatcagccttttttttttttcttctttgagatggagtctcattctgttgcccaggctggagtgcagtggggtgatctcggctcactgcaagctccgcctcccgggttcacgccattctcctgcctcagccttccgagtagctgggactacaggcgcccgccaccgcgcccggctaattttttgtatttttagtagagatggggtttcaccgtgttagccaggatggtctccatctgctgacctcgtgatccacccgcctcggcctccaaaagtgctgggattacaggcgtgagccaccgcacccggcctatatcagcctttaaacactagacttcccatgaaaatctccatttctgggtggtttttttttttttaatggagtttcgttcttgtcactcaggctggagtgcaatggcatgatctcggctcacggcaacctctgcctcccaggttcaagcgattttcctgcctcggcctcctgagtagttgggaatacaggcgcctgccatcacgcccggctaatttttgtatatttatttatttatttatttatttatttatttatttattgagacggagtctggctctgtcgcccaggctggagtgcagtggcgctatctcggctcactgcaagctccgcctcctgggttgatgccattctcctgcctcagcctcccgagtagttgggactacaggagcccgccaccacgcccggctaattttttatgtttttagtagagatgggttttcaccgtgttagccaggatggtctcgatctcctgacctggtgatccacccgcctcggcctcccaaagtgctgggattacaggcgtgagccaccgcgcccggcctaatttttgtatttttagtagagacggggtttcaccatgttggccaggctggtctcgaactcctgacgtcaagtgatcccccgaccccctacccccttgcctcagccccgcaaagtgctgggattacaggcctgagccactgccccgccatcttttttttttttttttttttttgagctggagggtgtgggcttgtgctgggctctcatgagttgccagtgccttgaggctcagtggccacagtccccccagccccactccctgccttacgcagctgagtttgagagccatgaactgagcccaattaaacggtgtagagccctttgccctctttctgtgcccatctcaagggcagacgaaggccaaactgacgtggcctgggtgagggtcccgaacaccctggactcagaccctacctctccgtggcagggcgccgcggcagcaggtgcacaggccgtggctctcactctcaccgtctcacgccagagcgacccgggcaaagccgcgcgcggtggccggcgtggctgggagcagcccccgagcccccgtcagaccaacgcggatcgcggcactgctgcgacccgagcatcccgcgtgctccctccgggaccactaggcccggccgccgcgggaactccgagcctccccacggtccccagggggcgctgcgtgctcgcgcctcggggagcaaagcgaaagtcgctcgggcacgcggggtgcagttgcgcgtggggcgctgcctgggggagccagaggccccgggaccccttatgtagcgcccgggccccagccgcagcccacccagcgagaagcgcccctgcccaccgccgcgcacgctcggagccgcggggccaagactgcgggaggggaggggtccgctccgggccagcgccagtcgggggtctccaggccccaacgcaccagggcgggccggaggcgggacgggccgcgcgggacagcggagggggtgcctgggcgcgccgggccgtcggggaagcgcggaggcgggcacgccggggagggcgggagggggccgagcttataaaggcccgcgggcggaggagggcgggagccgccgtccggcccagctcggccccagtgagccgagcgctgcgctccgccgaggggcagggcggtcgcctgagcgagcgcgggcccgggacgtcggcaccggcggggcggccgaaggagaaggaggaagaggagaaggcggcgcgcgggtccccgcgggtcagccatggcgcgccggccccggggcccccgcaccgccccatagcgccgcggcgtccgctcggtctgggccgggccctgggccctccagccatggagccgcacgtgctcggcgcggtcctgtactggctgctgctgccctgcgcgctgctggctggtgagtggggggcgggcgcctgggggcgacgggagggggctgcgtctcggctccccacggcctggacaccggacgacgccggccggggcgagggctgcgggcgagcgggcgcggaaattcccagggacgcgcgacccgggcgcccgcattcctgaagcatgagcgcgccaggcggcggcggggctcctgtcccagggccgggctggaagggcggcggcggctgggggagacggcaccgcgtgcccacgggggcggtcgagcgagcgccgggcatagcgcggctggcgtctccgccggggcgctgcggagaggaggccgccgggcgaggcggtgtttgccccggtgggaagggccgcggcggtggtggggggagcacgaatctctttttctctttcgggtttaaaaaaaaaagcgcaaagttgcatcaggacttcctgacaatctgggagaaggcgggcttcctgcctggagctgtttaatttggagcttcccgagcccaacgaacgtccgtgcccagggcccagccccgctcaccgctgcacccccctctgccggactgaggcggtcccacactttggaaaaaaatagtgtgggttcctccctggtcctcccttgccctactgggctcagtttcgcaggggcgggggccggcctctgccctggtctgggggaggggacacccccggaggctgtggcctggtgtcagggcggggcaggggtccccagtcctggcatctgtgttccctgcttgccgggcagtggtgcccctttcgcgaagcacacccgggtggcttggtgctgcacggcctggcacccctacccttccccgaccctggcctag

SEQ ID NO: 6876 - DNA, 6000 bp, Homo sapiens
ctttaagactaaaggagcagcagtagagtatgagtggtgggaaggcctcccctagtgtatggaaagagcattggaatcagaattggggactaattctgatccaatctctggtgacattatatttgctttgttaatcctatgagattgttctgagaaccaagtgagataagaaagatgtgagttctttgaaagctctcagatcatcagctactaaggtcggcttgagcttggccaatctccatttgaattcccatctagtcccaagactagatccaaatggtaaaaagagaagaacactgtgtgacttgggtaaatcgcttctagtctctgagcctcagttttcttatttgtaaaatggagataataatctctacgccacctaacttgttaggctacttaggagggttaactgagaattaatatgacactgccttgtaaattataagggtctgtgcaaatgctatggatttatttttaattaatttatttatttttaagaaagagtcttgtgctgttgcccaggctgtagtgcagtggcgtaatcttggctcactgcaacttccacctcccaggttcaagagattcttgtgcctcagcctcttgagtaactgggattacaggcacctgccaccccacctggctaatttttgtatttttagtagaaacagagtttcaccatgttgcccaggctggtctcaaaatctcggcctgaagtgatccacctgccttggcctcccaaagtgctgggattacaggcatgagccactgtgcctggcctagatttgttttttaatctgtgtttgagggctctggatgaaatttgccaaggctgttgcacatctagacagtgacatcatatacatgttattgaggtccagggtggggcacagaagacaggcccagagtcatgggggcagggaagaacacagaagggaaccccacccactgtctgcctggagaagacctgattctgttgtcactcatttgtctgacttgaggaaatttggtctcctcgtttccaaactgccacagactgcagtgacctctgtgatcagggggtactttgattaaagctctacagtaagggtcactctagtttttttctctgtctccagggttgagcttggtgcatggacacaacagatattcaggataagtttgttgttgaacaaatacaagtaatgcatttgtgagacctcattctcacttcctttgttttacaaagtcagttgcacatcagcctaaaaacccaggacataattcacagaaatggagcttgaaagcatgactagccagtattaatcaaaggccaagcggctgagcgggcgtggtggacaagcctgtaatcccagcactttggaaggtcgaggcgggtggattgcctgagctcaggagttcacgagcagcctgggcaacaaggtgaaaccccgtccctactaaaatacaaaaaagtagccggacaaggcggcatgcacctgtagtcccagctactcgggagactgagacgggagaattccttgaacccgggaggcagaggttgcagtgagccaagatcacgccactgtactccagcctgggcgacagagtgagactctgcctcaaaaaaaaaaagaaaaagaaaatgaaaaaaaaaaaaggccaagcttcggaaatggcatgttaccatccaggcgctttgtgaatcctgggaagccatgaagccagagtctgaggggaaaggctctctgtctgcctgtggccaggcagtttttgaaccccttcattggtcctgctggtcataggagctgaaagaaaatggctgaatcagcaaatatttattgtgtgcttgctctgtgttgaatgctttggagaagaagaagaaggtgaagtcatagaggagcagggaattcccgccgacaggcagtgtttgcccagggccaagggagtgggagatacccagcaacagaggacggtacccactggggctaggaaggctttctagacggggaggagatgtgtgaagaagacaaagttagtcatggagactcccctctgccgccgaaatgtcttcttttggtaactggccccagttaggagactgtattagttttctgttgctgcgtaacaaatgaccacacaatgtggcagcataaaccagcatccatttatcatctcacagttccataggtcagaagtccaggcaggctctaccaggccccccgctcaggacctggaaaggctgaaatcaaggtgtgagggggccaggcactcatccagaagttccaggaaagaacccacttccaagctcatggaggtgggggcgattccatcctttcagctgtaggttgaggcccccgtttccctgctggctgtctgctgggtgctgctctccactcctagaggccactctctggtcctttccttgtggcccctccatttccaatctagcaacagtgcatcaaatccccctcctattttaagtacctgacttgctcttctgttaccacctggagaaaacagtctgttttttgaaaagaaaatttcggctgggcatggtagctcacgcctgtaatcccagcactttgggaggctgaggtgggtggatcacctgaggtcaggagtttgagaccagtcttgtcaacatggcgaaaccccgtctctactaaaaatacaaaaattagccaggcgtggtggtgtgcaactgtagtcccacctactcgggaggctgaggcaggagaattgcttgaacccgggaggtgacggttgcagtgagtcgagatctcactactacactccagcctgagcgagagtgagactccgtctcaaaaaaaaaaaaaaaaaaaaaagtggaatccaagatgatcagcaagtctagaggatggggaagaagatggcaggatcattaatagaaatatagtcatgcatcgcttaatgatgggaatacgtatgttctaagaaatgcatccttaggtgatttaatcattgtacaagcatcacaaagtgttcttacacaaacctagatggcacagcctactacacaccgatgctatatggcaagcaatacaaacctgtacagcaggctacggtgctgagtactgtaggcaattgtaatgtaatggtatgtatttgtgtatctgaacacatctaaacatagaaaaggtacggtaaagatactgtattataagcttatagagccactgttgcaggctgggcgtggtggcttatgcctgtaatcccagcactttgggaggctgggatgggcagattgcttgagtccaggagtttgagaccagcctgggcaacatagtgagacccctgtctctacaaaaatacacaaattagctgggcatggtgatgcatgcctatagtcttagctactcgggagatcgaggtgggaggattgcttgagccttgggaggtcgaggctgcattgaactgagagtgtgccacactgcattcccactccagcctgggtgacagagtgagaccctgtctcaggaaaaaaaaaacaccgttgcatacgcagttcatcattgactaaaacatcagtatgcagtgcatgactgtaaatcccagggctaattccgtggtgacaggaagggcaccaagtttctgtgtggatttcaaatattctgtatcctcaggctttgttaatccatgtcttttgtcttcagagaagtcagttccatcagcaaggagccgtcagggccacccagctttatgccttgactcctggttactgttttgaggcctaagaacagctgagaccctgcacgtgttaaaatccaaatggggtgagggtgagggggtcagaatcaccaccagccaatgtcagcatctggagctgaatacagagacccctcttggccaaatgttccgggcagcatccatgtgcaggtcgggttgactttttggacgctgcctaggagctcacgcagacggtcacactgcaatgtcggtggggctgtgagcagtcatggcacctccgcagctgttcctgggcctatctgctgcaaattagatcattggtcattcatatttttccttccctatctctctttacccattctgtttccaacaggtgatgataataaaggtggtttcatggaaaatatgggatctctgtaaagacaagaccccgatctgcgagtgtggcttgctaagttgggtaatttatctgttgacacgcttctcagtcactttttcaccttggtttctccagatggctggggcttgatcactcagaggaggagggaacttctttgtggttctgttcttgcccatctcaacacaacagtcgacatcagacacataatcaagagcttcagcaggagggatggccaagttggatgctttccatcagggccattccagctgtgattctctgtgctgtgggaatctggttgagagggacatcagagagatgacagcgaggaaggaaccttttatactaggtgttaagggatggctgggactggattaagtagacaggagaagggaagatcttccaggcttggtgagagctgagcaaagccatttgggtttgaatcagcatggtttatttacggagtgtgaggcggctggcttggaccatgggaggtgttgcttcttaatctaagaaaatgggccaggcgcggtggctcaggcctgtaatcccagcactttgggaggccgaagcgggtagatcagttgaggtcaggagttccagaccagcctgaccaacatggtgaaaccccatatctactaagaatacaaaaattagctgggtgtggtggtgcatgcctgcattcccagctacttgggaggctgaggcaggagaattgcttgaacccgggaggcagaggttgtggtgcactgatatcacgccactgcgctccagccttggcagcagagcgagactgtgtctcaaaaaaaaataataattttaaaaaaaagaaaaaaaagaaaatgactccctgccctccactcttccttctcccttatattaaagcttaggatttctgaacttttgccccttcctaggggtccagatgaattgtagggaaccaccctttctggcttggcgtcaacctcaagggcacatctgtgggatgctgttttccctttaagtttactccttgcctcccagtcaatgtcctttcccttgcccttacctgtttgctttaaaaagcactatttttttttgttgttgttcaagcgattctcctgcctcctgagtagatgaggattacaggcgtgtgccaccacacctggctaattttaatattttagtagagacggggtttcaccatgttggccaggctggtctcgaactcctgacctcaggtgatccgcttgccttgccctcccaaagtgctgggattacaaatgtgagccactgggcccagccaattaaaaagcactatttttaaccaaggagctttacttgctttgttttcgtttttgtagacagatgcagcattaaagatgaatgcatttgaatgccatcactgtcatagttcaacatttgacctctctttggcaaccaaactatattttatatattttgttgttgcacattttctagaggagcataggaggatggggctcatttttggtcctcatggcttggagagctttcctcttcatgctggtgggccacacttgtctggagattctttcctcttctttgaatctggactacaataggacaaattaacttcagtggtcatacaagtcatgaagaaatgaatttaatagtgtatcagttaggattctcttatgacatgtaccccaatgatctggaagtagtttaagccaaagagaataatttatttaaaagattcagggacatatgagatctaaggccgggaatacaactgtgtctcaggaagggactttaagtaggaagaggaaagccatcaagaagccaggcatcccctcagtgtgcttgctgcgacgtgcactctgtgcagagtggctgtccctgcttccagaccacccagaaggcaagaaagggccagcctgagacccccagtttgt

SEQ ID NO: 6877 - DNA, 6000 bp, Homo sapiens
gacacctttcaacgctgccttcttggcctttaaagccttcgctttggcttcggcttcaggagaggcaggagcttccttctttgctttcagcgccatcttgtgaaaaggccaattttttttttttttttttttggtttttttttttttgtagagactgggtttcaccatgttgcccaggctgggaaaatgaccctttttttatgaaagaataataatgcatgatagttgagcctaaaaaagccccaaaactctggggaaactatttctgtctgtgaaactctgatgtctgggcacctgtggtgtggttcatgctgacaggttagggcactgggtcagaaagacagggttacggtctgcactcctcctgcctgaccacagagtgagagagacccatctcctgccctcaggaaactcggggcggagtgggaagacagggtctcccatgtctaccaggtggccatgaacagacagagggaaactcctttcaacctgcagagcctgggagagtgtccacagagagagaggggtcctcacacagtcttgcacacaggaagcatttgcaggaggtgcacagggtggttatttggagaaaattggattacggctttttttttttgcttttatttaacttttgatatttttatccaagacaactataataatgcttattgctgctgggcgaagagcacaccgactgtggaaagctgctcccacacccagcaaccctcccctccggccaggctgcaggcagctggagtctaccctcacccaggctcactagagggggacctggggagggggcttgagggtcttcctgtttgtttggaaatacgatgcgtccctgttatccagcaactggatttttcactttactgacattccttctgaagacacatttatagacccatctaaaagttgcataaatattcagagtaggccgggcgcggtggctcacgcctgtaatcccagcactttgagaggctgagatgggcagatcacgaggtcaggaaatcgagaccatcctggctaacatggtgaaaccccgtctctactaaaaatacaaaaaattagccgggtgtgttggcaggcgcctgtagtcccagctactcgggaggctgaggcaggagaatggcgtgaacctgggaggcggagcttgcagtgagccaggatcgcgccactgcactccagcctgggcgacagagcgagattccatctcaaaaaaaaaaaaaaaaaaaaaaaatcagagtaggccgggcgctgtggctcatgcctgtaatcccagcattttgggaggccgaggcgggcggatcatgaggtcaggagatcgagaccatcctggctaacagggtgaaatcccatctctactaaaaacaaaaaaaattagccaggaatggtagcgggcgcctgtagtcccagcaactcgggaggctgaggcaggagaatggcgtgaacccgggaggtggagcttgcgtgagccgagatcgcatcactgcactccagcctgggcgacagtgaggctccgtctcaaaaaaaaaaaaaaaaaaaaaatcagagtatattatagcatgatttatttacccattgccctcatggagcgcccaggtttttccaaatacaagcagttctgctgcaaacatccttgtgtgtctgtctctaggccttagtgttctccattacattttttttttttttgagatggagacttgctctggttgcccaggctggagtgcagtggcctgatccctgctcactgcaagctccacctcccgggttcaagtgattctcctgcctcagcctcctgagtagctgggattacaggctcatgtcaccatgcctggctaatttttatatttttagtagagacaaaaataattcgccatgttggccaggctgatcttaaactcctgacctcaggtgacccgcccaccttagcctcccaaagtgctgggattataggcattagccaccgcgtacggcctctccgttactttttttttttttttgagatggagtctcgctctgtcgcccaggctggagtgcagtggcgcaatcttggctcactgcaacctccacctcctgggttcacgccattctcctgcctcagcctctggagtagctgggactacaggcacctgccaccacgcccggctaactttttatatttttagtagagaaggggtttcaccatgttagcccaggatggtctcgatctcctgacctcgtgatccgccggcctcagcctcccaaagtactgggattacaggcgtgagacaccgcgcccggccctctccattacattttaatgttggcacaataattttcagaaggttgagggggttcacatgcctgccagcaaagtgtgagcatctgttgtggcaagggctgcgtggctgttttttgacaaagtggcttgttttgtttccctgaccagtagcctgactgagctgtgtttcctgttacagaagagtctctccattgccaacactctgtgacttagcagacgtctctggacttccgtctggggattcttacccaccttcaagttcaccagccctcagctggagcactggaagtgggggctctgccgcttctctccctctccggtgggtgacttggggcacaggaacctcagactaaggtgactcactcaggggagggcagtgggaggaggggggcttgggcccagcctggagcagggactgggtctggagcagtcctgggtgctggtgctgaccttggttgctgggtgcagtccggcacagcacactcaaatcacggctcagcaaaatctgcaatctgacctccgtgcctttaaaatgagaacccctgggagcccccctttcccctcagtcggggctgaggacggcccagctgggattcccgggaaacaaagggtctctttaaggctcagccggggcttccttcctccccggccaacaccctccacctccgctgctctggccttcaggggtctgggctcgtggagtcagcttcccctcccccgctccgtaaaccctcaccacccgctgcggcgttcaaaaggtacaaacaggtatggtccctgcggccatccccatccccaccccgcctctcctcctccaaggtcaaccagtgtagccggtgctggatcattccagacattcgatgcctttgacacacacaaaggaaacgtgtttttctcccttttctacacaaatggtagagctttgaacacaccgttcttcctgttcctttcttgcagctactgctgcacctggtggaccatttccaagcagcacagcgcttcctgtctttcctgtctcggccacgctctgtctcgtttagaccccgtatgaatgatttgaatgtcccaccggccagtgacacgcatgtaggcggtgccacattgactcactggacgcatgcagtgtgccacttccgtgaacgtacctggagggaaaaacgcagaggtggaattcccgagggaaggtcattgctgctgttacttcagtggacaagtcgggggggttcccacgaggctcccacatcctctgcctgctgcaagcagtgtctgtgggccacagtctcacctgttagtacagtttttatttgccaatgtgttaggtgaaaggaaaaagaagtcactttaatggggttttcctttaattttttttttttttaaactttttaccctcacatcctgggaaggacactttagtgttttgttttttgtttttgtttttgtttttgtgtttttgttttttgagacggagtctcgctctgtcgcccaggctggagtgcggtggcgcgatctcggctcactgcaacctccgcttcccgggttcaggcgattctctggcctcagcctccggagtagctggagtagtttttaatttgcatttctgcgctgagggaggaggatcagcgtatccctggcagctgtccttcagtattttctaggggagcgtttctgtgattgatttagagctgtttattactgcactgttactagtcttattaaggtgagctctgcggtgtgagctgcaagctgtgtcccccacctcccagtcgggggctcgtcttttggacttcgcttatgcagtttggctttgcagacgcccccacccccctcccacccacgacgcggcggaacttctggactctgtgccacgcttggaaaagccgacttggccctaagacggaaaaagcttccccgagttttctaggctttatcgcttccttttttcggctcaaatcttacatggtgggaatccatccaggtgcaaagcgccgggagttgatgccacgcacccgtgtgaaccgccaccccgatcgggtactacagtccctaaacacaagcagccttctcgtctgtgcataaaagcgtggatctgacacgcacctgcagcggctctgcggcgtgaaggccggcccgggggtccccgtgctgaggcgcctgactcaggcccacgcgcgccgggcggggcagggcagggcgcgggttcctctcggtcccaggcggaggtcggcgcctctgccccccgcgggctccccgagcctgccacggaggtcccggccgagcggagctgggactcagcgaaccggcggggaagccccgcggagcccacgcctcggggagaatttcctgcgtgttccgagcgcgcccggcgcgacctctccgtcctgggacccccgcgatccctccatcccgcgccctccctccagcgtccccccggaccgcgcgcgccccggtccgtcccccgcgcgccccacgtgacccctcccccctaccggcgccccacgtgacccctccccccggcgtccgcgccccccccggtcccgccccccgaccccgccctcgccttcccggctcggcctgcggggcggggcctgcgggcggaagtgcccggggcgacggcggcggggaccggccgggccatgggcgccgggggcagaggcggaggcggcagaggcggaggcggcagaggctgcccgggcggcggcgggggccggcggcgcgggacgcgggccgggtagcgccgggccgagcgcggagccatgggccgggctggcaccgggaccgggggcgaggcggtggccgcggtggtggcggggccgctgctgctgctgctgcttgcccggcccccgcctgcctccgccggctacagcgggaagagcggtgagcgggaggcgcgggcgccatcgggggcgtggggccggggctgcgggcggggcgggattgtgacaccccgggcgcacctgtgcgctcatctggcgccggcgcggggttgggggtccccgccgcgggttgggggtgcacagtggccctttggggcgcttcgtgtcctaggggtcgaggcggacgggaccccgcgcttcctcctcggtcccccgatcggggttgggccacatcggcccctggagcgccccctcccctccctcctcctcccagagcgcccaggtccggcgcgcccggcgcggggaagtggaggggcccaggggactctgcccgggactccagctgggaggagtggctgggccgtgagctcaccggccgggtccggcctgagagaggggcagagccgggagaaagttgttagaccctgtagcgggggcccgtgggcgtcatggctccagcccttccgcagtgacccccagccctggtacggccgcttcctgccgccggcccggcttctgggaggagggactcccagctggcggaagaggggctgaggaaagggcgcccctctcccctcttgttgggaaactcgccgggctccctttgcatttctgttccctgagggtccccgtccctgactgaggtccaaggaggcggctggaccagggagaaggcgtagcccttccacggggtagggacgtgggtgtggagaccgtcaggccttggccaccctgagatggtgaggacttgccccggcctctgtggcctgggactctggaggggccgtgtcctttctggccggctggaagttcccacacgtccccagccacgcgggtgcccag

SEQ ID NO: 6878 - DNA, 6000 bp, Homo sapiens
ctcccgcctcagcctcccaagtacctgggactacaggcgcctgccactgcgcccagctaatttttttttttttttttgtatttttggtagagacggggtttcaccgtggtctccatctcctgatctcgtgatccgctcacctcggcctcccaaagtgctgggattataggcgtgagccaccgcacccggccggctttatttattatttttaaactttattttaggttcaggggtacatgtacaggttttttatataggtaaactcatgtcatgcgggtttgttgtacacataatttcctcactcaagtactaagcctggtactggacagttatttttatttgtttttgagatggagtttcgctctgtcgcccaggccggagtgcagccgcaccatctcccctcactgcaacctccgcctcctgggctcaagtgattcttgtgcctcagcctcccaagtagctgggattacaggtgtgtgccaccacacctagctaatttttgtatcttcagtacagacagggtttcaccatgttggccaggctggtcttaaactcctgacctcaagtgatccacccacctcggcctcccaaagtgctgggattacaggtgtgagccaccacgcccagcccaatattttgttatttttttcggctcctctccctcctcccgtcctccacccttcaataggcctcagtgtctgtttttttccctttgtgtccatgtgttctcatcgtttagctccaacttatgtgagaacatgcggtatttgcttttctgttcctgggtcagtttactaagggtaatggcctccagctctatccatgtgcctgcaaaggacacgatctcattcttttttatggctgcatagtatttcatggtatacatgtaccacattttctttatccagtccaccactgatgggcatttaggttgattccatgtctttgctattgtgaatagtgctgcaatcaacacacgcgtgcgtgtgtttttggttttgctttttttctgagacagagtctcgctctgtcactcaggctggagtgaggtggtgcaatctcagttcactgcaacttccatctcctggattcaagcgattctcctgccttagcctcccaagtagctcaggttataggcgcctgccaccacacctggctaatttttgtatttttagtagacatggggtttcactatgttggccaggctggtctcaaactcctgacctcaagtgatctacctacctcagtctcccaaagtgttgggattacaggtgtgagccactgcgcctggcctgcatgtgttttaatgatagaacaatttatattcctttgggcatacacccagtaaggggattgctgggtcaaatgttagtttggttatcaacattcaaagcctgaattttaaacaggttgttgggctgggggctcatatccgtcagctcattcacatttagcactggtctcatccccagtagcttttccaggacagcgaccttcaccacaaagcttgagttttcccaatgcaagcctgggcttcccaagcatttttacttttctaaggaagacatcctggagaggatacctggatagactggggaaccttctctgtgtctctcccagtgctgtctagcatcaattcatgggccacttctttcgagtaatttgtctgcacctcttgggccatgatttccaccatcttttctggatttgacgggcctgccagtgctgcctgtgagaggtcttcccaatctgcttgctgcactgttttagtaaaagcagcacagaacagatgaggcaaatgatcatctgtagttttgacaaccatatgagcttcaatcatggtctttttttttttccatgaaagctggtcaggctgtttttgcactgaacatcctcagtgattagcttgaattttccagatgcaacttcaccattctgcagatgagcagtactgacttcaaaaacacggcccttgaggccatcgggtgtgattttggttcctgacgtccctgtgcctggtgttttccatactccttatgccaagcacagctggtgctttcgcctcatgccagtctctctcagacagtggaccaacctctttcttcttggctcccttcctgccacttcggttaaggtgctcgttcttgcctgctgcatggtggtgcagacagccaagggccagatgttaacattgccattttccctccctctcagaaggctgctactcattatgattattgtcaggttttgaattgtccgagtgtaagctgcagacatagcaacacaaggtcccaagtatttcagtatgtatctcctaagatcggggagctttcctgacgtaaccacaatataatgatcacgcgtgggagatttactactgctccaacaccgttagctcatacagtgtatgtccaatctttgccaattgtctcaaccatgccagacccacgtgaggttgtctcctcagcctctctttgtctctttcacaatactgacattgtggaagaagatggcctagatgttcagcaggctgtccctcaaagtgggattatctggtgtttcccctttatgagtggactcaaggtgagcatgttttgcaggaatgctccggaagggacgttgtgtccttcctggtgcatcacatcaggaggcacacgatgccaccttatcccatcaccagcaatgctgaactgggttgcttggttcaggtggcgcctgctaggtttcttttttcccttcaccgttaagaaatgctgaccctgggccgggcacggtgcctcattcctgtaatccccgcactttgggaggccaaggtgggtggatcacctgaggtcaggagttcaagacatgcctggccaacgtggagaaatcccatctttactaaaaatacaaaaattaggcctggcgccatgactcatgcctgtaatcccagcactttgggaggccaaggcaggcggatcacaaggtcaggagattgagaccatcctggctaacacggtgaaaccccgggtctactaaaaatacaaaaaattagccgggcgtggtggcgggcgcctgtagtcccagctacttgggaggctgaggcaggagaatggcgtgaacccgggaggcggagcttgcagtgagccaagatcacgccattgcactccagcctgggcaacagagcgacactctgtctcaaaaaaaaccaaaaggaaacaaaaaaaagaaaaattagccaggtgtggtggcgggtgcctgtaatctcagctactcgggaggctgaggcagaagaatcatttgaacccaggaggcggaggttgcagtgatccaagatagcgccattgcactacagcttgggtgacaagagtgaaactccgtctcaaaaaaaaaaaaaaaaaagaaggaaaaagaaaaaagaaatgccaaccatggccgggcatggtggctcatacgaagagtcctagcaactcaggaggctgaggaaggaggatcccttgaacccaagaggtcaaggctgcagtgagctatgatcttgtcattgtacttcagcctgggtgacaaagtgagactgtgtctcaaaaataaaaaaataataataataatttaaaaaaaggccgggcaccgtgactcacgcctgtaatctcagcactttgggaggccgaggcgggtggatcacgaggtcaggagatcgagaccatcctggctaacacagtgaaaccccatctgtactaaaaatacaaaaaattagccggccatggtgacgggcgcctgtagtcccggctactcgggaggctgaggcatgaacccgggaggcagtgagccgagattgggccactgcactccaacctgggcgacagagtgagactccgtctcaataataaaaatatcgaccttttaaaaggaagaggatgaggcacaaaatataaagagtttactctagaggctaacgtggaaggatcacttgaggtcagaagtttgagaacagcctgggcaacacactgtgagctccacagcaaaaattagccgggtgtggtggtgcaggcctgtggtccctgttactccagaggctgaggcgggaggatggcttgagtccaggaggtcaaggctgcactgagctgtgaccgcaccaccgcactccagcctgggcgacagaaggagaccctgtctcaaaataaataaataaatgacccagaaggtggggacagggtgggggctgatgtaaagctgtcaagaattctctttggtttatggaaataccattgattagtgatgggctgtgccctggtgcgggtacagggtccgggcggctatttggctaattcacagctatctgcgtagtagccggcagtttccagaggcgaccctcctgtactgtctctggggcctgatcgttgaagaggactcgccttctgttcttttctcattaggcgggaggaccctctggggctgcctggaggaagcctccactccgaccctcgcccgagtgcctactgcgagggcggatgcatgcttcgggacttctaatttcatccttcacgtctttagccgccgcctatggcaaggaaaggcctgccctcgcccctgcctccctcctcccttccccaccgcggctccgtcacgatcggcgcgggcgaccgggcctgggggagcccctccagccggctcctgccctcaggccccgggcgcttccctcgccccgactcccgggcccgaggtcccgggggcggccattcgcctcccaagcactcggcgctcagcccaacggggccgcctttgcagtcgcgtgggcagaacggggtcctcagggccgcggcgattctctagggcgggcggcgccacgacccgccgggagcgcggctcccaggagcccccgcgcgaccgggcctcggtggttgccgttgcaggtcacatggtcgccgtcgctcatcacgtggccccgtcgcgcgtcacgtggccgccggcgcgggtcacgagaacaaacacgggggcagccggcgcttcccggccggtgtcgctccgcggcgggccatggccaacgtctctaagaaggtgtcctggtccggccgggaccgggacgacgaggaggcggcgccgctgctgcggaggacggcgcggcccggcggggggacgccgctgctgaacggggctgggcctggggctgcgcgccaggtgaggccgggcagggcgcaggcggggaaactgagccctcgtgcgccccgcagcccgcgccctcgtgagccttctggcggcgccgcgtgtctcggtcctggaggcgaccgaggcgcggtggactcgggaacgcgccccggggctcctcggcggggccgggctggcgggggcgcctggggtctggagtcttcggaggccgcgccgggctcggtggccgggagggctgcgtgggcgaggcggagctcgccagaccccgcggaatgtggggcgctgaggggcgccggggcagccgtggcgcacgttcattccctccggtgtcccccagactggccctaaaggggtgcaagtggctttctgttcaggtgacttttaaaaattgtcatcctacacgagcaactaattttgtttgcgtttttgaccccctgggagatggaaacagttaagattgcagccgggtcactgtctttcagtgagaatgactgagcgcctttatctgccatctttctgtgtggggatcagtcccgactttcaggtgatcttgggagtgacgagtatttgtactcagtctcccttcgcaccgagttgaatttgcaatgtgcaggcaaacacaataagcagcaagtcagaggttggaatgcgttccgcatgtcaccctgcagcgtgcgtctgagcagtgttaaggtctggagaaccgttgcgggtacatttgtttccctgtctgtgtattgtcttaatatttttttttttttgagacggagtttcactgtagttgcccaggctggagtgcaatggcgcgatctcggctcactgcaacccccacctcccgagtttaagtgactctcctgcctc

SEQ ID NO: 6879 - DNA, 6000 bp, Homo sapiens
tactatcttggtaagagaccccagctaagtagcaacattctccatcacctcagaatacaagggcgaacactacaagctgctgcttgttcatgtcaatcgttttcaccactctttcctttctttggcacagaagtaaaccccagttgcaactcaaagggccccatctctatgcccttcctactctcaacccaggagcacttgaaggagaggacaatgggtccaagtcagaccccaaggatcctttctccgcttcttacccatcttccccccaatgagtttcaaaagcctgctcccttggtgcatttccaccgcctgatgtctgggaaagagatacagcaggtatttttttctcttcccgtttccgaactattgtccgctgtttgaaacacaaaaccatagaaaaccatcagtgatcctttggaaaggaaacagctttaagggatctcttcgactcccccccaaaaaaggatactcactgcctcttcaaagagtttaaatatagaaagtcgcagcctcttcgaaggagagaggggacacatgccccataagtgccacccaaattgagagcctcagtgtaggccgcgggatgggtgagctagggtggagcccggctggggcgaggggttcctctcccccgcggcacaccccggagaggggctggggtctcccaaggggacgggccgccctaccttttccgcggggccccgagccaccggcgttgccgctccccacagcgctcggaggatccttcctgggcctcttgctctgcggccgcacgctggaccggaggaagtggtgctggtcctgggggctgccctgcggcggggacggcgcctgcggcgcgccggggggcgcgggggggccgtcggcgccggcccggggggtcttctcgtccctctttgtgccgctgctctcctcggccgcgtctgcgccgccggccccttctccttccagggactcctcatcggccgcccgcttgcccagcttcttgagcccgtcctccccgctgccgccgtcgcccaacttcactgtcatcctgcggccgggagaggggaggcggccggtgaggcgggcgcaggccgggaagtttagcggccccgacgcgctctcaacatggccgccgttgtttgttccaaatcccctctcggcggctcggcccggcccgcccgagcccgcccgagcccgccgcggcccctgccgcccccacgccgccgcccccggccctgcccaccagcccgggaccctcccgggcctccccggacgccccctggccgaggctcgcgtccagacgcccgggccggcggcgggagggcgcgacagctcggcggaccctgcccggccccggccccggccccggccccggggtctatgggagccccggcgcgggcgcgggtctgggcacggttgcgggtccgggccgctgccccgcccacagccacctacccggcggggccgcggctcatggcctggccctgcgcgccggcctcgctccctgcgccgcctcggccggccgggccgcagccccagccctagcccctcgtcccaccccctccccgccccccgaaaggcgcggggctcccgggccccgcgcacctgccccacgcgccggcccccagagctggccctggaggaggacagaggaggccggatccaccccgggacgggagaagcgcgggctcgcctgcccgcacggggaactccatggtggcccaatgccgccggcccgcctgcttattttaaaacacacataaagaataatcagctccgggtctctgggaatcttcttcccagggtgggaaatgtgagctgctgcggggatttactagttaaaaatgcttttgcaacaaaggagcctgttgcatggaacaggttggaaccacccgggaaagtgacagcccagttatgtccgggtccaggtgcaagaagcggtagaagacaatggtgttaaaactcttggcaacaattaataaaattattgcatcaactttgctacccaccgccctgtaaaatgtcaacaacaaagtgcagtgactaaaaatgctgcagcccagaaagcagagccactcaaaaataaactcagacaatcaggtacacagcaagagctgcagcccagaaacagtccgggacgggcacgtgtgaggaagcaaaaacgctgaagattagattcctcagcagatactgaccctgcgttcaactcaactgttgagaacgggggcatttccacttcaaaggaacacacgatcgaggcaccaacaccaaccacgaaatacagggacgcgggcgaggacctctctttccgagagatcgggaaatggcttcaaagtcgcaatgatgcccccaccctgaggtgcagatcacacaaggatccgtggccgttttctcctgtcggaattggtctagggaatctcgagttcatgctagttttaaaaaaaactctgccaaagaacaaaaccacccacgacaaacaccccaacttaagggatttcgtggcaagacttcccactcttccccctcaacccacctctttccactcaagaaacctaaacccccaaagacctcgtctcgggctgagaaccccgctgcccagggacctgtccgcccgcaggccacccgggacccaagcaaaacaaactcggccaccagagtgaactcgcccgctcgccgggctccacacccaagacgccgaccgagcacggggaagcgcttttcgccactgaaaggaccgacgccgtccagactttaccctaagggccaacaagcagggggatggcctccttttcgcgagaacctccaacgagaccggacttttctcggaggcgcagtctcctccagccccgtcccgctccgcaccggctcgcgtctcgggatggggacgcagaagcctcctcgccctgaggccagttgtggctgtaccgggcgctgtggaagcgacgccccccccgcgctctcccgcgccgcccgacaggaccccccggccgggcctcgccatgacagccccgccgcccagccttggtcacctttttcatcaacgccgggcggcagcctggcttcccggggcctccccgggtgcccgcagaaccagccgggccgggcagccccggcccccgagcgccggctgcagggaggccgcaacgccgggctggtcgtccgcctcggaagcgactggtcgagcggcgctagccccggcacgtcccctccgcgggccggcgcgcggctgcgggggctgcggacgcagatactgccgccactcaccctagcgaagccggcccgccgccctcagcagcagttccggctacggcggccggtggggacctcacggacggcgcgcgggggcggggccggggtgcgcgggcgcgcggggcggggcgacgaacgcgggggcgagcacccccaatgtttcttcgggcccgtctccccaaaacggcgctcccattggctagcgctgggcgggcgcgctcgcacgtacgagcccggtgggcgtcgggggcgagcccgcggcgccagtagtgttgtgacgccagcctcgcgaccttgcggactgtgcgtctctttggattggtggacagacagccaataggccagggcccgtgctgtgattggccgcagcagtgttgacggatacgtgagaagaaaacggcgtggtagctcggagtgtggaatcgggcgcgaacctgagttctgagaagtgtggaagcacgtctgaggcagttaagcgcaccctttcctgggtggagtatgtgcttctgcgctacgttagcgtagccgagcggcgctgggcacttggtcattttcttcatagcaagaaagcagaggggtgtttttcaaattccagtgtttctttctttctttttttttttttttgagacggagtttcgctctgtcgcccaggctggagtgcagtggcgcaatcttggctcactgcaagctccgcctcccaggttcaagcgattctcctgcctcagcctcccgagtagttggaattacaggcgcgcgccaccatactcgctaatttgtgtgtttttagtacatacggggtttcaccatgttggccaagctagtctcgaactcctgacctcaagtgatccgctcgtctcagcctcccaaagtactgggtttgcaggcgtgagccaccgcgcccggctcaaattccagtgtttctttttcttttctttttttttttttttgactcgctctgtcgcccaggctggagtgcagtggcccgatctcggctcgctgcagtctccgcctcccggggctcaggcgattctcctccctcagcctcctgtagccgagactagaggcgccaccgcgcccggctaatttttgtaattttttagagacaggatctcgccttgttgccaaggctggtctcgaactcctgggctccaacgatccgcccgccccagcccccaagagctggaagcccaagcgcgagccccgcgtccggccgccagctgctttcttgggggcgctccctgcctcgcttggctctgtggagtccggggcccggcgatggaacaggccctcagtcacccaacacctcaggacactgccgagcgcatcgactttcccagaaacgcttgacccacgccctccgctccgaaactagaaaagcggagcccagggaaggcctgggccgagaccgccgcgtgctggaaaggctccgcctcgggatgcacgggaagggaacacgcccaggaggggaggatgccgcggttgatcggggctgtgacagcgcgccctccacacaaaggggacccagacgccggccctgcgccgccgtctctcctagaaaaagctcgtcccgcttctctcttgcagagcggaataacctggcccccgacgctcgggcctcggagctgcacgtgcgtgcccgatcgccttcggctctttccggccgctcggggcgcttcgggagtcctcggggccgcctcgctcaccttcggctatttccgcgttcctggcgcgccgttgtcccggcaacgcgcggcggctcagcggcctggcagaggtgagtggccttagggctagggcggccgacccaggtccttaggagccaggccggggtttggggccgaggatgtgaccggtggcgggcgtcgggaccctcccgtctcctcccacgatcccggcgccgccgagtccccgcggcccctcgcgagtcccatcgaggctggggcgggcttggcgcggggtccaggtcgctcgtcggactatggctgtcgcccccgcccggcctcgaatcgcggctgattccggtagctgggagagtccctttggaatgggcggggtggggaggtgggcggcgccatcacacccccgaggcgaaacgggacaaacgagagatgcaaaacaaaaacatgctatgtttggtcactcgctgggtcggccctgagggtcgtgttgcatcaaaccgccagcgcatggcttctcagtaccgtccgctggatgcagcgaggaccctgcgcaggccgaaggctctggactgtggcctggagggcgaggctttgtagggtggccccgggtgcctgtccccgagagtccaccgtggagccccatcccggagttccctactcagcgtcaccgaggaaggctactcaaagccctgtgaccccgtgccgcttagctgaatgggcttaacagattctttcccaaaagctggtttgatggaggcacttgtagaggctctggagacgctggacgcctgaaagtgagaggagtacttcggttagaataaatacagtttttctcctgttccccaaagttgatgtatttcccggttttatgttccagagactggaactttgtttcaagaaaaggaaaggtacttgtttccgacctgaagctattacagattgtcatcaagtacataactattttattgtcagccatctctcctccttgtgttaactttttaaattatactgataatactcattttgggaacttgttaagaggccgttgaaaggaactatgaacaattatattaatgcattgtgt

SEQ ID NO: 6880 - DNA, 6000 bp, Homo sapiens
gccctccttgtcacctctccaagggacaacgtttactgggcccagcagctggggcagcacagcccatctcccctcccagatcctctcctcccagccactacatcaggccgaccatccacatgttcgtcagctggagggtggacagaccatctgcctggctgtctggcttatacaggggtcaagatgagctcgggcagtgtggaccctcaaaacccctggggccttgggagatccggctaggcagaaggaacttgttgatgtctgtttcttggcggaggaggacattcagacagagagcaggaggcgagggaccctctcagggtgcagggacagcccacaccctttgtccctacagtctggttgctcaggtgtcctggggcagagggaaggaagtttgtgtgtgaggagcatggagaagaagttcctgaaattatcagatttaaccttcataaggcactcaacacagagttaccatatgattgagcaatttcactcctaggtatattccctagagacatgaaacgtatgtccactcaaaaccgtatacctgaatgttcatggcagcgttattcataagaaccccgcagtggaaacaacctagatgtccatcaacgaatgagggaatcaacaaaaggtggtccatccatacgatggagtattactcagtcaggaagaggaaggaggtactggcacatgccacagtgttgatgaacctggagaacatgctgagtaagagacccagacacaaaaggacgaacattgtatgattctcttttttttttttcattttagagatggtgtctcactctgtctcccaggctggagtggaatggtgcaatttcagcttcactgcaacctctgcctcccgggttcaagggtttcttgtgcctcagcctcccgagtagctgggactacaggcgtgcaccaccacacctggctaatttattattattattatttgagatggagttttgctgttgttgcccaggctggagtgcaatcgcgcgatctcggctcaccacaacctctgcctcccgggttcaagccattctccttcctcagcctcccaagtagctgagattacaggcatgcaccaccacacccagctaattttttgtatttttagtagagacagggtttcttcatgttggtcaggctggtctcgaactctcaacctcaggtgatctgcccacctcggcctcccaaagtgctgggattacaagtgtaagccatggcgcctggcccacacctggctaatttatgtatttttggtagagacagggtttcaccatgttggccaggctggtctcgaactcctgacctcaagtgatccacctgccttggcctcccaaaatgctgggattacaggcatgagccactgtgactggccatatttctttctttctttctttctgttttagagatgggctctcactctgtcgcccaggctggaatgcagtggtatgatcatggctcactgcagcctcgtactcctgggctcaagcgatcctcccacctcagcctcctgagtaagctaggactataggtgcataccatcacgcttggcaaattttgaaattttttgtagagactggtactccctatgttgcccaggctggttttgaattccccgcctcaagtgaacctcctgcctcagacttccaaagtgctgggactactggtgtgcgccactgtgcctggctaaatttaaaatattttgtacagacggggttctcgctttgttgcccaggttggtcttgaactcctggcttcaagcaatgattctctttttgtgaaatgtccagaataggcaaacccatagagacagaaagtagattcgtggttgccaggggctgtgggaaggggagaagagggcgtcattgctaatggacacaggatttctttttggggtgatagaaatgttctaaaattgattgtgattgcacgactatgaatatactgaaaaccattgatttgcatgcgacaaatggctggattgagtggtgtgtgaattacatcacaataaagctgttactcttcagagactcatgcgagtcatgactgaggtcttcattttacaaaggagggtctggtggctcagagttggtgggagcctgaggaggaggcggggctggaccagcctcaggccagactctaagccccgcccctgttcccgcagggccttaagctccaccccatcctctactgcccgggctctctgctgctgagccttcacccacacggttccttggcctggaatgctgttctcctcgtcttcacctggccgtcacctccagaaagccttcccgacctctcctcccacgtatacccttccactgagcgacattaatggaatgtccactgcgtgccaggctctgttaggtgctggggatccactggtgaatgaacagccccagtgctgccatcctgggcgccccgaggtgtgtagccaccgtcagccgagtgcctgatggagggaggggtcagcttccaggagaaccctccgagccgactcctggtccctgcatctctctctccctgtccccagtccattccacatcctgctgttctgcgttctggtcaattcctcctggaaagtccttctgccctcagcggggactaaggataaagcatccagcagagagacggcagcggaaaggccaggagatggaaatgaccatgctgggctgggcagggggctggaggagccatcacggaaccagtgctggaatttcaagtcctgagtagggactgctgagaccgtggggatggctgagactgtggggacggctgagaccgtggggatggctgagaccgtggggactgctgaacctgtggggactcctgagaccgtgggaacagctgagaccgtggggactcagaccgtggggacggctgagaccgtggggactcctgagaccgtggggatggctgagaccgtgggggctcctgagaccgtggggactgctgagaccgtggggactcctgagaccgtggggatggctgagaccgtgggggctcctgagaccgtggggactgctgagaccgtggggacggctgagaccgtggggactcctgagaccctggggacggctgagaccatggggacggctgagaccgtggggactcctgagaccctggggacagctgagaccatggggatgctgagaccgtggggactcctgagaccgtgaggactcctgagaccgtggggactgctgagactgtggggtggatgctgcagggtgggaccccagcccccaccccgagccagcccgttgggaacaataccgtttcaagctagaccagaagaagaatttcctgtgacccagcataagccagcatgctctcctcgcattgtgcccgctgcctgcccacggggctcctgcagaggcttgcccagatgagcaggtgcagcccgcatgtctggagccggggctgggggactggtcagtggtcttcaccccgtcagccccgtgtggccccctctggccagggctgctgctgggtaggagctccggaatgtctgtgggtcgtggaggccttcggccccttgaggcagcccggctgctgggacttgtccagatgccatcagggctggaacggctcattaacgcagcagagcccaggacaggggccgcaagcccttggctgggaagaggctgggcctctgccgggagcctgtgccgtgcctgcctggcgccagccctgtggccaggaaggctggggcagaggtggagagaggacccgggtctcataccacctttgccttcggatggggcaagttgctcgccctctctgagcccggctcgcctcccctgccttccctgcaggctgctgctgggcgttggggatgtgaagttcccgcagtgtctagcggcccccgcaggtcccacccgagaggcccctgaatctcacgcccctcagaggcagcccctgggggaggtcctgggctccttctcttccccagcacaggggtccctgagtcctttgtactccagtggggtccactttgccagcttccgaaatgcatcactgatgtctctgggcagtgccaggtggaccaaggctgggcagatggggtgacttagtagacagagtatgtctcaggcctgaattcagttcaccactgggcccctgggagggaaacctattttctctgagcctgtcccctccattctaaaacagtaaccagaggtgacttgacctctcagcggccaggctgtgacccgatgtgtgactgtcagctgggagtgcaggacgcacgccattcccggccgcagactccccccacacgttctgggatccctctctgcacactagggtgctgtcccggcctctttctcccttggcaggccgagtgcccggatcgacgcttttcctgggtccccttggcctggcgatgaggctcccgctcctgcaggccaaggcttggcctatgcacctgccgcgcacgtcccggagtggggtggggggggaaggggatcggtcttcaaacagagggtcccgaggcccgcgcgccgccctgtccctgccctgcgtcccgaacggccaccgccgccgcatcctccccgcgcagaggtgaagatgccggagtcaagcgagccagggcctgggatctcggagcaggagcgtcctggtggtcccggcagctcgagtcgcgcccgggtggtggcggctgccggcgggtccagcccaggcagtggcctcggaggcggagtgggcgggggagggggaggggggagggcgtccagaccccgcccccggtcccgccccgcgcccgctcccaggctgcgggaccgccgggcgcagagcacaagccgggcacccacggactgagcggcgcgcgggccgagatgcgcgcccgcctgctgcccccgctcccgggcctggagcggcgcgaccccatggcaggtagcggcggcctgggcggcggggccgggggcggccagggcgcaggggccgggcaaggggccgctctgcgggcgtcccgcgcgccgatgctgctcgtggccctggtgctcggcgcctactgcctctgcgccctccccggccgctgcccgccggccgcccgcgcccccgcgccggcccccgcgccctccgagccgtccagctccgtccaccgcccgggagcacccggcctgcctttggccagcggtcccggccgccggcgcttcccgcaagcgctcatcgttggcgtgaagaagggcggcacgcgcgccctgctggagtttctgcggctgcaccccgacgtccgcgcgctgggctctgagccccacttcttcgacaggtgctacgagcgcggcctcgcctggtaccggtgagcaccctggcccgtccgccctgaccggcgccttcctggggagggtatcgtgcgccccagggagcagcggcacgatatcctgcctcccagggagcaggggtgcgctccgggcagtggggttgggaccgccctgtgggggccccaggcttgacctggggtcccggctccggaagaaggaatgatacttggctaggattccctgaaactttgaaaactgtggggaaagccccggttccgttctctctgctgagggacccagcaggactgggggaggcggtggcttcccagcccagaggtcgtttccagcccgtgggattacctggcagcgtcagaaatgcctctgccgcccgctcactctgggcactcaggtgtgaccgaccgctggccaggtactgtagaaaggggcctccaggttccaggcagccacctagaaagcgtccttcctccccaagacccccgagtctgcgcacaggaacccttgttggtggtcctgggagtccggagaaagtctgggctttggaaaggaggagactgcctttaggtgagtgcccagggtgagtccagccccgtgcatggggctctgtggctgtcctgcctctacccaggatggacgtgggggtgcggcagcctcagctgaagcagcccgcgctggtggctgctcatccccaagcttggac

SEQ ID NO: 6881 - DNA, 6000 bp, Homo sapiens
gagtccctgaattaggctgtgcttgtgggagcttcagttttgatctggtttcaagatttgatgcagtgagcaagtgaaagtacccaagagagcctctagggggcggtggtgtttaaggccacgttcttttttttcttttcttttcttttctttttttttttgagatggagtctacctttgtcaccagactggagcgcagtggcgcgatctcggctcactgcaacctccacctcctgggttcaagctattctcctgcctcagcctcccgagtagctgggattacaggcacacaccgccacacccagctaatttttgtatttttagtagagacagggtttcaccacgttggccaggatggtctccatcccctgacctggtgatccactcacctcggcctcccaaagtactgggattacaggcgtgagccaccgcgtccggccaaaggccacgttcttatctaagcttttcctctgaccttgcctaacatctgtaatgccaaaatagttaacacgccctgttttgtgtacaatacagcttattaactgtgctactcaaagtctctatatctttactgacataaaaaaattgtctctttggccgggtacggtggctcacgcttgtaatcccagcactttggaaggccgaggcaggtggatcacttgaagccaggagttagagaccaacctggccagcatggtgaaaccctgtctctactaaaattacaaaaattagccaggtgtggtggtgcacgcctgtaatctcagctactcaggaggctgaggcacgagaatcacttgaacctgggaggcagatgttgtggtgagctgagatcgtgccactgcactccaacatcctgggcaacagagcgagattctgtttcaaaagaaaaaaaaaattgtctctctctctttctttttttttttagacaggatctcactctgtcatgtaggctggagtgcagtggtgccatcatggcttactgcagccttgaccttctgggctcaagtgagcctcccacctcatcctcccaaataactgggaccacaggcgagctccgctatgcctggctaattttttgtttgtattttttgtagaaatggggtctcttggctgggcgcggtggctcacacctgtaatcccagcactttgggaggccaaggcgggtggatcacgaggtcaggagatcgagaccatcctggctaacacggtgaaactctgtctctactaaaaatacaaaaaattctccgggcgtggtggcgggcgcctgtagtcccatctactcgggaggcgaggcaggagaacggcgtgcgcccgggaggcggagcttgcagtgagccgaaatcgcgccactgcactccagcctgggtggcagagcgagactccgtctcaaaaaaagaaaaaacaacaaacaaaaaaaaagaaatggggtctctctgtgttgtccaggctggcctcagtgatcctccttccttggcctcccaaagttctgggattacaggcatgaaccactgtgtccagacaaaaattgatctgtaaactttttgagacagcatctcaccctgttccccaggctggagtgcagtggtgtgatcatggctcactgcagcgtcaacctcctgggtctacttgatccttcttcgagggaaggtgtaataaaccctcctgcaatgtctttgtttttcaaaatctttgtatttcacagtttagcttcgtgggttgatgttctattttgtttttgtgtgtgtgtgtgtgtgttttgtgtttttttttgagacacagtcttgctcttgttgcccaggctggagtgcaatggtgtgatcttggctcactgcaacttccacctcttgggttcaagagattctcctgcctcagccttccgagtagctaggattacaggcgccgccaccacaccccgctaattttgtatttttagtagagatggggtttctccatattggtcaggctggtctcaaactcccgacctcaggtgatccgcccacctcagcctcccaaaatgctgggattacaggcgtgagtcaccgcacctggccaatgttctatttttgagaacacaacagttcataatatattctacatagaccatacctgttatgtgtagataaacagactcttttcccatttaacaccttttgccttaggtttatttttctggtatcaatactggcacacttactttgtttgcagtttcctgtcttttttttttttttttttttttttgagacagagtctcactctgtcacccaggctggagtgaagtggcgggatctcggctcactgcaacctctacctcctgggttcatgcgattctcctgcctcagcttcccgaatagctgagaccacaactgtgtgccaccatgcccagccaatttttgtatttttagtagacacggggtttcaccatactggccaggatggctcaatctcttgacctcgtgatccacctgcctccgcctcccaaagtgctgggattacaggcatgagccactgtgcctggcctttttttttctttttgagatggagtctcactctgtcacccaggctggagtgcagtggggtaacctcaggtcactgcgacctccgcctcccgggttccagtgattctcctgcctcagcctcccgagtagctgggattacaggcacccaccaccatgcctggctaatttttgtatttttagtagagacggggttttgccacgttggccaggttggtctcgaactcttggcctcatgtgacccgcctgccttggcctcccaaagtgctgggattacaggtgtgagccactgtgcctggcctggctttcttgtttcttttctcctcttctagtttcccccttttaggctaacaattattcactgttaataaaaaccctcaggtctgtattttatcaagaaacatttccctcacgtcttcttccctgaaccaaacaagatctctggcacattttatttgctctgtctcaccacatggattttgtttttttgtttctttgttttttgagatggagtctcactcttgttgcccaggctggagtgccatggcacaatctcagctcactgcaacctccacctcctgggttcaagcgattctcctgtctcagcctcctgagtagctgggattacaggcgcgtggcaccacccccagctaatttttgtatttttagtagagacggggtttcaccatgttggtcaggctggtctcgaactcctgaccttgtgatctgcccaccttggcctcccaaagtgctgggattacaggcatgagccaccacgcccggcccccatggtttttcaaatagtttagaatttcatttccaggtaactaatttgcttctttaaacatatgtcttttctatttaagaaatcctttctaaacaattgcattttattccacaaccgccttcaaacaatcattgagacttggttaatctgttttgctcatttggcagcagtttcttgtggctgtttcttccctccactggagtccttgaatcttaagtctgtcatttgactgcaattaaaagctgggtttggaatacaatcgcagccttaccatccacctgctgtgtgacctggtaaatttctttttttttttttgagacggagtcttgctctgttgcccaggctggagtgcagtggcacaacctctgcctcccaggttcaagcgattctattgcctcaggctccctagtagctgggattataggtgcctgccaccatgcccagctgatttttgtatttttagtagagatgaggtttcaccatgttggctaggctggtctcgaacttctgatcttgtgatctgcccgcctcggcctcccaaagtgctgggattacaggcatgagccaccactcccagccagttctttttttcttttttccatttttttttttttcgagacaggatcttactcttttgcccaggcgggagtgcagtggcacaatcacggctcagcgcagccactgcctactgggctcacacgctcctccggcctcagcctctcgagtacctgggactacaagcgtgagccagtttggctaattttggctaatttttgtagaaacggggtctcgccatgttggccaggctggtctccaactcctggactcaagggatccaccttcctccccctctcaaagttctgggattaccggagtgagccactgtgccctgctggcaaatttcttaaactgtctgtgcctcagtgacctcatttaataaagggaataattgtagcacactttttctagagctgtgaagattcaatggaataaataaggcaataaatgaatggatggggaatgaaggatgtgggtttcctccctcttgtctttcaataagctctcaccatcaacctcccattgcctgttctctctcttccccctctctccctctgtctctctctcagccaggaaacctggggtagggaggcttggagccagcgggtgcgtcgggaggctgcgggtactgactcgggccgcgcacggagattgcgggagaaggatccacaccgcggaagaaggatcagggtggagcctgtggctgctgcaggaggaggaacccgccgcctggcccacaccacaggagaagggcggagccagatggcaccctgcccaccgcttcccgcccacgcactttagcctgcagcggggcggagcgtgaaaaatagctcgtgcgcctcggccgactctgcagtgcgacgggcggagcttccagacgctccgccccacgtcgcatgcgccccgggaacgcgtggggcggagcttccggaggccccgccctgctgccgaccctgtggagcggagggtgaagcctccggatgccagtccctcatcgctggcccggtcgcgctgtggcgaagggggcggagcctgcacccgccccgccccccctcgccccgtccgccccgcgccgcgcggggaggaggaggaggagccgcggcggggcccgcactgcagcgccagcgtccgagcgggcggccgagctcccggagcggcctggccccgagccccgagcgggcgtcgctcagcagcaggtcgcggccgcagccccatccagccccgcgcccgccatgccgtccgcgggccccgcctgagctgcggcctccgcgcgcgggcgggcctggggacggcggggccatgcgcgcgctgccctaacgatgccgcccgccgcgcccgcccgcctggcgctggccctgggcctgggcctgtggctcggggcgctggcggggggccccgggcgcggctgcgggccctgcgagcccccctgcctctgcggcccagcgcccggcgccgcctgccgcgtcaactgctcgggccgcgggctgcggacgctcggtcccgcgctgcgcatccccgcggacgccacagcgctgtgagtagcgggcccagcggcacccgggagaggccgcgggacgggcgggcgtgggcgcgttccctggcccgggacgggaagcaggacgcgggccaggacgctcccagggcgaggctccggcgcggcacggcggccctgctaaataaggaacgcctggagccgcggttggcacggccccggggagccgaaaaaccccgggtctggagacagacgtcccacccgggggctctgcagacgccagcgggggcggggcgcggaggccgcgctcagctgggaggacaaacagtcgctaattggagaggaattgggatgcggcctggggctgcggggtacccggagaggtggggatggctgtagggggcggcagggaagagttccaggaggtgtctggaaaaggatttgatggatgtgcaagaattgggctgatgcttaggaaggggcgatgaggtgggtccagaagaaggggggtgaacggtgtgagcaaagaccgtgaggctggaggctggccacgggaggtgtgaggggtaggggcagggtgggaggtgggctcgcgggtgggctggggtcatgaagggcctcaggcgctctgctattgggttccaaggcta

SEQ ID NO: 6882 - DNA, 6000 bp, Homo sapiens
ttttaatgattaatgtttttaagtgttgagaaaattggctagctcactccagcaaaataagccccagatggataaaagtttaaacatataaaatttcattataaaagcacttttatattattagagtggggacttttttaaaaaaataagtatgacctataacctggaaactataaagaaacaggctaataaatctgattacataaaaaaaaacaacttttctttgaaaaaaaggtaaaaagctgacagacaacctggggaaaacacctgtaatacatttgcaaaagcacctgttccattgagcctagaccccgctttccaccattgtatcacattgatggagagttttccaaacacaggagagaggttcaaatgtcaaatgtccaattttcatttctgaaaagaaaactgaagaatcatgcccacagaatatcatttatggaaaaatgataaataatgctacacttgtataggctaatctatatatgtgtgcaaatacatttaaaaaactttaagaagcttatttaccaaactatgaccatggagaggaaatcagggaaggggatggcggttacaaagaattttggtttgcctattagtttgaatttctcaacaagaatatattcatgtaacacttgttaaatttaaaattaatttgagagcatgcaaatcatccataaaaatcatctcctcaaaatttctaaatgtttaaaacctaagcaaaataactattttaaagcgagtgatttggtttagacaaatatagttaggaaacagcttacttatagtttctgtactacttaatagtacaaaggaaatccctgaataattgagatagtccatgtattaatgcccatttttgcaactcatagtctgtattgtcttcaattgctgtatctttgcttctaacaacatattgttgggcactctgaattctattaaagtatagatggtggcttattcacatttttatttcaagtttcatctggcatatagtaagcacacagtgaaaactaaatcgaattaagcaactctgttttgtgagatccttcaaaacacataaatttcatttgttgggccgggtgcagtggctcatgcctgtaatcccagcactttgggaggccgaggtggtggatcacctgaggtcgggagttcgagaccagcccgatcaacatgaagaaaccccgtctctactacaaatacaaaattagccaggcatggcagcgcatgcctgtaatcccagctacttgggaggctgaggcaggagaatcgcttgaccccgggaggcggaggctgcagtgggccgagattgcgccattgcactccagcctgggccacaagagtgaaacaccgtctcaaaaaaaaaaaatgttcatgcgtttgtttccaaagcatacagtataatgcttagatcacttattgagcccttgccgaatgccaaggacttttctaagtcctgtactttacatgttttaatgcatctaatcctcacaacaattctgtgaggaattgttatacaatcctcattttatactaggaaaccaaggcacagaaaggtccagtaatttgcctaaagacattaagagctggaatttaatctgaggcaatatggccagagttcagttttaaccattacaatataatgcttcccaatcactgaatgaaagaatatgtgtacagcccttggtctacaatgcgtctctgaattataacatcattcccagggaaacaatcaaagaagccctattctaagatactgtattgaatatcagcaatttgggtactgttgtacgatacaatagatagacagatagatagatagatagatagatagatagatagatagatagatagatagatagggtatagtatttgtaccccttcaaagaattgggagcttattggtttaattatatctagccgactagtataatggctaggtttactgccttttgtgaagctgtaagatttgtttatgagtgtcaccatccactataatgtttaccatcaatcttgagagaaaagaaatgtttgaaccatagtaacttcaaggagtgtatccttcaatttctcagcatgtattcatggtatatggatgtgagtgtttccatataagagaggggtagagtccaggagcctgaacacggaggttgtcatctcagctctactgggtgactctgaagaaattatgaccttatctgggcctccatctggaaagaaatgactaggtggagcatctaggtttgctttattttttcagtagtgggccttgagcacaatgtgatgaattatccagggattgttgaagggcatcaaaagggtccagctcactgtgggcaactgttttttaacagttcagagcctgaaatttttgggcataagatacttttcccagtggccttcacaccctcccacctcatgattgtgattataataattaacaattaacctggcagagttaagaaaaaagatataaaattagtaccctgcaattgtctgtcttgatctgtaaggtcatccttcttccaaaattcctaccctatcttccatctaaggtaaattctgagtcagccagttctggtactggatttggttacagagaattgggatccagttttgaaaaggccggaaaaacgtgcaaggtctaacaaattcaatttggaaatggcaaggattggttttggaaagaaaaatgactgaggatatgaccgggtgaagacagggccaagcagccaagttcacatcattttctgggacgaagcagagaatggggaagacattttggatggggtgttgcagtctgtgaagactgatggggaaagggggtttttaggatgtttgcagcgcattaataatccactcccccacccatcctgtaactgcattcaattgtttggggttttttttccccctgtatgctcattacggagactaggctatgtaaatccctagctatactcacattatatactaccatttatttggcatttatgtgtcaggtattgtagtaagcacttaaacatgcattttctcatttgacccaaaaaagaaaagaatacaccaacaaaaaacctttgagtttgctattattattaattactattattataatttcaattttagggataggaaattgagactcagaaagataaaatgacatgtctacattaattggtgggtcaagatctgaagccaggtctctgtgattccactgaacaaattatttagcatgagcctcctccgccccaggcactctaggaccctggatctaggcatgaacctgacgaagtccctttgctcgcggaatgggctatccagaacatcatcagagtgaaaggtgctatgtacacagtaaaatggggaacgagccgctcaaaccctactccatcaggactcttgggggtgggcgatttccgcccccggcccggggcgttgcattaggtcggggccgtcgggtcgtggtgccggcggctggctgggcgcggggctggcggtgcgggtcgcaggcggctcccagcggcaggaccggcagcagccctccctcacccggggcgccgggaccacggacgcacctcactgtggtccggccgctggcggcgctcggggacccattggccccggcccgcggcaactgtcggccccgcgcggcgcccgccctcatgctggagcccgggagtccctcactccacctctccctgccacgccaagggggcccgcccctcccaggctctcctgcctggggcgacccagtcccacgacccggtccggcccagggacaccccgacccacctccccactcccgtcccgttagaccgcgacccgtccctgggaccgcctaatgtgacacgcccgggaccctccctgcaggcgactccctgcagggcccccgccctggacactccctccaggtgaccccgttccgctcgctccgtgaggtgaccccgaccctctccggaccacctcctcaggtgaccccgaccctctccggaccctccccgaccctcccctcaggtgaacccgaccctccccggaccatcccgtcgggtgaccccaaccatccccgaacccccccaccctcccctcaggtgaccccgaccctctctggaccctcctcacaggcggccccgccccaccccgggaccctcccgccaggtgaccccgacaaggccgggccctcctgcctgaggtgactcctacccggctggggacccccgaggcctccctcgctccttaagtgagggcgactccgctcatcccgggacaccgcgccttctcctgtaaactcgacgcctgccccgacggccgaattccagaaggttcctcgccgccgcctcgccttcggtcgcgccccagcgcccggccagaggcggggaagcccttcccccggtgccaggagtgacgagggcccaaggaaagacagtgcgtgaggagaaatggagaaacggccaaagtcgagtttccgggtgtgaagacttccactgctgcgaaacgcacgtgcgcagagtcattcctgtcagaggccaccgcgccctcgctcggctaccgccgctgcgcgccccctgctggacataggcgcgggcacagagcagtgcgcaagcacgggctgccgcgcggccgggtgcgaaccgcgtactcgcagggtggctgactgcgcacgcgcaagtcagagcgccctctgccgggcatgggcgacatgcagggggcaccgcgcaggcgcggggttgggctggccggagcggccgaggcggccgggggtggaccgggcacctgcaggggcggccgactgcgcacgcgccatccgcggcgccccctgcaggagccggagcggccgctgcgtccgccagtagcgggttgcaggcgcaccctcccctccagggcggccacgcagctgtcagtgccgccgccactgcgaggctggagcggagcccgggtggccgagggaggggaccccgcgagagggccgcgcgccggccgccgccgccccggcgcccaggctcggtgagtgccgccgggacccgccgctcgcgcgctcgttcccggggcttgcggtccccacccgggtccgcccttcccaccctcgccggccagctcgggcctcgggccccccccagctccggcctggcctgcgggcccctcccgcgaccccgcatcccctccggccgcgcccgcgcccgcccctcctgccgcggcctcggctccgggcgctccctgcaggtgccgctccctcagcgtcggctcccatccgagccttgggcgtgtcccgcactgcgggcagtgcctgagcccgcgccgcgcggggaagctcgaccctgcggagactcggcacggcccgggccctctgtgtgcgcccagaaggtggatatgtagcgaccgacagccccggccccgagggatgcaggcgtccgccgcgcacttgcggagatggcgccgctttccggccgcagggatgccgggcgcgcggtggcaaagccgcccgggttggattccgcctgctcccaccctctggttccgaggagcctccaaatccgaatccaaggcccacggtccgcggcgggcgtttgctgcgccctccactgtgtgggaacgggaaaggggagccgctagtccaggcggaggggcttgtggcagtcgccggaggccgcgttctcggcgccctcggtcaggacgcctgtgtgcatcgcgtccgtgtgtcttggctctgttccaagccggctccacgcttcagaagggccgggacggccttatggtcaggggcgtggggaaggcgcttggtgtctgtcgcacagatgaagccatgtcctcagggggtaattgccgcttgttctccgggttacgtcctggactgtgcactccgggaaggcgtcgattggatcttgttggggtttgtgttcctggaactccagaaatgcccgctgagtgagtagccgagaccccgcgacagcatggagcccaggcagggagcacgtgggagaggttcactcttctcctgggcatcccgtc

SEQ ID NO: 6883 - DNA, 6000 bp, Homo sapiens
agcccctagttctgtggctttggaggttaagatggagcttgtcagtgacgcccaggaggtggtggttctatccagaggaagaacgcacggaagagtctccccaggcagcccagccgagtgctccaattaaagccacgtccctgctccacttgtttccctataaccagacgccctgagagatacgttctgagatgggtaaaatagctgatgaggaggaggaagcctgaacagaaattcctgaaagggctaagagagactccccaacacagccaagcctttccaaaagccaggaggaggagagaggactccgactccggccacaggcccagggcaacgtgctgggccccggagcgtcctgctccctggggccccagggtaggtgcggcccagctcaccccagctcacggtcacaggctcacatgcagctctcacacagcagcagccaaggcccaggcaggaaccacaggcagggcctggggaacatctctgccccctcccaggccccgtctgtactcgcttagctaaaaagagccactctcgtcattagcagtgtaaaaacgacaccttccctctcagtttggatctggcctggcacacagggtcactgctgagtcacctgtgacttgggggtagggaccagggagggtggacacagttgagtcagaggcaggtctgtgggcagcaatgtctgcctctcccccacgggagctggagagcagtggcaccgtcacagctcactgcagcctcaatcacctgcgctgaagccattttcacacctcagcttcccaagtagctggcaccacaggcacataccaccatgcccggctaattttttttcttttttttagagacagggtcttgctaatgttgtccaggctggccttgaactcctggattcaagcgatcctcctgcctcagcctcccaaagtgctgggattacaggtgtgagccaccatgcctggccataattatgcagttgtaaggtcagctgattaattcatctctctatataataacatatgcacaggttgggagattaggatgagaacatctgtggagaggccattattctgacttttagagagaagggcctaggacaggaattcccagtgctcaggtttaaaggaaatacaatgtttctatcaccggtacatgaaggtgcccctttctctgcattcctaccaacactggatattttccacctttgggactttcagcagttctggagccagcccattttacagcggggataattgaggtttaaggaggggaaattacttgcctaagatctcatgcaactttctgtttcctgactcccagtcaagtttgattctcccttggcgtggcttatatgggaggatatttacctggtggcttggaaaccactgaatgactttgtcatcttctatccatccatgtatctctatctgcagcccagcaaatgtatattgggagcctcagacatgtgaccagggccttgtgggccagaagaaggcgggagaccatgctgttgtttttgttttgttttgttttgttttgagacagagtctccctctgtcacgcaggctggagtgcagtggctcaatctcagcacactacaacctccgcctccctgggttcaagtgattctcacactttagcctccctagtagctgggattacaggcatgcaccaccactcccaactaatttttgtatttttagtagagacggggtttcaccatgttggccaggctggtctccaactcctgacctcaagcgatccacccgcctcactctcccaaagtgctgggattacaggtgtgagccacctggcctggccagtgctcttgtcttttgagagcccccttttctctcacctgatctccctgccccctattttcccctttagtctcctttccagacgctactgagtagctgcagggtcagtctagaaatgccaaccaggttgggatccttgctgggagagcccttccttccctggctttgtaactcagggccttctggtgtgcacacctgcagggtccaggctgggcctgcccttctagcttctctctgtctctccctgagattggaatcctggctctgtcctcaactagcttgaaggggggcccccaggaatggccccttctggatttcatacccttgtgtagtcccgtttcactttttataacatttaaaattttttttttggttagagacagggtctcactttgttgcccaggctgctctcaaacacctagcctcaagcagtgctcctgcctcagcctcccaaaacacgcccgttcactttctaccagggttgttgtgtgtgactagcagatgtgttggaagtgatgatgtgtcacttccgaggttaggtcattaaagacgcggcggcttctatcttgtgtgtgttctctttctcttgggccactcgctctggggaaagccagctgtcggggcttcaaaatacacacgcctgggaagaggcctcactggtgagggacagaggcctccagcccatagctgtgggaacgtgggaatgaagctttacgtgcatccttcggccgtgctctagcctttagatgactcagttctagctgcattttttttcggggggtgggggacggagtcttgctcttattgcccaggctggagtgcaatggtgtgatctcagctcaccgcaacctccgcctgctgggttcaagcgattcttgtgcctcagtctcctgagtaactgggattacaggtgcctgccaccatgcccagctaatttttgtgtatttttagtagagacggggtttcactatattggccaggctggtctcaaaatcctgacctcctgatctgcccgcctcggcctcctaaagtgctgggattacaggtgtgaatcactgcacctggccagccctggcagcatcttgatggcaagttcactgagccagaccacccagcccagcctctcctggattccagacccacaggaaccatgagttagacgtctttgttgttttacacatttaaattttggggcaattggttacacagcagtagattactaatacaccagctgtagggctttgggcacgttccttagcctctgcaccccatttcctccctcgtgccatgagcgttgtagaggtgagtgaggaacatgtagacacagcacaggaccacatacgtgaggcagctttccagcccctctcgagatggttctggtcatcctcttgcccatccctggatggaccgtgacttcacaacatcaggccaagttattgcattcttgtcctgaggtcatccattggtcatggacagaggttctgggtaggaaaggatgagataaagagtggggtcagtctccttcctccagcctgggtccggagaatcttgctgggccaggtgagacatccgctccctgtgtggtgtcctaggatgggcagctggacctgaccagtggggaggtttctctgtgtctccagagggcagaggggctgcctggtctggcttcccttgggcttggccaagcattctggctgccactgaggcctccaggacaactgagaactgtcctttcttccttgcccttcagctgcccctgtcttctctgcccctggtgcctgctcagctgctttcttcacaggacagccttcttgtcacccttggcccctgccccgaggctcctccaccccaggctctgtgttctaaagttcaccgtgtacaatttcctcaagttgtttctccttcactgcttcccttttctctgttcattactcaagatctgcatggccatgtgtcagtataaaaaaaaataaagttggccgggcggggtggctcacccctgtaatcccagcactttgggaagcgtggtgggcagatcatgaggtcaggagttcgagaccagtctggccaatatggtgaaaccccatctctacgaaaaatacaaaaattagctgggtgtggtggcacgcacctgtagtcccagctactcaggaggctgaggcaggagaattgcttgaacccagaaggtggaggttgcagtgaaattgccattgactccagcctgggtgacacagcgagacttcgtctcaaaaaaaaaaaaaaagttaacccatttcagttgggtgcagtacctcacgcctctaatgccagcactttgggaggccgaggcaggcggaaagagcgagaccatctcaaaaaaaaaaaaaaaaaaaaagaattgcttgaacccaggaggtggaggttgcagtgactagagatcgagccactgcactccagccttggcgacagagcaagactccgtctcaaaacaaacaaacaaaaaaacctaaaatacaaaaaacacaagcaaaaaatcatgattgacattaacaactacaaaaagaaaaacaaacaaaaaaaaaaccgccacaaaatcatttataggtaaggacagaagttctgaggctgcctccaggactatggacagtggtaggattggttgttttccgctttatgaatgtgacttatagcccagatttccttccgtgaacgcttgttagttgtgaaactagcaaagttgcgcctccgcatttacgcagagccggctccggagtccgagccccgggttcgagcccagccccgctattacctcgggcgtgaccttggccggagccaggtcccctctgagcctcagtttcccggtctgggagctgggaatgacagctcgccccacccccgcagagccccgcccccggggccctgggattggttcgcgcgaggtccccctgcccaggcggggccgggcctctcccgcccgccaggccccaacccggaaatgcagctggggcagaggcggggcccactcagaccgcggcgaagggacgatgggcgcggccaatgggcgcgggcggcggcggcggtgcgacggaagtcctgcctggcgtcgcgcgggggcggggcgtcgcggggggcgggggcatcgcggggggcggggcgtcgcgggcacagcgtgagggccgccgttgctggagttcagcttagggaaggaggactctgaggaggccccgagcggcggagcgcttcgggggaggcgcccgcgcagacgcgaggcccatagccaggaccaccacctagctggtgagcgcgcggcgaggcggggcggcccggggtcccgagggtcgggtgccgccttacctgcggccgggcggccgggccggggatggcgggcgccggccgagggcgctgcttggctgcggcggggagaccgggcctgggttgcgtcgggcggcggcctggccgggggcgctgacagacgcgcggagggcgggggaggccgggaggtgtcacccggcccagcggggtggaagtgcctggaaagtttgttttcggcttggcgcagcctggagccgagcctccagggttacctttcggttctgtctgtagaggaaccgccctgggcttccacctggaacggggtccttggcgcctccgcctgcgagagaagcagaaggtgcaagttcttgctgaaagcacctgatgctcctgggcccccttttccagattcttgatgacattggtcgggaaaactcgcctttcacggcccggccaaggggcatttgggtgcttttgctgcccgtggctgtgctcagcgttgtgggaagcccctgggaggccgaatgtgcaggatcaccgaggggaaagtgagcttgacaggtaggagggattttaggggaaggatcaaaacaaaccacttgttgggtgaaatgttttgctaaatgtatcgctggtgtttattttctctctgtcgctaaaagtatccctcgtgtttttatgttttccatatgctaagttctacagtctggggacgacggtttaaaaatttatgccttgcatgcgatgtgcagtgggtgatggaagaacgtctacatggctttaaaattggatttaaaaggcaaatattttaaatgaaggaaaacccaagaagtttacttgattccttatcttccaggatgcgacttttgtttatttatttattttattt

SEQ ID NO: 6884 - DNA, 6000 bp, Homo sapiens; identical to SEQ ID NO: 1857

SEQ ID NO: 6885 - DNA, 6000 bp, Homo sapiens
tgggaacccaggagcccctggggacctggacctggtgggaggtgctcagctaggccagcctcagctccatgccctgacagtcatttcctcttctaggagcccttgctctgagctgcttctctggcgctatcctggcagcctcatccctgaggccctccgtctgctgaggctgggggacacccccagtcccccctaccctgcaaccccagctggggacataatggagctctgagtgctggtggacagtgcccctcccaccttccttcttccccacaacagaagagaccagcgactcccgcaaagggacaaggttcctccctctcctgcagagtaggcatctgggcaccaagaccttccctcaacagaggacactgagcccaacggagttctgggatgggaggggtgggagcatgggaagggaggcatcccacccccaagaagaactgaataaagattgctgagcaaaggaaggcttcagtctggaacctggggcttttggggatggtggagagggcagaggcgcgggatgctggggtttctcctcaagatcttccctggaaaactgttagggccagccaggtccttgccggctgagttccaggcattgagaatgtgtgagtcagagcctcacccccgcccccgcggctggctgactcactccctccctccagctcaggggagtcagtcggggatcactgcctctccaaaccatttaaagttaaagattcttttattaataaattctccctcccctccaaactctccccaaaataaatatctcctccccgctttggggagttgggggggtctgtatcttagggccagccctcctagtgggccagccccctagtgttaaaaataggtccctaaccccccagggtgacccccgtggtggaatttcaggacatctgagtgagtggggcctagtgtcaagtctgccccccaagtcagcctggcccccagggcctctaggaaggagggcacccccctcccctgtgcaaatgctgcagttccttagtcagtgtcagctgttttgtgtgagccagcgtgaggctccctttctgttctggagccagaggcagggcaaccagacaccttggaaggttcccctgaaccctgggcccaggcctcagaggtgattcaccgccccccaccccccttgtggttggaggagcttggctcccgccgcgtctgggaggcagagactggctctagaatggatgaatgaatgatgagtgggcgagccccggctggcagggggcacattgtcactggatcagcgccacagctgggcagccctctccgccggtctcctctatgggggctgcaagataagaggtggggtcgtcagcagcagagaaaaggtcgagtgctgacagggctgggcaggccagggcacacttactggtgaacttctctctcctgcggcatcgtctccagaccaaaaagccagaaagcagccccagcacgaaggtcaggctcagagcgcccccaaggatgggccaaagcagccggaagggggcaggaggtgctgcagcgcctgggggcgggactcggagtcagacctcgcccctctccaggccagccccgccccctaagactgagccttctgccttctcccaaacgtggcctcctccctgaccggagccccctcccagctcccacctcctcccgaatgatttcccagatgcaaagctctcggccccgctctgcgcaccagccaccctccctcccagtctggggtccgctggccactggccctgccccccactcacagcccaggcagaagtcgctgtgcggtcgcgccctgcaagacgcgcagtccatgcacttgtccaggtccgcgctccaggagctgccgcgggagcagggggcggtgcctggggagggggcctcgggtcagaggctgggggcgggactcggctattctggggtctgaggtcagggtcggccggctcgaataacgtgagtcaccggcgccctccccgcgcattcctcacaggtgaccgcacggcccgaccgggacacggcagctccgggagggagggcgtagcgcgggacgctgggggtggggggggtcaggtccccacaacccccctgccgccggcgggtgactcactcctgggcaccgggcccgaccccagtccctccccccgcatagctgggcactgaagtcaccggatggaagggggcaccccacatggtatagagggcacagaccctagtgcctctcgacggcctccccaactcgtcgatcactggggctagttagaccctgtacggaccaggctgggggcgtgccccttcctagactaaacatcccgccctcactcactttctctctccattcgaagtacttcggacttgtggaactgaagaccccccccaaccccaattggacggtgggagaaactgaggcccggattgtgaatgaagcttggagagtgatggaacttcccacagccgggagcgagctgtttgaaggccacctgaccccagatccccacatccgcctgttcccccagttcggcgctgttctccagacacccagtccggctcccgagccccggcccggggttccccgaccccggagtcccgcgtacctggcgcttgctccccggccacggagcgcagcaacgccagccagagccccagcacgaggagccgcagcaaccggcgcagcgagccccgagccatagtgcacgtcctgcgcccgccgctgtctgcgcccgccgccggccggcagggacccacggccgccgccccgcccccgcccccgccttccggggcggagctctcgcctccgcccgccttgaggtccgcttcgggacgccccgccccgcggcgcccgctcagttcagtcattcattcaacaaagtcctggcgcgggagctgccaggaccccgcagggacgcagacccccttccttgcccagccggtgatctagtccagcgtgcgtggtgtggggaaatcaaaaattagacacgagtgctcgcttcggcagcacatatagaaatcagacacgaacggccggacgcggtggctcacgcctttaatcccatcagtttgggagtctgaggcaggcggattacgaggtcaggagttcgagagcagcctgaccaacgtggtgaaacgccgtctctactcgaaatacaaaaattagccgggcgtggtggcgcgcgcctgcaatccgagctactcaggaggctgaggcaggagaatctcttgaacccgggaggcagaagttgcagtgagccgagatcgcgccactacactccagcctgggcgacagagtgagagtccgtctcaaataaataaataaataaataaataaataaataaacaaacaaacaaacaataaaaagaaatcagacacacgaccaatccatgcagagatcactgcagcttccttccccccacctccccttgagattgcgtctcactcttgctcagcctggagtgcagtggtacgatcacggctctctgggctcaggtgagcctcccacctcagcctcccaagtagctgggaccacaggccctgccccaccacgtccggctaatttttgtattttttgtagagaccagggtcttactatgttgcccaggttagcctggccactacagctttgttaagggcccggggggtataacaattaaacctgaggtcaggagctcgagaccagcctggccaacttggtgaacccccgtctttactaaaaataaaaaaaagaaagaagttagccgggcgtggtagtgggcgcctgtaatctcagctactcgggagactgaggcaggagaatttctggaacctgggagacggaggttgcagtcagtcgagatagcgccattgcactccagactgggcgacagagagggcctccatctcaaaaaacaaaacaggccgggcgcggtggctcacgcctgtaatcccagcacattgggaggccgaggcgggcagatcacgaggtcaggaaatcgaggccatcctggctaacacggtgaaaccccgtctctactaaaaatacaaaaaaattagtcgggggtggtggcgggcacctgtagtagtcccagctactctggaggctgaggcaggtgaatggcgtgaacccggaaggcagagcttgcagtgagccaagatcgcgccaccacactccagccttggcgagagagcgagactccatctcaaaaacaaacaacaacaacaacaaaaaaccagcaacataaaaataatattatctggccgggcgcggtggcttaagccggtaatcccagcgcagtgcgaggccaaggcgggcggatcgcttgagtccgggagttcgagacgcctgggcaatataacaagaccctgtctatacaaaacaaaacataaattagctgggcacggtggcgtgtgctgcctgtagtcccagctactcaggaggctgaggcgggaggatcgcttgagcccagaaggtcgagactgcagtgagccgtgatcgcaccactgcactccagcctgggtgacacagtgaaaatatttctctaaaataataccaatagtatgccctttaatttgtaccttaggacgtagttacataataaaatgcagacttgttatctccattttgcagagtaggaaacgaaggctcgggaaggttaggtgagttccccatgtcaccgcgctgcttaagtggtgaagcggagtctcaagctctgttctaccctaagcctggcgccctcaccctgggtgagtctggacgtctgccagcccgaggcgggcccagcgaccccagcctccagcgcccccctctgacaagcctgggattcgcacgcccgctgccgtcagggacagggtctctgcccctcctccggggcggtggtccagtgacgtcaccgcttctttaagacccccgcctccgcccctgtcccgacactcggcctaggaatttcccttatctccttcgcaggtgagtccggggctagtgtgcgtgttggagagacgcctcttggggccgggtgcagggtggtggcggcgtgggtaggggtgcgtgcgaactcgggctgcggccacctggatgggcgagtccctgagggggtcggccggtccgcgcccaagcctccgaggtgatagggtccttcggggctcccaagggttaaacgcccctcccccctccccagggacaaagactccgaaacccctggcgcccctcccccacctgccttgcctctcggggcggggcgcccctcccccctccccctcacctgggggagcggaccttgcggccactgcagctatagaacccctccagggcgcgcggctcccaggctggggtggtcgggtgggccggggcgccctcggacagagtctttttcatgcagtgcatgaaaaagaaaggggcaggggcacactcagaggggagaggcctgggcgcctataccagcgcggccccgaccctaactcggccagaggcctaagggccggacctgagcgctggggcaccgtgccccagccagtctccccaaggtggtctgctccgcccaggcctggggcccccggctaatgagtagagcctgccctccgaccgctgccggccgggaaaagtttaggtccaagccgtacaatgaaagtactctgggcagtgggaggccacagcccggccctagtcagaagtgattccctccacgacctccaacactgaggggacacaggtgcaggccaggtggcggtgggagaactggtgttgaggggagtctagcacggcattttcgtctagaattcataggaaaaggccctcagccttgaggctatgctctccggcgcctagggcaggtcagaagggtggggccagggagttatccactggctttgggggaggaactgcttttagatgggggattaatgatgcttttcttcatctctcctggtcctggtgtctgccagcctggggtgtggaaccaagttgtgagggacattgggtggtgggaggaagcttaggatctccaatcttagtgttgaaatta

SEQ ID NO: 6886 - DNA, 6000 bp, Homo sapiens
ttagctgggtgtggtggcatatgctcatagtctcagctacttgggaggctgaggcaggacaattgcctgaacctgggaaatggaagttgcagtgagctgagatcatgctactacactctagcctgggtgacagagtgagactccatctcaaaaaaaaaaaaaaaaaaaaaaaaaaaaaagcaggtacgttcctacaaactcaccctcatcagttgaaagagaaaaagactcaaagcttgtaactgcagttttggacgcatgatcaggccatagcagggaatcccatcttccagcagatggttctccaagattgtggtccacctgacaaatgaaatcacgtaggcactgccgagtcctcaggggccggtgtgatgagaatggctacaactcaatcattatgcaacttatctcaaagcctgtcatggttgccacccagtctgacctctgatatcctggagccaaggtcctcacccatcatgtgaatttgcatgtgagggagggtgaggaggagacactgaggcaggcaaggcattctgcaagcttttgcagagttttcatggacacattctgattcccactgtgtccaggtgggagttctgtacacatcacagatggaaaaaagaaactctctgtggatttggcagcaccctggattggatgtttgaagaaagctattgcatctgccccgtatcttctgtgaatcgggtacctttatgcttctgggaggtcaagaagaacccagaaccctccagtgacttccctttgggtcttggcattatgagaagatggttaacctcctttatagaactctccttcacatccaatccttcagaaagcctaattgatcccatcttcttaacccaacccctcccctggacatcgttcctaagccccttaaagaaacagatggcggctgggcacggtggctcacgcctgtaatcccagcacttttgggaggccaaggcatgtgaatcatgaggtcaggagttcgagaccagcctggccaatatggtgaaaccctgtctctactaaaaatacaaaaatcagctgggcatggtggtaatcccagctccactggaggctgaggtaggagaattgcttgaaccccgggaggcaaaggttgcagtgatccgagatcgcaccattgcactctagtctgggtgacaaagcgagactccgtctcaaaaaaaaaaaaaaagaaaagaaaagaaaagatatggatggcatatccttgtacctccagggcctgacacacagtgctggcaccacagccccagtcccccggggttgatggcatgattcactccctgacctggagactggggaggcttgtcagcttataggtttccacagcaggcaatgtggccgaattgcttccagagaagtagggaggtgagtatgaccattacttgtgtctaaaaatccgacgtgactaacttacaaacacataagttaccacaaatgatttagggaggaggaaagaagtgcagacaggcaagctttcagatcgtttcaggaaaccaggaagcagggagcacagcgttgcagccagcaagggaagacggaagctgtgagtcctggctctgagggcctcccatccagttgggctgatggatgagacaggtacagtctgtgctgggccatcgtgaggcttgcagagggtagtgccagggtcacacaaggcgtcatggcctcagaattctgagacctggttttccatctgaactcatcacccttagtgggagacctagggtgcgtttctcttcaatcctgggtttcacctctctaaacaagggacaatagtatctacctcagagggttgtggcaatgaccaaatgtgtcacaggtgaaaatgtccagtagtttctggcatttatgacgtgttcggtcaatgttagttcactattgttatcccatttactaagcgaatgcatgtgacacaccatgcgtttctgaacctcgtatgtgagagtgcctggcatagaattgatgttcattaaaggtttattttttaaatttttagataaacttattttgaaatagttttagacttgaagagttgcagaaatactagcgagtttccctgtatcctacatccagcttcccctaattttttttcccccaagatggagtcctgctctgttgcccaggctggagtgcagtggcatgatctcggttcactgcaaactccgtctcctggattcaagtgattcttgtgcctcagcctcctgagtagctgggattacaggcgcacaccaccatgcccaactaatttctgtatttttagtagagacgggggtttcaccatgctggccaggctggtcttgaactcctaacctcaggtggtctgtctgcctcagcctcccaaagtgctgggattacaggtgtgagccactgcacagggcccagcttcccctaaaaatgttaacgtcttacctaaccatagtaagaggatcagaaccaggaaattgcagatcttatgtgaattttgcccgctctcctgctactgtcctttcctgttccatgttcccaaccagcatcccatgttccatttagttgttgtatctatccccttagggacgattcctagattgtgacagtttctcagtctttgtctttcaagacccaaagtgtccaaggacacttttgatgggtactggttaatcactttgtagaacaggtctcaatctgggtttgtctggtgttttcttgcgattggattgagattacacacttctgcaggaataccaccacaatatgttgcttttagttttttcctcctttattgtggtaaaatacactcaacataacatttaccatttaaaccactttattttattttattattattttttgagatggagtttcactcttgttgcccaggctggagtgtaatggtgcgaactcagctcaccacaacctccgcctcccgggttcaagcaattctcctgcctcggcctctcgagtagctgggattacaggcatgtgccaccacgtccggctaatttttgtatttttagtagagatggggtttctccgtgttggtcaggctggtctcgaactcccgacctcaggtgatccgcccacctcggcctcccaaagtgctgggattacaggcgtgagccaccgctcccggcctaaaccactttaaagtgtatgattcaagggcagtatgtagattcatcctgttggatcatttctagactttttcatcatcctaaaacgaaaccccaagctgcttatcttcctcccctagcacctggcaacctccaatctgtgtcgcctctacggatttgccaattcgagacatttcatctggatggaatcatacgctatgtggccttttttgtttggcttctttcactagcataacgtttcccgggttcctccacactgcagcatgcatcggtgctccattcctttttgtagccgaataatattccattgcatggacagatcacattttacttttattttctaattcaacagtgagacctggtgtgggccccggcgctgggcctgggaggcgagggaggggatggaagagagccccgtgactggcaggaggcactgtggagtgtggggagaaggggtcgggatctgcatgctagagagaataggattttatttacacgtggcaatgtttatggaggccaatgcacaactgccattatgggacgcggactcctttgaaagtctcatttgtgtaaaaggaaaagcagtagttcatgaggagggggagaagggctcaaggacagcaaggtaaactacccctggggcgggggaacgtggtcgtcggtgggcccagctttggaggctaggcccgtgaaggtcgccccgtgagcaggtccagggcaggccgagtgccccggggcccgcattcattgcttacagagcaaggggagcctcccgggagggaaatccaacggttggaaacttcgatttatcccaaaggcgtgccgagtgggaaggcaacattttgatttcccaaacgttgcggccagcggcttcttccacggcaggcgccttcaggtctctccgcagggtcgggaccccgggcggcgcgcggcctctgggacgccgagggagggcgggcccacagcgcccggagcgcggacagcggccacagcccgccgcctagaagcggcgccgcccggggcggggggcggagccgagcgcgcgccccgccccgccccgccccgccccgcagccccagcccagcgcgcgcaccaaggcggggcggcgcgcggcccgtgcgcgtgtccggggccaggaggcggtggcggcgagcgcgggccgcgcgtgcgcgctgcggctgggcgaggggcggcgcgggcgcgcgtctgtcagtgacagcgggcggggcaggggccggagatggtggcggcggcagctcttccgacatgaggcagcggccgcgggggacacggcggcgggcgcggcggcggccgcatctctagctcggggaggcggcccccggcgtgggcgcgggcgggcgggcgtcccggccggcgtcgcgggagcccggctctgcggcagcgtctgcaccgccgcccggcgaggggcccgcgtccgtggttccacgcgctcggtcccgggacagctgcggccgcggcgggagcggcggcgcactcggggggaagcaggccccactagacgggccgcgccgacgggctccgcgcactcgcagcccggggcgcccccacccccagcgcccgccgccgcgggcagggccggcccggagcgcggggggcggccggggagcgcgagccgggggcgcccgccgaagctcgctgctccgggtcggggtccgggcccggggccggccgcgcgccgcctttgacgcatcggagcgcggctcctgcaggatggagggctccgcgccgccagcggagttgtttgtgcgcaggcggctcgcggggctgggagcgctcaaggtctgaacttccctccggagccgcagctggaggaggcgagcgcgcgaggaggagaagccgcgcggcgcggaggccaccctcggggcgagaggcgcggaaggcgagcgagcaaagcggtcccggagccacggcggccacgcggcggggacccccgggcgttctaggtccgtcccgagcggttctcgtgcgcctcgaaggtgggggcggtgggggcggtgggagcaccgctgagccgggaaccacaggaacagatggtgcctgtccaggtcgcgtgctggagccgccccttaggacaggagcaggtcccgggcctctaggcgtgcatgcctaggtgggagcgccgctaactctccccgttttgctggcaggtactggtgaccccggccggggcaggccccgggactcgacaacatggcttccccaccccaccagcagctgctgcatcaccacagcaccgaggtgagctgcgactccagcggggacagcaacagcgtgcgcgtcaagatcaaccccaagcagctgtcctccaacagccaccccaagcactgcaaatacagcatctcctctagctgcagcagctctggggactccgggggcgtcccccggcgagtgggcggcggaggccggctgcgcaggcagaagaagctgccccagctgttcgagagggcctccagccgctggtgggaccccaagttcgactcggtgaacctggaggaggcctgcctggagcgctgcttcccgcagacccagcgccggttccggtatgcgctcttctacatcggcttcgcctgccttctgtggagcatctattttgcggtccacatgagatccagactgatcgtcatggtcgcccccgcgctgtgcttcctcctggtgtgtgtgggcttctttctgtttaccttcaccaagctgtacgcccggcattacgcgtggacctcgctggctctcaccctgctggtgttcgccctgaccctggctgcgcagttccaggtcttgacgcctgtctcaggacgcggcgacagctccaaccttacggccacagcccggcccacagatacttgct

SEQ ID NO: 6887 - DNA, 6000 bp, Homo sapiens
cacgcctgtaatcccagcactttgggaggccgaggagggcggatcacctgaggttgggagttcgacaccagcctgaccaacatgatgaaacctcgtctctactaaaaacacaaaattagccgggcatggtggcgcatacctgtaatcccagctacttgggaggctgaggcaggagaatcgcttgaacccaggaggcagaggttgtggtgagccgagattgtgccattgcactccagcctaggcaacaagaacaaaactctgtctcaaaaaaataaataaataaaataaaaattaaccaggtgtggtgttacacacttgtagtcccagctacttgggaggctgaggcaggagaattgcttgcacccagaaagtcaaggctgcagtgagccatgattgcaccactgcactccagccttggtgacagagcaagaccttgtctctctctaaaacaaacaaacaaacaaaaaggccgggcgctgtggctcacgcctgtaatcccagcaccgtgggaggccgaggcgggcggatcacgaggtcaggagatcgagaccatcctggctaacacggtgaaacccccgtctctactaaaaatacaaaaaattagccgggcatggtggtgggcgcctgtaatcccagctccttgggaggctgaggcaggacagtggtgtaaacccgggaggcagagcttgcagtgagccgagatcgcgccactgcactccatccagcctgggcgacagagcaagactccgtctaaaaaaaaaaaaaaagttcttttcacagccttgtcagggttgttcttggagtgggagagggaacagggagtcctattcccttacctacccttcttctgccctctctcccagctgctgaatgccatggtggcaaaactggggaaccgggaggacccactcccccaggactcctttgaaggcgtggacgaggacgagtgggtgagtagtgagtggcctcacttcccggcaggcagcgcggtccctcgcacatgccacggtgcatgcctcctcccttcccaggccctcctgactccctcccacctcttggtgtttcgccccaggactagcctgcgcccccgtcacctccacctcacctgtgctgccacttcctagtgcacacctcacggctcatcctcaagctggaagatacctctctggccccggcacatgtcacccctgcactcctgccttcccgtgggcacttccacatcctctgggcctctggcagttcccagggactgttttcacctctgctgtctctggggtcagctgctgctcatcagctgcccgctagcatgtggccaggggtgcagggtggcggggggtcagcagcatgtccctgggcaggccctgggcaccctgtctcccctggtctcactgctgacctgggctggtcccagcctggattggcctcatccaggatctttggtcaccccacgctgccccatcttgcctgctgttccagttctggtcaagggccttgggggctggccccccaccaggccttctagagcagcaccagtctcagggccctgggaccagctgccctacttcccaggtttgtagccaggagaagggggcatcacagagctgatggtccaataaggggggtgtgagccccgcagggactggcccgcacctgccttggatgttttcagcaattaaacttttttaagctggccacctcttgtgctgctgtggtctctgggctggctggaaagggaaggggacaggaatgtgggtgacaggggtctggccctgggctcccctttatctcagcctcactctggtcccaaggcccaatcacctgcgcactgctgggagtcattcgctcaccatgcaggttcctggcagtgctctggatggcgggatgctataaaggacaggagagataaggtcttgcaaggaccttcagcttcttacagcctccttatgcaggggaaccagactgcacacgagcatatagagtgtgaagacagcagtaaagaagagaaactggctgggcacggtggctcatgcctataatactagcactttgggaggccaaggtgggaggatcgtttgaggccaggagttcaagaccagcctggcccacatggtaaaacgctgtctctactaaaaatacaaaaagtagccaggtgtagtggtaagcgcctgtaatccaagctacttgggaagctgagggaggagaattgcttgaacccaggagtcagaggttgcagtgagtcaagatcctgccattgcactccagcctgggtgacagagcaagactcagtctcaaaaaacaaacaaacaaacaaaaaaacctgtgggacaggaagcaactgggatgcagcgaggcagggaattcagggcctgagaaggtgactttcagctaagagccaagacttgaaggctgatgaggagccagccagggagagagccacttccgaggcaaggaagtacaatgtgggcacagagagaggaatgtggaggccaggaggaagaggaagaagggcagcggtgtagagtaggattccaggtggcccaactttcatcccaccatttgccgaatgctgtgcgccagatgctcttccaggcgcttgacatctaacagcagagaagagagaggaaatgcttgcccaaaaggaactcccattctagtggaaggaaacagattctcaacaataaacataaaaataaagggaggccaaggtgggaggattgcttgaacccaggagtttgaggtcagactgggcaacataggggaacccttgtctctacaaagaatacaaacattagctgggcgcggtggctcacgcctgtaatccgagcacttcgggaggccaaggcaggcggatcacgaggtcaggagcacgagaccatcctggctaacacggtgaaaccccgtctttactaaaaatacaaaaaattagccggacatggtggcccatgcctgtagtcccagctactcaggaggctgaggcaagagaatctcttgaacccaggaagcagaggttgcagtgagccgaggtcatgccactgcactccaggctgggcaacagggagacgctctcaaaaagacaaaaaacaaacattaaccacatgtgttggcacatgcctgtggtcccagctactcagaaagctgaggtgaaagtatcactcaaggctggaaggtcaagactgcagtgagccatgatcatgctactgtactgcagcctgggcaacagagtgagaccctatcttgaaaaaaaaaaatttttttttggctgggcacggtggcttacacctgtaatcccagcactttcggaggctgaagtgggaggatcacttgaacccaggaggtggagatcgcagtgagccaagattgggccactgctctccagcctgggtgacagagcaagacttcatctcaaaaaaaaaaaaaaaaggaaaaataatttaaaaataaaaaaccggttgggcacagtgtcacatgcctataatcccagcactttgggaggctgtggcgggtggatcatttgagaccagtagttcaagaccagcctggccaacatggtgaaaccctgtctctactaaaaattcaaaaattaatggggcatggtggtccatgcctgtaatcccagctactcaggaggctaaagcatgagcatcgcctgaacctgggaggtggaggttgcagtgaggcaggattgtgccactggactccagcctgggcgacagggtgagaccctgtctcaaaatgataaataaaataaataagtaaattatgtggtatggtagagggtgatcagagtcttggaagaaaaatagagacaagaagggaggataagccagtcacaaaaggctgcacattgtatgattcaatttcttcttttttttcatttttcatttttaccttttttttttttttttttttttttgaggcagggcctgactctgtcacccaggctggagtgcagtgatcacagctcactgcagcctgtacctcccgggctcaagagatccaccactcagcctcccaagtagctgggattacaggcacctgccaccacacccggctaatttttgtatttgtagagatggggtttcaccatgttgcccagcctggccttgagttcctgacctcaagcgatccacctcggcctcccaaagttttgagattgcaggcatgagccaccacgcctggcttgtatgattccatttctatgaaatgtccggaacctgtgaatccatagagagaaaaatgagtggttgacaggggctgggggagggggctggggagtgactaatgggtgatgaaaacgttctggaactaatagtggtgacagtggcacagctctgtgaataaaaggcattggactgtgcacttgaaaatcatgaaatctacagtgtatggattatatctcaataaagctgttacttttttcattcatggagggcaagtcacggcgttttaaggggtccaggtgggcctcattgaggtgacatttgagcaaagatttgaagaagggaacgagcttctcaggcaggaggaatgtggatgaaacctattttgaagttttctattttctaaagtatttttgagaatttagcatcctactccatattatgttcattgatttcatataatgttgcattcccaaatattttggcaaaatcaagggcagaaatcgccccacgtctgaccgatgtgcttagctgctccagcgcactggggtaagcacgcgggcaattgagactcccggtaacgccccttgccctcccaagcccgcccccagttatccagagcccgacgcaggctcagtcaaaccccgcctccgaccccgccccgagccgctaagacgctcccggtggcccgcccttagactgaggcaatgcgcatgcccagcgccgtatcgcgcacgcgctctctgcggctttccttgacctctgacccgccgaccacgcttgatccccggccgcggggccaggaagtcggagtttgagccccggaggcagagcggctgccatggtgagccccgagtcgggcgctaccggggaggggaagccgagtcgggccgggggccgggggccgggcggcgagctccgggctgggcggcgggcgccgtgcgccccctgcgtgcccggcgggaagcatggtctgggggcgttgcacccgggggaatcgaggccggcagcggcggcaccggcggcctcagggccagggaaaaccgtctgcctggaagaggccgggcaaacgtggtcgcgctgtgcctagcccgcgtgtgagcgagcagccgtgggcagcggtggagcatgagtctggctggtgagcgcctcccctgccctggaaccttacagcgctgcagagtcgatgttgctgccctgttgttatccccagtggaaagctggcctttccagggaagtggctgacctgggacttgaactaggccccgagacaccgagcacggagcgtttgtgtgatatcgttggcacgtagagccagtcaacagacctgcgccacactgtcaggtcacctagggtagctttaaaagtgcaggtttggctgggcgcggtggctcacgcctgtaatcccagcactctgggaggccgaggcggcggatcacgaggtcaggagttcgagaccagcctggccaacatgatgaaacccggtctccaccaaaaaatttaaaaaattagccgggtggggtggtgcgcgcctgtagtccaagctacccgggaggctgaggcaggacagacgcttgaacccgcgagacagaggttgcaatgagccgagatccgccagtgcactctagcctgggcgacagggtgagactgcgtctcaaaaaaaaaattatatatatgtattatatataccgtatacatttatgtatactacatattattatgttatatatatttttatatatcatgtattttatatatatatatacacacacacacacataatatatacatatgttagccaggcatggtggcacacacctgtaatcccagctgcttggga

SEQ ID NO: 6888 - DNA, 6000 bp, Homo sapiens
taatctcagcactttgggaggccgaggtggggggatcacctgaggttcaagagcagcctggccaacatggtgaaaccccatctgtactaaagagtacaaaaattgccgggtgtggtggctcacgcctgtaatcctagcactttgggaggccgaggcaggtggatcacctgaggtcaggagttcaagaccagcctgggccacttggtgaaaccctgtcactacaaaaatacaaaaatgagccgggcacagcggcacgtgcctataatcccagctactttggaggctgaggcatgggaatcacttgaacccagggggtggaggctgcagtgagctgagattgcaccactgcactccagcctgggcaacagtgagactcttcctcaaaaaaaaaaaaaaaaaaaatttcaccaggcgtggtggcgcgcacctgtagtcccagttactggggagactgaggcaggagaatcacttgaacctgggaggcggaggttgcagtgagccgagatcacgccactgcattccagcctgcacaacacagcaagactctgtctcaaaataaagcaaaacaaaaaatagtaatgtcctcaaagggtcatctgagtgacataatcatgtaaaggcttcctatagtacttgatgcgtagccattgctcaatctgtgttggccccatgtgccaggctgtactaagcactgaggatactaagaactcagacagagttacttactcacggggagcccaaaacttaggagaaatgggggttggggggatgctgctggttgagaagaacaactttcaagtatagaagctgaaaacaagagccaaaaggacttccatttactacctcagagtgagttaggaactagaggagagctcagtaatatgaaaactgtcaccgttgtaacttccccccctttttttctttgtattttcgtttatcccccatctagttccccatagtgatgaacagtaaaaatcctccacgttgaaatggtgtgtgtgttcttgttttcagggatagcaggaaggctgattgttggggagccagtattttctattatgaagcagagaactcttaaggagtggagtggatgatggtaattaccaaaagagaggacaaagtccttgggatctgccacacagaagaaagaaaaacatgggaaagactcccagctgagagcagcctgggcctatgcctggtctctttttggttagactttattattatttatttttgagacagtgttttgctcttgttgtccaggctggagtgcaatggcacgatcttgactcactgcaacctccacctcctgggttcaagcgattctcctgcctcagcctcctgagtagctgggattacaggcatgcaccactgcacccagctaattttgtatttttggtacagacggggtttcgccatgttggccaggctggtctcgaactcctgaccttaagtgatctgcccgcctcagtctcccaaactgctgagattacaggcatgagccactgttccctggctttgttttctattttgatatgagcccaaccctatgaggtaggtagcgggaggactattcccatttttacaaacggacaccaccccgcccacaaagaaaaaaaacaacaataaaataagctctgaaagatgaaaagacttgtccaaggccacacagctagtaagtgagtgaatgaagacccaagcccaggtcttctcacaacaaaactgtgtgtttttcctttaaaccacgtgcctatcaatcgtcattgcgatcagtatctcccaagcatatggctcttgggagtttctgaagtactttctcatgcttattttcatttgcttttcacaacaaaagagaggcagggcaagcatttattactaccatgggtacaaactgctgccctgcctttcaaggacttctgctgcaactggacacaaatggatccatcccaggcttgttgccaaagactgcagaagccacaagctacacctatcctcagtgccagtcagaatatgatcccgtgttctccaggcagaagctcaaaaatgtgagctttaaggagaaacaggccgggcacagtggctcacgcttgtaatcctagcactttgggaggccgaggtgggcagacagcctgagctcaggagtttgagaccagcctgggcaacatggcgaaatcccatatctactaaaaattcaaaaattagccaggcatggtggtatgcacctgtaatcccagctactcgggaggctgaggtaggaaaatcactttaatccaggagacaggttatggtgagctgagatcacaccattgcactgccttggcaacagagactttatctcaaaaaaaaaaaaaaaaaaaaggagaaacaaatgttacttgcaaagggaacacaaagtcgtaagcgtttccccctccacactttcatttcactagaccagcaattccacagagcactttccccatctcctgagctgtggatatctgtgagagctgcgaaggggtttaatggtgctccccgacagtgctgggctgaaggcaatgggagacaagacggtctctgtgatttcttgctgaaaccactgatcatttgaagtataatgggactggccaagttcatggctgccaatggctgcaactctcccatgtgagctcagagatcttttacagagggcagaagagcctgagcccagctcttcaggggcatgatttgtcttaagtatagcattttctttacttcacacagagtataggacaattccaagtgggtgaggaatgtgtggtccagatgttctggtctgtgatgtctgtagcaggtgcagttccctatgaaaggggatgatgagctgtgcctcggtcgcctaggatccagtgggaccactgtcctgatgattttctttctttctttttttttttgagacaaaatctcgcttttgtctcccatactggagtgcaatggcatgatctcggctcattgcaacctccacctcccgggttcaagtgattctcctgccacagcctcccgagtagctgggattacaggcacctgccaccacgccttgtatttttagtagagacggggtttcaccatggtggccaggctggtcttgaactcctgacctcaggtgatccacccacctcggcctcccaaagtgctgggattataggcgtgagccaccatgcccagccacttgatgattttctttttttttctttttttttttttttttgagacagagtctcgccctgtcacccaagctggagttcaatggcacgatctcgactcactgcaacctccgcctcccgggttcaagcagttctctgcctcagcctcccaagtagctgggattacaagcacccaccaccacgcccagctaatttttatatttttaggacagacagggtttcaccatcttggccaggctggtcttgaactcctgacctggtgatccacccaccttggcctcccaaagtgctgggattacaggcgtgagctaccgcgcccggccaacctgatgattttctaaaaacctttttggactgggcgcagtggcttatgcctctaatcccagcactttgggaggctgaggcaggtggatcacttgaggtcaggagtttgagaccagcctggccaacatggcaaaatcccatctctactaaaaatacaaaaattaggagtagtggcgcacacctgtaatcccagctgcttgggaggctgaagcaggagaatcgcttgaactcaggaggtggaggttgcagtgagctgagatgacaccactgcactccagcctgggcaacagagtgagactctgtctcaaaacaaacaaacaaaaagccttttcaataaaccacaagtgactttggttcacagtaaatacacttctgcccgaactaagataaaatgtaagcattgcttttcaaaccttagaaatgcaagaatcagctgggtgcgttggctcattcctataatccccacactttggcaggccaagttgggaggactgcttgagtctcgttcgagaccagcctgaccatcatggtgaaaccccgtctcttactaaaaataaaaaattagttgggcgcggtggcaggcgcctgtaatcccagctattcgggaggctgaggcaagagaattgcttgaacccgcgaggcagagggtgcagtgagctgagatcgcgccactgcactccagcctgggtgacagggactccgtgtcaaataaatgaataaatactaaagaaaaattaaaagctattattattattatttttagaggcagggtctctttctgtctcccaggctggagtgcagtggcacggtcacagataactgcagcctcgacctcttgggctcaagggatactcctgcctcagtctcccaaagttcgggattacagacctgagccaccgcgcctggccggatgcagagcgcctggccggatgcagaggcttttgagtaggcccggtggacagggatttgctttagacctgggcccctgttccccctctgcctcttaccactggtgtgacctggggaccgacagtttacactctcctttagccgggggtttcctgtctctgaaatggagctaatttctcccctctctacaggaagaggtagatagtgctggaaggcgtgctaggtacaccgcaaagactccacagcaaatcctgcacacaaaatcgcgaatgctgcagccgagaccccacgcaagcaagcaccgcaggagacgtgggctgacagctgcgccccacgtgacctcccacccgcgccagtccgtcccctcggtatcagggcgtggcctcgcggggcggccgtacctggattggccgggaggcgggaccggtggtgcgcgcgcgaaaggagaggggcttgggggcgtggcccagggggccggagacggctgcgattggcagtggggcgcgccgggggcgtgaccgcggcattgggtcccgggtggggccgaggcagcgggagtcgcggttgctcagcgtgcacctgagacccgacgcccggggtcctcgaagacgcgtccgccgccgtgcccgtcgccatgaaccgcttcagggtgtccaagttccggcacaccgaggctcggccgccccgccgcgaggtgagtccggcccgaggaccgggcgctgtcgcctcgggccccgtccggctgcccctccccctgcccggaccccacaggggtgccctccagggccgtctggaaccccgagacctccatccccggggaaccccccttcaggccagggccccggcgtccgggccgtttcgtcgccgccggagggcagagtccggcactcccgtgactcgctctggcgctcggtgaccctggcggtctgcccgcctcgcccacctcgccccgggacccccgaggcggcgcagccctcctagccggggcccaggcctgcgaggccgcctgccttcccagcttccggtcggcctcgccgggagccggggctcggggcgctgccggcgcctggctcctcctccctgccgccccgggtcgcccctgcccctggctgggctgtggggagacgcccctctctcctctggccccggcgagcccaagtgtgtcagtggtggggagggagcccctcggccgcacgcgcccctccctcgggtttccgccggtgcttcctcctctcgccgctggcgcaagctctttctttatctcggtgatgctgccacggctgggtggggcctggggaagcctgagcaggtggagccccaaagaattgctgagccaggtgccgggagacccttcggacccccgaaacggcaggaggactgatgaggggtgcgccttggaaacgatgtcagctctgctcttccgctttccgtgttatttgtaaggcctgggagtgtcctccgataactgggcctaggagttgacctcaagtgaccccatcagggtcccagagcaagtcagggcagtctgggtagaggttccgtttttgtagtgtggactatatttcctctgcttccactttatgct

SEQ ID NO: 6889 - DNA, 6000 bp, Homo sapiens
aacaacagaaacatctttttttcttcttctttgcaaaactttttagtgccaaactgttcttttcagaagacaggccaagagagctggcctccatcctccttgccactctggggacacctggggactttcttctgtgacttgccaagaacatcccatgagccacgctgggttccagacgtttgggtagtaatgactctggtggtggagcacaacccccaccccctgcttcctgttatcctttctaaccgtatttcagggaaattcaaatctgggagagctctgaagctccattcctgtggtgccaaacctcctgatgaaaacagaaccagagtcaagcagccagatgtttctataatgggaaaaaccagggcacagccacttacctttgttctactcacagacatttgcattcatttcatgtgatggctttaggagacacgaaacagcctaaaacagcatggtttggggctgtttctccagaagtttggaaattctgtggttgttgcctttggtgcttagtcaaacctttgtcataagtcaaacggacactatttgtactgttcattcttattgcatttgcaggatgttttatgacagcagtttgtaggtgtttctgtgacagaaatcagagacaaaaggaagcaggaaaggtcagactcaaaaggtatggctttaccccctgactcacggtgagaagctatgagacccagagctctgagctttaagtcggacgatactagggcttgaaatcattatccccatccttttcccaacccagtctgtggaggtgggcggcagggaggaaatggcctcaagaaagcatgtttctcaggtcccactctaaggaattcagatttcctgactcttcatacagtaaggacttgggggctacccaaccatctgactcacaccaagatggcagcctgctgagccacacttagaagtgcctttgtggctgggcgcgctggctcacacctataaccccagtactttgggaggccgaggtgggtggatcacctgaggtcaggagttcgagaccagcccggccaacatggtgaaacccccgtctctactaaaaatacaaaaattagccaggcatggtggtaggtgcctgtaatcccagttactcgggaggctgaggcaggagaattgcttgaacctaggaggctgaggttgcagtgagccgagactgtgccactgcactccagcctgggcgagagagcaagactctgtctcaaaaaaaaggaaaaaaaaaaagaagcaagtcattaggtgcagcccactctcaaggggagagaattacacaaaggcatgaataccaggaggcaggcgcatgggggtcatcttagcagcctatgaacagtttgttttcagcggaagcagccactgaatggaagttagtaaaacccctggcatctgttaagattcagctaacccaccaactaaaagtgggttatgatggttgaatcacattcatattcaatctattcccatcaggagtttgtggctatttgaaaaaatctccatccttcttaacaagagtccacgttgtcttctccatgacctatgctgctacaacgttgagttctgttcggctttcttaaggttggggatcagatttgcacccaggcatgggcacccctagtcattccttctaagaacaagaaagagtgaacaggatccaggtacaagagactgcagaaccctaaaatgttcaagccaggaaagacacatgagagatcactgcataatcaattatcttctatcccaccctgaaccaagcccccatcctcgatgactttccataccttcaaatgccttccttacagttctttctctctctccatatagaccagctactgctgtgaaacaaacaaccatgagctgcagtggcatgcaacaattagcatgcatttctcatttacatgtctgtggcttgactggagtagctctgtgtctctgacagaagttctgtaggtcctctagggtagctctatttcacatgtctttcattttctgggaccactaagctgccagaggtatactatgctcatggaaatggcaaaagagagagagggcaaatcctaccacccaggcacccttccgttctttgtgtgtgtcatctttgctaatatctcattggccaaagcaagtcacatggccaagctcaagatcaaattgaggaatatattcctctcatcacgaggctatggccagggtcgggatgtatactactagtataaggggctgaaggactgggaccagaattccatcaaacacactcttactttcccccacaccaagttcattatcgaaacaccagaagcaggaatacaagcaggtatgacgcaggtttctgtctcccatcttcctagagggacaggagtatatttaaagacagaaaacaaagaatagcaagtagcaggtgaatgggacagacaggttgggctctggagagggtttagaaacaaggcagaggagcaattgtcctgtttttttttctgcgtcttggagagggatcttgggggtctggacgggttctttccagttgggacacaccccaccagctggtggcttgggagacagtacagggaggaggcatctcctggctctgaatcagagtgagaacatgactgtcttttccaatgatcttgcaatagttctgataacagaagaaagacttctctgtgttagcatgcttttaacatcttactgatcacccccactgtttttttaagagacagggtcttgctatgttgcctaggctgcctcggaactctcaggctcaagcgatcctccaacctcagcctcccgagcagctgggattacaggtaagcaccaccgcacctggctcccttttaatagacgctaaacctcagactcatggactctttcaggcaacagtatctggctacaatttactaacactgttttatttcaatagtgtttatattcataagtttgtcttctacttttggcagatggcactggtttcctgtttaccatagcaatatagggctttctttttcaaataaacatattaaaatcaacggagttaatttaaagaaaacaattaagtgaataccagttcaggtggaaggtggatatggcaaaatttagagcttgagtgtggttagcatttggtaaatagtgatagggtggaaagaggagaatggggtttgctgcagtgagtctgggttcaaatccaaactttatcaactgcatagagactttgggtaagttactggtgtagcttctctgagccttagtttcttcatggataaaatgagggtaacttgttttgcagggctgccgtgttctattgaaggttatgtttgtaaagtaaccggcacacactaagccctcagcaaatgcagaaacctgcctgctccatcccctacctggcctttccattctgggagactctggagttttctctgtcctccacatggccataggcaggtaggtgggcccttcctggtcctcctctatagcaaccagacctcaccctcctccccttttatggaggaagaggactcagttcatattagtgccttcctgtcccctctccagctccaaacacacacacacacacacacacacacacacacacacacacacacaattatcttgggggatgggagtcttggttaactgtagaattaaaggagatttggcaggtcagaccctaggccaacttgggaagctcaaggcctgggggagggggtggccctttagaggggatctcaaatcccccaaggatctctaatttagagccaacaaggccctctcgtgacagagctcctcagcaggactaaaaaaagatgctcaacagaaaatacaaacatggagtccaaccagagcacaggattgcacaataaattaacatttcttaaaagggtttctcattctcttgtcagtagcacaagtcaattgccttgtattctggggtatgtgcaagtaacatgaacttgttaaattaaaagtttaaaatatactgttatatgttgtgaccctgttttggaatttcttcaatttgtaaaaatacactgactcccactccctccttccacacacacacgatggggctcaggcgcctctggtctcctcccccatcctcccaagagcccctagagcagatcagccctcccagtttccagatggggaaactgaggctggaaagaaaggcagttcctttgatgtcatttccagggacactaaataccaggactgtgggttgaaaggctgtggggagtgctttgtgtgagtgtgtgtgtgtgtgtgtgtgtgtgtgtgtgtgtactggtcgggtggggggagtgaacggggggtcctggaagagtctgaagactggttgctgggcatctcgcaccaaggccaggactccaggtgagatgataaaaataacaatggctgacgtctatggagcaggtaccatgagccaaacattgtggacgtattaccaccttccgacctataatcactcccattcccagaagaggaaactgagacaggggagattatggacgagctcaggaagttcataaaaggccagagaaggggttctagagcagggagcccggattccaaaactccttagggaagaggaagaaaaggggagaagaggagaggaaagagaatgagagggatgtggaaacctgcagagaagggaagacccttgctcccgggagcctccctttctcccttttcccccgggcccgtgccaccggctccgccccaaagctggccacagagccgcagggaggcgggcgggaacggtggtgcgggggcgccagggcgctcccggcctcggcctttccctccagggccccctcctttcgccggcggcccctcccactcggctctcccggctcctggcgtcacggcccgggaggcgggatcggggaaggaggggccccgccgcctagagggtggagggagggcgcgcagtcccagcccagagcttcaaaacagcccggcggcctcgcctcgcacccccagccagtccgtcgatccagctgccagcgcagccgccagcgccgggtgagttgtgggcgcacccagggcgcggggcgacatcgggggggccccgggatcgtgtacgcccgggcagcagggacgcgacccctccacttactggaccgggagcagcccccggaattggtgacagtaacgggagggccgaggtgccacccatgccgccgacctctggtctgcgccacgctcgctccggccccagaattccacttcgccatcccgggacagcttcccacgccttttgagccgaagcaggcgggaaaagtttggggaggagtcagggcgcctcccctcgccccgccggacttacacccggggctcttggagtccagggagatccccaggtcgcgtgagggattcccgggcagcgtccccagactcgcctcgcgggcaggactggtgcgccaggccgggccagcgggtcctcctgggctgcgtacccctctaggcccccgccgctgctccgtcgcgcccccgagcggcgaggagcgacttcttgggggtcaggaacggtggaggagccgggaggcgctgctgggatgacacctctctccctgccaactctagaagggcttggggggctttaaagaggcgagaccgcacccatgtgttccagaggtaggagaggctgcagctcgtagtgtgtattctacgccctccccaaatccagagatctgagcacgctccagggaggtcttttaggtgaagatgtggggctggacatggggactccgaagacaccacagggcaaagctctccctccaggccagcttcagttttggggaagggagcactgcccctcccaagctttgagggtgtgtgtgtgtgtgtgtgtgtgtgtgtgtgcaccttgatcttataattcagctgtgtctaagtaaggggcttggagagggacttaagaagcctccagttcaaatacagtgtgattccacttttatgagacacctagaataggcaaat

SEQ ID NO: 6890 - DNA, 6000 bp, Homo sapiens
aggctggtcttgaactcctgacctcaggtgatccacctgccttggcctcccaaagtgctgggattacaggcatgagccaccgtgtccggtggtgcttcattactttttatagccacataatactctactgtttggatggatcacatttttaaaatatccattcatcggttgatggacatttgggttgtttctgctttttggctattgtgaatatcaacagtgctctgcaagagttgtgacctcagttttgtttggctgtagtgagctgtcgcatctgccctgaaggtgtggaagctgcaggtgaatctttcctaccctcagggaccccttctctgcacagtgctcccaccctgtgactgaggtgccctgggcagggggctgctgcccagaggtgcccacccctctccatcactcacccttcctggagcttcctatcctgtgaggactgtttgcatagagcccccaacctttgttttgatttagttccaggtacctgcaccaattgggaaactgaaggagagcagttagggcagatttgaaatattctttttctttttggtttttttagagacagggtcttgctctgtcccccaggctggagtacagtggcacaaccttagctcactgtatcactgtagcctcaaccttctgggctcaagtgatcctcctgcctaagccctccaagtagctaggactacaggcatgcactaccatgcccagctaatgttttttgtattttattttttgtagagttgacatctcactatgttgcccaggctgatctccaactcctggacttaagcaatcctctcaccttagcctcccaaagtgctgggattacaggtgagaattaccgcgcctgatgcctcaagaacattctttagctggcctggggagatgagaatatacactgctttatctgatgcaagggatgaatgcccatttctagaaagcccattctgtggtgatgatacagtctccaagaacagaaacaccactgtccagagtacccaggccaagggcctgcccttttcttctgcataatctgctatcttgtgttgttaggcatgtcctgttttgtaagtaaaagcttgcaagctttcaaaattaataagcactgccaacatggtgaaaccccatctctactaaaaacacaaaaattaggctggatgtggtggctcacgcctgtaatcccaggactttgggaggctgaggtgggcagatcacctgaggttgggagtttgagaccagcctgaccaacatggagaaaccccgtctctactaaaaatacaaaactagccaggtgtggtggcatgtgcctgtaatcccagctactcggggagactgaggcaggagaatcgcttgaacccaggaggcggaggttgcggtgagccgaggtcgtgccattgcactccagcctgggcaacaagagtgaaactccgtctcaagaaaaaaaaaatccaaaaattagctgggcatggtggtgtacatctatagtcccagctacttgggagactgaggcagaagaatcttttgaacctgggaggcagaggttgcagtgagctgaggttgcaccactgcactccagcctgggcaacagagcaagactccgtctcggaaaaaaaaaaaaaaaatcaaaattaataagcattagttctctctggctgcaaggaagggttaatattgaggaaatacatggccatgcatcacagcgacacgttctgagaaataacattgttaggtgataccagtgttgtgtgaacatccatagcgtacactcacacaaacctagacagtatagcctactaccacgcctaggctattgctatatagtatatggtatagcctattgctcctaggctacaaaccagtacagcatgttactatactaaatatcttaggcaactgtaacacagtggtatttgtgtatctaaatttacccaaacatagaaaaagtatagtgggccgggactggtggcttacgcctttaatcccaacactttgggaggccaaggcaggcagatcacttgaggtcaggagttcgagaccagcctggccaccatgggaaaaccccatcactacaaaaaatacaaaaattagccagacatggtggcacacgcctgtaatcccaactacttgggaggcagaggcatgagaattgtttgaacccaggaggtggaggttgtagtgagccaagatggtgccactgcactccagcctgggtgacagggcaagactctgtcaaagaaaagaaacagtacaataaaaacagtatcataattttctgggaccactgtcacagcacatgacacatatatattcctctgccccattccctcctcaaaccccgagcaacttgatcttggtataaaaagtggccaagaggctgggcgtggtggctcatgcctgtagtcctagcactttgggaggccgaggcgggtggatcaccttaggtcaggagtttgagaccagcctggccaacatggtgaaaccctatctctactaaaaatataaaaattagccaggcgtggtggtgggcacctgtaatcccagctacttgggaggctgaggcaggagaattgcttgaatccaagagacggaggttgcagtgagccgacctggtgccactgcactccagcctgggcgatagagtgagactccatctcaaagaaaaaaaaaaaaaaaagtggctatggaaaactcagatacaagttggtgtggacgagttagggctgacctaacctatgaaaagtagtacagcctgacccgaaaggcctagtgtattttgaaacaaatttataattgtttcagaagaacgttctgggccagctgcagtggctcagacttgtgatcccaggactctcggagtccagagcaggaggatcacttgaggccaggagttcaagaccagcctgggcagcacagtgagatcccatctctacaaaaaataaaaaagagaacattctgctgccagagcagggccccagttgctcagaaagtgaagaggaaaggaggcattcttttgttaatccagggtggttttctggtcagtaagacactgccttgcatttgctcacaaaggactatgggttttgtgagattaaaccacagacaacgaaagtactttggaccttatgaagccctgtgcaaatgtcagatgtcttatggaagtgtagggtaaattctgttgcagcaagctacagtgaatgaggacactggtgacttttgaccatatttattttctttagcaataaattgtgtaactctaatctacacaaaggaatcaacagaagtataagtggcaaattagaaggttaaaaaaactctgtaactatatattttttctcagctttttaaaacaagattaacactgtatggttgggtttgtaacatagataataagggtaataataacacaaaacagagatgagggacaagttaaaaataaaggaattaatgttatacgagaaaatagctactttctacaaaataaggcagtatagaagaaacaaaaagatgtgacaggtgggcgcagtgactcatgcttttacataatcctaacgctttgggaggtcgaagggggaagatcgcttgagcccaggagttcaagaccagcctaggcaacatggagagaccttgtctccacaaaaaaaaaaaattagctgggcgtagtcgcacacatctgtgttgcctactacttgggaggctgacgggggtggatcgcttgagctggggttgtcaaggcttcagtgtgctatgattgcgccattgcactccagcctgggtgacacaagaccctgtatcaaaaaacaaccaaaaaaaaaaaaaaagtgacatatagaaaagaaatagcaaaatggtcggtgtacatgaactcacaacatgttgggcctgggtggttgacacattaaatgtctggccaattgagcaagacagccattgattgccccattctacatccacagaagcagaaccagacaggaagtgatgagatttgcacgtgggtcacatagctgacctgtggcagaggtggcgtctcagctactggccgttagctgtgccttctgtttgtggcataacaccatattgccttaatgccctcgaagttttatttgtctagtttgttgttattgacattggaggacaagtcctttttttttttttgagacaagagtctctctctctctctcccccagacgggagtgcagtggcgccatctccactcactgcaacctccgcctccagggttcaagcaattctctgcctcagcctcccaagcagctaggattacaggcgcccgccaccacgcccggctaatatatttgtatttttagtagagacgaggtttcaccatgttggccaggctggtcttgaacgcctggtctcatgtaatctgcccgccttggcctcccaacgtgctgggattacaggcttgagccaccgcgcccggccgtgttttttttttcttcagttaagttgggataaaaaacggcacctacgtgcttcggggcctgtagtgagaatggtggacacgattattgtcgttacggctcctaaaacccagcgcggcgagagcagactacagcggtgtcaaggttccaagtattccccgcgggccttatcccaagggagcagcttctccacgccccgcgacggcgcctgcgcagactccgtgagcggggtcgtgaccggtggggccaagactgggctgcgggcggggaaggcttccgtgcatttacgtagggtgcagggcgtggcccgttgggggcggggatttgggcggtgtcggtgcccgcccggactccgtgagcggtgggcggagctgcgtgctctggggtgtgaggtggggcggaccccgcggcggcggcgcggctgacgtggagcgtccgggttagcgggtgcggcgagctgcgggattggggagcaacgggccgggccgggccttcgggcccgaggcggcggcggcggtataaagccggcgactgggagcatgtaatgtcggaatgcggaggccgcggcggcggcagcagcagcagcgaggacgccgaggacgagggagggggcggcggcggccccgcgggctcagactgcctcagctcgagcccgaccctggccacagcgtcctcggcgggccggctccgtcgcgggctgcgtggcgccttcctcatggcgcgccagcggccggagctgctctgcggggccgtggcgctcggctgcgcgctgctcctcgccctcaagttcacctgcaggtgaggcggcccggaccctggggccccgctagggcgctccccttgctctgccgcctggagcctgcagggccgggtcgcagcggcctcagccggggaagtcgggcctgaccttgcccaggacggctgacccctcccggaacctgcggccacggcttcccaccttctcctcgccccggcccgcccgcggacattatggcgaggcttccgggtggagccctgcgccctatcgtcccgctttagtgccgagggaggcgggtcgggggtgctcctcacctgttggagtcactaggggtggacctgtcacttcggcccgggctgtaggaccctcatttctcaccgatttcattccccttaagcttcaggtgtagtgatccacaaccttgcgagagttccagaccccttttagaattcccgcactcattgatctaacgattatttttattttgagacggagtcacgcattgtgtcccaggcaggagtgcagtggcgcgatctcggctcactgaaacctccgcctcccgggttcaaggggttcttctgcctcagctcctgagtagctcggattacaggcgcgcgccaccacgcctggctaatttttgtatttttagtagagacagagtttcaccacgttggccaggctggtctcgaactcctgacctcacgtgatccacccgtctcggcctcccaaagtgctgggattacaggcgagagccccgcacccggcctgatctaacgattatttatctgcacc

SEQ ID NO: 6891 - DNA, 6000 bp, Homo sapiens
cctcagatattacaaataatatcatagggtgtaaacccaccgtgatattgggagtaatatctccctcggatattatgaataatatcctagggtttacaaacatggtgtacacccactatgatattaggagtaatatctccctaaaatattactaataatattacagggtgtacacacagggtgtacacccactgtgatattaaaagtaatatatctgtaaaatatgagtacacccactatgatattaggagtagtatctccctaaaatattacaaataatatccccccagtatataacagataatatcatagggtgtacacccactgtgatattagttataataatatcttcttgggatataaggaataacatcacagggtgtacacccactgtgatattaggggtaataatatctacttagcacataacgaataatatgagagggtgtacacccactgtgatatcagaggaagtaatatctcctcagggtgtacacccactgtgatattagtagtaatatctccctaaaatattacgaataatattacagagtgtacacacagggtgcacacccactgtgatattaagggtaataatatctccagaaaatttgacacaccctgtgatattagcagtaataacatctcaccaggatataataaataatatcacagggtgtacacccacagtgatattagatgtaataatatcttcccatgatgtaatggataatatgacagggcgtacacccactgtgatactaggggtaacaatatctccccaggatataacgaataatatcacagggtgtacaccaactgtgatattaggggtaataacatcttccatgaatatagcgaagaatatcacagggtgtacaaccactgtgataataggaataatatgtctccaggataaaacaaataatatcacagggtgtactcccactgtgatattagcagtaatgtttccctcggatattgcaaataatatcacagggtgtacatccactgtgatattgagagtaatatctccctcgaatattatgaataataccacagggtgttaacccactgtgatactgggagtaatatctccctcggatattatgaatcgtatcacacggtgtacagggtgtacacccactgtgatattggcagtaatatctctctcagatattatgaataatatcacagtgtttacaaacatgctgtacacccacaacgatattaggagtaatatctccctaaaatattacaaataatatcatagggtgtacaaacatggtatacactgactgtgatattaggagtaatatctccctaaaatattatgaataacatcacagggtgtaaacacagggatacagccactgtgaaattaagagtaatatcgccccaagatataatcaatactgtcacagtgggtacacacactgtgatattatgggtaataatatctccagaaaatttgatgaataatatcacagggtatacacccactgtgatattaggggtagtaacatctctcaaggatataacgaataatatgacagggtgtacatccactgtgatattatgggtaacaatatctccctaggatgtaacgaataatatcacagggtgtacacccactgtgataagaggaataataatatttctcaaggatataacaaataatatgacagggtgtacatccactgtgatattatgggtaatactatctccccactacataatgaataatatcacagagtgtacaccactgtgatattaggggtaataacatcttccccaaatataacgaatactatcacagggtgttcacccattgtgatatgagacataataatatctccccaggatacaacaaataatatcacagggtgtacacccactgtgatattagaggaaataatatcttcccaggatataatgaataatattacagggtgtacacccactgtgatattagagggattaatatcttcccaggatataatgaataatatcacagggtgtacacccactgtgatattagaggaattaatatctccccaaaatataatgaataatattacagaatgttcacccactgtgatattaggaataataatacctccccaggatataaccaataatatcacagggtgtacacccactgtgctattaggagtaataatatctccccaggatattacaaataatattacaggatgtacacccactgtgacaatatgggtaatatctcccaggatattatgaataatatcacagggtatacacttactgtgatattaggagtaataatatctccccaggatataatgaatagtatcacaaggcgtacagccactgtgatactaggagtaatatagtagtatctccccaggatataacaaataatatcacaaggtgtacatgcactgtgatattaaaggaaataatatctcttcaggatataatgaataatatcacaaagtatacacccactgtgatattaggggtaatattatatctccaagatatagtgaataatatcacagggggtacacccacagtatattaggggtaatagtatatccccagaatataacgaataatatcacagggtgtacacccaccgtgacaatatggataatatcttccaggatgttacgaatagtatcaaagagtatacacccactgtgatattaggggcaatatctccacagaatattacaaataatatcaaaagatgtacacgcactgtgacattaggggtaatatcacccaaaaatattacaaataatatcacagcatgtacacaatggtgtacgttcattgtgatattatgatatccatagggtattacaaataatagcacagggtgtacccccactgtgatattaggagtcatatctttctgggaggtcacagcgtgtacacgcatggtgtaaattcactgggatattaggagtaatatcgccctagaatatttcgaatcatatcacagggtgtacacccactgtgatattaaaaggaatatctttctagaacattacaaatagtatcacaaggtgtacacccactatgagattaggagtaacatctccctagaatattatgaataatatcacagtgtgtacaggcactgtgattttaggagtactaccttcttaagatattatgaataatatcatagggtatacacccactgtgaaattaaaagcaatagctccctacgatattacgaataatatcacgcagtgtacactcaaggtgatattaggagtagtatctccctaggaaattacgaatattatcacagagtgtacacccactgtgatattgaaagtattatctttctaggatattatgaataatattacagggtgtactccctctgtgatattaggagttatatctccctaggatattacaaatcatatcacagggtgtacacccactgtggtattaggtgtagtatctccctaggatataacaaataatatcacagggtatacacctacggttatatcaggagttatatcttcatagaatattatgaataatatcacagggtgtacaccctctgtgatattaaaagtaatatctttctaggatagtatgaataatatcacagggtgtactctcactgtgatattagcggtaataactccctaggatatcacgaattctatgacagagtgtacacccaccatgagatttggagtaatatatctctagcatattatgaataatatcacaggttgtacacctactgtgatattaggagtaaaatctccctcggatattacaaataatatcacagtgtgtactcccactgtgatattaggagtaaaatctccttcagatattacgaataatatcacaggatgtacacccactgtgatattaggagtaatatctcccttggatatttctaataataccacagcgtttacacacatggtgttcacccactgggatgttaggataatatctcccttggatattaccaatcgtatcagaggctgtacacacgtggtgttcacccagcgtgatattaggaataatatctccctcggatattaggaacagtctctccctgggacttagcagaacgtagccccccagtgttaaataagcgaccacagcaagaggtagaggcgcagggactgaaatgaagacaaatatctgacaagtttaaaacacgtatttaaaatagaatttataaaatgcttaatctgccgactcaggagcccgcggtgcagggtggggtgggagttggcaggtgaccgctacaccagcagagtaagactgcagggctgcggccctccctcctatgcccttctgttcagacacccgaggggcccatgtgcactcctgggatcatacgaccagaaaacaggaccctagaggtttcttgagtttctgcttaccagggcggctgggtatagccctgccagcccattgcataatcttctaagttctccccaccaccctccattccagcagcgaggtgcctgtgacgcggtctccatcctctcggcctcgacccggtggtccccgcgattggacgcttaggcggtcaccaggcctccttgttactaacgtgtgcacacctttcagttctctcatcaggatgaactcctggaaattgctgggtccaaagtgtttaggaagtctggagtgattcttgttgcagggggaagagggaactatggaggtgtcactgaactttcaggggttccgggaccccccaacccggtgcccgtcccagctccccgagcgcctctcttcccccatcccccacctcgcctgttttcacctcccgtggcctcactcccgccgcgcagctggaccttgcccggggcctcccgatcccggagctcgaatcccagccggaccagcccagcccgaccagcccagccccgcctcttctccggcaggatcgcggccgagcagtctgcccagagacttagcgacagacagacgctgggacccacgacgacagaaggcgccgatggccgcgcctgctgagccctgcgcggggcagggggtgagtgccccccatcgcgccccactctccttttccaggcttggtttggctgcagatctctcgggctgcgatactggggagaggagagacccccaaattcctggacccgggaagcgaggagacttactccggccccctcactgcagcgggttggatttctttcaccaagccagcagccgagagcccagctctatttaaggggccaccagacctcccagctactaggggctttgactcttctttgcataaagctagtgggtcccccaagccctcctacccccggagagcccttacctctctggtttctttttccattgctcttagcaaaggactccagggagtggagttcatggagtgggggtgggggttgcaaactgccagcatttcgagggccagggagttgaagcaataaactggcaatgaactgagggctttctctgtgcctagccttgtgcccaaccttgtgccatgctgctatgaactttgctgctattaatccatttaatacaactcatagaggtagagtctcgttttcccccttttacagggaaggaaactgagatacagagaggttaaagtttgcacagccggtgagttgtgaaaccaggaggagtaaaaagacagcggagagagaattgaagaggccacgtccactaaacttcaaatttcttctagggttagataggaccagcagacctgctgagatgaaaataacagatcaagctgggccggtggctcttgcctgtaatcccagtacctaggaggctgaggcaggaggattgcttgagaccaggagttcgagaccagcatagagagacccccatctctacaaaacataaaaaaaaaaaattagccaggcctggtgaggctgcttatgcctgtaatcccagcactctgggaggccgaggtgggaggattgcttgagcccaggaaattcgaagctttgttgagctttg

SEQ ID NO: 6892 - DNA, 6000 bp, Homo sapiens
taataataaaaaattagtgggtgtggtgacgtgcacctgtagtcccagctacttgagaggctgaggccaaacaattgcttgagcctgggagtttgaggctgcagtgagccatgattgtgcccctgcactccagtctgatcaacagagtgagaacctgtctcaaataaatgaagaaaaataaataagacacatatcatctaacatttacggagcacttactatgtgtcagtcactataggaaaaagcctttcttatggattatctcattgaatccttataagaaacttatgagaatggcccttttatcagcctcattttacagatgagaaaactgaggcctcgaggtaaacaactgatacttagaaatccgagtcaaaaagtagcagagctgagtaaacctgggaaatctgactcttaaccattttgcacactgactccgctgtggctgccccctcctctgaccccatcccgcgcctgtcttgtcccatgacctcttctgacagctccttgagagagaagaaccctttccccctggccttccactttctctcacagccccgagctcagtgctgggcacacctaggagctgaaaactactgattaactgatttactccccccttcactggaaaatggcgatgaaacaagatttggggtggaggtggggagggaatcccacagatcagtctggggcttcttcagagctctggctcttggtcaagtgagattaggaacgatattttaagagcagagttccttaggaaatcttctacacgcctatagtttgctttcccagcatgacgtccggcacataatagggtccaatacatctttgttgaatgactgaatgagctttaaaaattctaaggactctcactgctgttgctagggctgccgctggagtctcaggcggtgctttcggctctgtcttatacatcaagctctgcctgtctcgcttttacaccacagtggaagccaaagccggggccccttcgaatgcaaagtggctgcttttgcttggtttggcttagaagacatgatgcccggcccctgctcccaggggttctggcactgcccaaaccaactgcgccccctggtactgagatacatgtgcactgcagattcgtcaaaattcacgcccttctcccactccaagccacccgctgttctgatctcatctttgtctcacctccttacccaaagattcttgaggtgcaggaagacagctccagtgaccccagaagcttgccttcctattcttcgatctcgggtgatttttcatcctaaaaccatcacataagctgtttatggcgtccataacccgcctggagcctttaaacctctttcttgcatggctttttataagtctgagataaacaaacaactctctctccagggacttggagcccagatccttaacctcactccttaagcccctggcccctgagggagtggagccagagggtgggccccaaaggactgtggttaaatgtgagatgtggaggaagcagataacatcattgctgctaacgggaaaaatgcggccagagaccttgaagcaaagatgagccagagggcagggttgccaagaggctccagagcagcctctgctgggttgagaagctctgctgagacactaagagagcgttctggcaacatgtgaaatcttgggggctgtctcctccaacccctcatttggcactaaagaaatctaagtcctgggaggggaggtggcttggccaaggtcatataacctcgggaggctgcgtggaataaatgatggaatctgttccctgcacctacttctttcccatcagaccctgatctctatagggcatccaagttgttacagggaggctggcttcaccccaatggcggaggtgaaatatgggatcttggccaagttgatcggcattttctaacttcctggccacactgattggtctcggagtgacccagaacttaagactggtctaatcagaaaaaaaatctccgaacctttgaggaaaatcctgggaaatactgaccctcctttccctgggctagaaatgaacacaggatacaaagtagtcgcagcagctgaggccaggcatcgtgtgacatcaagagggaataaggtagactccatggaaagcagagaggagagatggaaagaaaaggaatcccaggtgataattgtgagttgctagatcaaacctcacctgaagcctttcctctgcaatgttcagctacatgatccagtaaagtatatttttaagacagaccgggctgggcacagtggctgatgcctgtaatcccagcactttgggaggctgaggcaggcagatcacctgaggtcaggagtttgagatcagcctggccaacatggtgaaacctcgtctgtactaaaaaaaaaattagctgggcgtggtggcacatgcctgtaatcccagctactcgggaggctgaggcatgagaattacttgaacccaagaggcagaggttggagtgagctgagatcacaccactgcactccaggctgggtgatggagtgagactgtgtcaaaaaaaaaaaaaaaaaaaagacttaaaagatagacttaagtcttattactgttagtaatagatgttattgcttgtaaacaaaatatccccaactgataaacagatgactggtggccctagaaacttgcctctggtcttttactcctggttaggggtgctgggcccaaagggaaggcctctatgccaggctacatgcctggctaagctttagatacaactaaggttgattggtttggagtttacaacccccactagcatacattttatacttttcttgttcaggcaagtggactggctaattacatgggttcagaaagcattttttcttggcgcttactcccgtcctgccctcatgaacccttagcatttttgcacatctctacagcaatgcttatctcaccatatatatatatataatattatatatatttacatataaatatatatattatatatatgttatatattatatattatatatattatatgtacatatatataaatatattatatataatatatttattatatacattatatataatatatatatatacaatatatatatatttatatatacgttttttagatggagtcttgctctgtaacccaggctggagtgcagtggtgtgatctcggctcactgcagcctctgcctcctgggttcaagagattctcctgcctcagcctcctgagtagctgggatcaggggtgtgtgccaccatgcccggctaatttttgtatttttagtagagacggggtttcaccatgttggcaaggctgatctcgaacttctgacctcaggtgatcctcctgtcttggcctcccaaagtgctgcgattacaggcatgagccaccgcgcccaggcctatctcactatattttaatgattaacatccacatcaggcttctctagacctcaggcttgctgaagatgagattaaacctcattcacctttggatgcgtgcacctggcccagtgtctgacacaagctttgtattcacggatgcttgtggagtggatgaaacaatctcttcccactccctgcctcattgtctgatgagccttcattacactccactttcttctctttgtaaattaggatgaggtgaaaaagcacagcagacaagatgcgaagcattcacgccaagtcctcaattcacaaactgatttgatctgctgttgtattcccagagtgctaggtcccgtatgggacaccaacgccatcccatatgctcactgttctgcgctgctgtgtataaagccctgggcaagaggacaagggagggaaaaaccagaaagactgagtcagagaaggctcgggatgaaatttgagtccattgggatcattctgcctaaacgacagaggagaaagcttgggctcagggaggagtcctcctcctcctggctcaaggtcaccgggacagaccagtcaggatgggaaagaactccactttcaagagcaagacctgtttccccaggacctgggccctgtgcagacaggaagggggacttcaggatggatggggaaaaggacacgctgggaggctgcggggccagcctttggggcttgcatcctgcgaaggttgagtaactccacgggtctcccttttgccgctataccacttgccaactgggtttggagtctcttggcttgtgagtcctcagggaccagagaagtgactcagtgaacacttagtacatcgttggcaccggggattgtgtgtgattcaggagtcactcacagagcttgtgctgattaactccagaaactcacccaaagcctcctccccaccccttcaagcccaggatgaagggatcagactgtggctctgacactcctgaaatgtttctcacgtgtccacctgccaaccggtctggtaccgacagaagatccctggaccgcgaactccggggctaggagcttcctccacgcactgcctccttccagcggcccacagggaaaacaggacctcgggaccccctctcttcctgacctcccctggattctgagcgggcccaccctcaaccaaaggtcccctgtttcgcggcccctgcctctctttttccgccttgggaattgtccccctcgccccccatcctactcccactacgtcctgaggggtgtctgtcttctctgatcgcccccacccccttcctttccctcctccttttcctccctcggctcctcccccaggccccgccctctccgcctcggcccgcgtccccccggcgccttccccatcaccctcccctccagcggggacaggggtgtggggaggggggcggcggcggcggcccgagcgggagcccgagcggcagccggcggccgcgggagctgcggggagcgcgggggcggcccggagcgtgccggggtccccgcgcctcgctcgccggccgcgctccgaagatggtggcggcgccgtgcgcccggaggctggcccggcgctcgcactcggcgctgctcgcggcgctcacggtgctgctgctgcagacgctggtcgtgtggaatttcagcagcctcgactccggggccggggagcgccgcgggggcgcagcggtcggcggcggggagcagccgcccccggccccggccccgcgccgggagcgccgggacctgcccgccgagccggctgcagcccgaggaggaggaggaggcggcggcggaggaggaggaggacgggggccccaggcgcgggcgcggggaggcggccccggagaaccgcggggacagcagccggccagccggggggcactgcccgcccgggctctggtaagatgccctttcggctcgcgccccgcggcgagggagggaggaaggcagcccgaccccacgcccccctagcccttgaactcggtcatcagactgggactctgcaagcctaccgactccacatcgcctcttgccccgggaagccgggtggggtccctgccaaggctcaggggtcgtgggctgcccctttcagagtctgagcacggaccccttggggtctgggggaagttttctccagcgggggcgctttgggggttaccggagcctggctgggttcctgttccccatcactcttgctggggaccccaggtgacttgctccgtgcgtgtaggtcttggtgactcgctccctgcctgagtgagtggatctccccggatcctcagccgctgttcctgggcggttgtcgcagcagcatctctctggtttttgccgagctgggtgcagacagttgagccctctgttcgtcctggcctgcgatgagggctgagctgggcgtcccaagtccccgaccatgcccctgaatcaatactcagtccggggtgtctggtcttactttgggtcttctgtttctcttctctggatgtttgagccttccgtcttcaccttctctgtctctaaccttgccgtctcccatgccctctgtgactttatctcctccccatctccagtttcagggcatggct

SEQ ID NO: 6893 - DNA, 6000 bp, Homo sapiens
tcacagtgggtgtacgccctgtcatattatccattacatcatgggaagatattattacatctaatatcactgtgggtgtacaccctgtgatattatttattatatcctggtgagatgttattactgctaatatcacagggtgtgtcaaattttctggagatattattacccttaatatcacagtgggtgtgcaccctgtgtgtacactctgtaatactattcgtaatattttagggagatattactactaatatcacagtgggtgtacaccctgaggagatattacttcctctgatatcacagtgggtgtacaccctctcatattattcgttatgtgctaagtagatattattacccctaatatcacagtgggtgtacaccctgtgatgttattccttatatcccaagaagatattattataactaatatcacagtgggtgtacaccctatgatattatctgttatatactggggggatattatttgtaatattttagggagatactactcctaatatcatagtgggtgtactcatattttacagatatattacttttaatatcacagtgggtgtacaccctgtgtgtacaccctgtaatattattagtaatattttagggagatattactcctaatatcatagtgggtgtacaccatgtttgtaaaccctaggatattattcataatatccgagggagatattactcccaatatcacagtgggtttacaccctatgatattatttgtaatatctgaggcaggtattactctccatatcacagtgagtgtacacccttctatattattcataacatctgagggagatattacttccaatatcaaagtgggtgtgataatatctgagggagatattattcctaatatccgtgggagatattattcctaatatctcagtgggtgtaccgcgtcacagtgggtgtgcactgtgtgatattattcatagtatccaagggagatcttactcctaatatcacagtgagtgtacaccctgtgatattattctaatacccaagggagagctttctcctaatatcacagtgggtgtacactctgtgatatttttcataatatccgagggagataggatggagaccacgtcacagtcccctcactgctggaatggacactgtctacccgtggagtggtggggagaacttagtgagattatgcaagcgtttagcacactgccagatatacattaaatgctcagaagacttagcttttattgttactgttataattgaggccatgggttactaaccagtggtttaaaatgccattgcaactgggcacggtggctcatgcctgtaatcccagcactttgggaggctgatgagggcggatcacttgaggtcaggagtttgtgaccagcctggcaaacatagtgaaaccccgtttctactaaaaatacaaaaattagctgggtgttttggtgcgtgcctgtagtttcagcttctcaggaggttgaggcaggagaatcgcttgaacctgggaggcgaaggttgcagtgagccaagattgtgccactgcactccagcctgggtgacagagcgagactctgtctcagaacaagcaaacaaaatgccattgaagacatatatgaatatgaaaaggtggttgctaaatgatgattgaataaaagagattataatataaaataggctttggtttttttaaagcaaaaaagaaaaggatatgcctaaattagggaacatggagaagaaggccaaggcatttaccttcctctcttgagtctttttctctctccgtctcttttttttttttttgagtcaggttcttgctctgtcacccaggctggagtgcagtagtgccatcatggctcactgcagccttgacctcctgagctcaagcaaccttccacctcagcctctctggagtatctgggactacaggcacacaccaccaagcctggctaatttttaaatttttttgtggagacttgtctcactttgttgcccaagctgctttggaactcctggcctcaagccatcctcttgcctaggcctcccaaagtgctgcgattacaggcgtgagccaccatgcccagctctctcttcggtcttaaagcaaagtgtcaaagacccagccaccacttcttagaaatgactcgatgtcatactagcataaatccatcgataaaaagatggaaatgtggtaacacagtgatcttggggaatcctagttttcttttccaatttctttgttgttgcagtgagcaagtacttgtttcaagataggaatgaaatattcggctcttttagacagacaagcacaggtgctcagtttgggagaagaattaaaatcctctgcactctccatgctgccttgctaattctcggggtcctgtcctcatcttctactcttgccttctgcagggaccccacagcgtgttttccccgatctttttgtatcactctaaatccagtattgggcccagggagcaccccctcccctgcccccttcagctgtccttctgcctgagtcttctggaagcttcaggacagaaagaacccaaggatttgtcatgaagctcagtgtggcaggtctactgtttccatgtaaatcatgtctgcttatctgagctggttttggtggaaactgatggaaattatggggaagctaaatccctgtctctctgcaagccactccccaatcccacccccatgaattggcattgtcacagtcctggtgcttcatttctttctatatttgaagatgaatttgagggaagtagtcagaaagtcaagaagaacacagcagaaatcaattgaggtgagtccagaacaaaacttggggatcccacttcctgctttttttttttttttttttttttgagatggagtctcactctgtcgcccaggctggagtgcagtggcaagacctcagctcactgcaacctgtggctccctggttcaagtgattctcctgcctcagcctcctgaagtagctgggattagaggcatgcgccaccacacctagctaatttttgtatttttagtagagacagggttttgccatgttggccaagttggtctcgaactcctgacctcaaatgatctgcccacctcggactcccaacatgttcatattacagtagtaagccacggcttctggccccaattcctgctctctagctccgggaaaacctatggctgcatgcagagtcttagacaacttccttttcctctctgggcctcagtttcccattctgtaagatgaaaggtttccataggcctacactttctaattggtggctttcaatcctctggtgatttgcataaaaggcatctatttcaattgtggttataaataacaaaccccaataaatagacgaattatttaaatggtttctcattatcactgaatagttgagagtctactgtatttgagtgaaaatgcagcaagagaagctgaaatcagatgcactcatgattatgaccctgaggtcaatgtgtcattcccttcattccctccttgcccccatgaaggtttgactactgtatggtttgaacctgtgcttcttagttgtttattgcttaagttttagccacaacggcaaattgcagcgggaaattcagtcttactttgtcatttggaaacaaaatacaaaacctatcaaaataaagcactagcttttttttttttgagacaaaatggaagaaatcctaatattaggttagaaaagcaattttttggtgttttttaaattttatttatttatttttttgagacagagtcttgctctgtcgcccaggctggagtgcagtggtgcgatctcggctaaccgcaagctccgcctcccaggttcacgccattctcctgcctcagcctcccgagtagctggtactacaggcgcccgccaccacgcccggctaagtgtttatatttttagtagagacggggtttcactgtgttagccaggatggtcttgatctcgtggcctcatgatctgccagccttggcctcccaaagtgctgggattacaggcgtgagccactgtgcccggcctctttggtgtgtattttgatgtggtgactggtagttaaattcagtgtacatatgaattcactcttgggacaaaatatgctggatttgagcttgttttcaggcaaatcatgtttcatcttgcagagctaattcaaagtatactgactgcatgcacttcttgcttaggggaagaaaactcatcaaaatttgtttctaggcatatgttattagagctaggattaaaataaatcttacatactttctttaatatgctaacattaacacgtttcgcttaaaaaagtatcgatcatttatcatggaaaaatacaccagcttacacaaattcctaaagcgtttttcgtgtgtgtgtgtgtgtgtgtgtgtgtgcgtgcgtgtgcgtgtgtgtgtgtagagatggggtttcgccatattgcccaggctggtctcgaactcgtgggctcaagcgatccacccacctcagcctcccaaagtgctgggattacaggcgtgagccacacacccggccctaaagctttttgtgagattatatattttacctgcgaaatatatgggtcagaaagatttgagaaagttgttagataattccaccaacaaaatctcccgtcctttccagctgtgatggtgaattctaaagtagaattcatctttggagcttctccctgtaggcatgcaccttgcgttgcacctgccagatgtcgcgcggagtcctccaggcctctagaaggcagagatggtctcgtttccttgccgagcatgcgccttagttctctcttctggggctgtgaacgtggcgtcgaagcgcgcgtgcgcggcggctctggcggcggcggtggggcggggcctgggctgtcagccggcctaggaggaggaaggagcctgcggcgtgcagtgtgaggggcgggacccggctgccggcggtgggtctagctgggggaggtcgggccatgctggtgggccagggcgcggggctgctggggcccgcggtggtcaccgccgcggtggtgctgctgctgagcggcgtggggccggcgcacggctcggaggacatcgtggtgggctgcggtggcttcgtcaagtcggacgtggagatcaactactcgctcatcgaggtgagcgcccgccccgccgcccggcgccgagtcgccgggccggtggttcagcctctctgggccgcgctggcctcgtctctgacaccgggcggtgtggagtccttggagcccttacctcttccgaggctatgctgtccgcgggctccctgcagcccctccccagtcgcgctggaggggaggttcttatcatggggtcgtctaaggactgaggggtgccagacctcaggttcttcaaaaccccgactccagatccgcggaacacagaccccagatcctcaaaacccagaccctaaattccctggagcccagactccatttctttaaaacttagacctgagatctcctcgaatcagaccccctgaaactcagatttccccaaacccacattccagaacctagagaccacatgtcttatcccccaaactccacagcccagaaccccccgaagttctaatccactgctcctccaaaccccgcggcatgattttaaagagcatcaattcccatcccatagattctgacctagtagatcagtattggcaaccctagggccggaaagctattttttatttctccggctcccctccacttctgaaaatggagagttgccagctgccctgattgccttaatgagtagttaatggaattaccctagagatttgtaaaggttttttttttttttttttttttttttttttttttaattaagttgtaaagtcctgttaaatgtttatcagcccggtgggattatgacccagaaaggttcccgtaaagaggaaagggatggatggaggtaggggcagaatgtcatttgtcccggtagatgggaggggaccagag

SEQ ID NO: 6894 - DNA, 6000 bp, Homo sapiens
gagaatctcttgaccctgggaggtcgaggctgcagtgagctgagattgtgccaatgcaccctagtctgagtgacagagcaaaactctgtcatcagaaaaaaaaaggaaaaataaataatggggtaccagagcctgctggttctgtatcatggagacaatagtgacgtcctcagagggttccttcagtgttccagaaacatttatctgagcatgtcatatgtgccaggcactgttctaggtgctgggaaacactgatgaataagacagacaattaaatactgatgagtaagtccttgcttccaggagtctcccagtccttaggggtaataaggagtaagcaactcaaggtcaggtgcctgcaatgtccgcaggactccctccaatcattgaacatctccctcacaatccagaagattccctggaaaaccaacttccagggatacatcaacagtggagaagagatcaatgatccccattggtaggggatgctttgtggggtatgggggtctccagcatggggcagctggttccaggagaccccgatgccccacgggtctctggacgtctgcgccaagtggttagaagaaagccaatttcgatgggaactgtctgctctgctaccagctgcttccctggactccatctgtggcttttcaggagaggccaaggccctccttagtacattattagaactttctgatcccagggaaatccacacatgtgtatcagcaaatgggggctgctaggacagtgtgtcttaagtcaagggcctcttatcacacagacatgcacagaaaacattgacataagagctttgtggaggaagactatgggctgatcccagcccctgtccactgtcaggccatggtcagtctgtggctgatggcgtacacatccatctgtgcttgcactccaatacaatagaacataaaggaaaaatctgggccaagatcagtaaagataaggaccaaagacaagagctgggataaaaaaaaaaagcacaacagaattactcctgcagtccctcggttctttttctttgcctttcttgttttctatcgattattcagctcagtattttcaacagatatttggggcataaattcaataccaggcaattttacatgtaccatggaaacagcaaataaccaaaagagagcccttgctggtagagagcttacatttaaaaggcagatacatttaaacaacaactatgtgcaatgtgatagatggcgacaagttctgagggggatgaaaaaacaaggatgagggatagagaaatgtgggtgttatttgacataaaatgatcagagaaagtccctctgctaagcagaggctaaaagaagtaaaagagtgaaccaggggcatatctgaagaatagcattgcaggcagtcagaatagcaggtgcaaagtcctgaggtaggatcttgtgtctttcctgcaaggctgactgcctacacttggacagccaaaagtttgaagaattgctcactgcagagggtctagggatgcattttatgaatttgtccatgtgtttactcaagaagtacttactaggtactgatgaggactgcagagacaggcttcctgtccacaaacatctttttttttttgggcggggacagagtctcgctctgttgcccaggctagagtgcaatggtgtgatctcggctcactacaacctccacctcctgtgttcaagcgattcttctgcctcagcctcccgagtagctgggactgtaggcatgcaccactatgcccggataatttttgtatttttagtagagatggtgtttcgccatgttgccgaggctggcctcaaactcctgacctcaagtcatccgcccaccttggcctcccaaagtgcctcccaaagtgctggaattacaggcatgagccaccacacctggcctctgtccacaaaggtcttaacagccttcagagggagacagataagttggcaggtgagtgtaattggaagcagccctgagaggcctaggagcagagaagaggagtacctgtggagttaggaaaggcttcctgggccgggcacagtggctcacgcctgtaaccccagcactttgggaggctgaggcaggtggattacctgagatcaggggtttgagaccatcctggccaacatggtgaaacgctgtctctactaaaatacaaaaattagctgggcgtggtggcgggtgcctgtaatctcagctactcgggaggctgaggcaggagaaacacttgaacccaggaggcagaggttgcagtgagccaagatcatgccattgcacccagcctgggtgacaagagcaaaactccacctcaaaaaaaagaaaaaggaaaagcttcctggaagaggtgataacgtaggaggaggctgggtgaagagtgatgcaggctgagggaatagcgtatgcaaaggcttgaagatgaggaagaggccagacaaccacagattggctggagcatgcaatgtgtggtggagaagtcataggtgaggttggaactgtaaagaggggtcagatcccagggagcataaagtgctgggaatgggagataatgctgacagatggtacactggcctctggctgcaggggagaaaacaaacaaaaataagaatgaaagcagggagacctgttgggcagctattaaaatgactctggacagggcgcagaggctcaggtctgtaatcctggcactttgtgggggcaaggcaggaagataatttaagccaaaatgtttaagaccagcctgggcaacatagcaagatgctgcctctacaaaacagtttaaaaattagccagatgtggtggcctacaactgtagtcccagctattcaggaggctgaggtgggaggattatttgagcccaggagatcaaggctgcagtgagcctatgatcacgtgactgcactgtagcctgggcaacagagcaagactcttgctaaaaaaaaaaaattaccttcataaggaatggtggcccgaatttggattggtgaggtggagatggagaagaaaggattattggaaatgggagcagagggagaaaggaaggagcttagaaaggaagaggccaagtttccagcttggatgactgggaggcaagtggcacctttgattaaaatagatcatacaatgaggaggagaagatttaggtgacttgatgagctcagagttgcacttgctgagtttgaggtgtctcaagcatctcagcggcagtgagaggtccagcaatcaataggtagatggaactgaagttcaagggagtagcgaaagctggggatacggattcagaactcaccagcctggagatggtatgtgaaaccatgagataacttgatacctcccagggagagtttatgacgtgaaaagaaaaatgggacctaaccagcattcttagagacaggatcttgtagcaacagagcagaaatctccaggtagaaacaggagaatcaagaaaatatgaacatgcggagtcaaggaaatgcaaggtacccggaacaagcagtaggcaaatccaatcacaaaggagcagaaacaaactacccagtggatttggctataaagttgtagctacatggttcagattggaatggagaagccagaagagggatggaggaactgactttgaaaaggaggaacatcgccttatcagaagttggagggggaaggggtggaggatggagaccagtatttatatgtttacaggggaaggagcaaggtcaggtgttgtggcctaaattgtttttgaagtagggtaccagatatctgctgagaaaggtggtgtgagtgggtgataatagctgcagagaccatttaagaggaatgggaaggttaagagtggccactggggagactgggatgggcacctggccagactgaatggatcagtaggtgatttagtgggcccagttgtcacaagttccacattttagagactatttattctccagttgctctgggagtagagaaggtggcttgtagcaccttttctttttccaggttgaggttttgtagaaggtgttaccaatgccaagaccctcctgctcccttgactccagttgccttggctccttaaggagtcccagagtgacagagaagaagcagtggccattttttctgcaaaagctttggctcttttatgaagtccatgatttctaccatgtcatgaaagccaggtccaagcctggagttaataagtccaagatcctctacagcctcttctcagtctcatgccttccaatctctagggcagcctacatatcaaaagggatttacaggggctactctggtgcttcttttgtccaagaacctttgtctgtcctttgccattccaaaatccatcatcaccaaattagccattccaaaactgctcagcattagaaatccggagttgggtagattctatggaccaataaatggaatttttcgaaacatccacactcccttctttcctttcctatgtgtcctcttagtctaactggccccaagctcagtggccttcagacagaagcagaaatgttccaagatgattagctaggaacacaaggtacaactgaaaatccattgtgcaaacaagtgcctgtttgattttctcttcacttccctttgggtattaagcttcctttcaattcgtgtttggtttctggtaataaatatggcaccagtttcattgattaattatgaagattaaatgtgagaagtcaagaacgcaaagcagtgcccagcatgttcagcattcagcacacagcactattgtttgtaggaagcattcgcacaatgctgagacagctggaagggttgacattgtgaggggagggcccttctttcaccatcctttgcgtaaatggcttatctcacctccactcaacaagcccagtgtatggcctagaactcccatcatacctgtgcaccaattgaggagagacacatgggtgggaaattgcaataaaaagacggcccacagcaggctgcattcccatggctggccagaggaggaacgctttgtgttctcatcggaggtaagtcctgctttaagccccaggaggcttcctcctaatcctgggaaatcttgatccactggacatgctaggattctttgtttctggaaatttttagaacccagcaagtagtttggaccctggccattgtcaagtgctccaggtaccactctatgtccaactcagtcatgcttccagtcatctgcgatgctccaggcctacggacgccaccctcttccttgtcccagatattcccaccagggaactaggtctctattgggatctcatctctaagaatcaccaatcctgggtgcttccctatccctgctgtctcatagcatactcatggtatccctgcccgaaaccgatctctattttccactgaagtcttccagaggttgtaggaagttatccaaagatttggccatttagggaaagtatttcccagaaaagtaaatgccatccaaatgctggcaggcttttttgcagctctttctttctgcctcgccaccgcccccaacccccattgatttatttattcatccttaatcctctactgagtactccttgtgtgccagattctgtactaggagcaaggaacatgaggctcggtttggcatggttccacagtcacagaaatctacatccatagaggacatttcagggggctcttagcagcacccaatgcataaaactaagaaagggcagccattacttttgtgtgcaggtattcacaggtaccatatccctttttctctatccaatctccaaagagcctctacttccacctgagcagggaccatcctgagacctttctaggacattctgcagtactagccagctctaagcttgcctttggtttgcttactgtcaattttatcacccattatctcgctctatctgtccataagtcacacctactttgaaacaatgcagctctttatgaaggaagtcaacggatctgtttctaagaacatagacctatgccctaatcttatct

SEQ ID NO: 6895 - DNA, 6000 bp, Homo sapiens
agggagctaggaatcagaggtgtggcttgcatttcaacctttaaggtcaattggttagcttgcttttaccacaaataaagctcttcttaatttctctagtacagtcttaacttgatatgaagcacttacacgaggaatggtgcagacaaggcagctttattgtactttgggggagaaaaacatgattccatttacggggaaaaaagccattgacactcagtaagcaacactgccatctagtggaatggtgacacaccaccaagaatttcaagacccgataggaaatgtgagtggatttggtttcaattttcaccacaaaacagcacttttaataagctggttttcagagaacttcagatttttttgagaaactactttttatctttaaaatgcataaatgtatgtgttttctctgttttgggggggtggttaagaatgagttgtatttttcttattagagcataaagttctctacttgaaagttagaaaacactttggggcaacctgcctccttgaacatccatcacttctgcttgacagtctaacagcaacccctgattttaacagacagtttataaagaagcaaaactcaactgtacaagaacgacattaagttttctcatttcctctttctatttttacaatctatggtgctaagtatttgtacttcacttacttgaattcctggaaaaaaatcattagaacacaccaataacaattttgcataaatcacataacccaactcttattatgactgcacagtaacagtggaagatattggtgtgaggatgtgggaatgcagttcttaatgaataataaagtaattcttcaggttttaattcgcctttatacccaggtgttggagtgaatgtgttgatctgatgacttctatgagcatataaatgagaatacttaatgaaacacctggatgaaaaaagaaataaagtagtgaggataacatattgttaataaccacaatctcatattgacatttctgttattactgagatttcagattctgggttaaatgctctgctctttggaatatccacgatggttattgatcttgctaatgggttcctctatggcagcatttctgggtttatggttggaggcactcacggattccagaatgcatgagtctgacacggtcttcatcaaaccatattcttggcaaataataaactcctttaaggatttcagggaagagccaagctctgggagagaggtatataagtgtagagtaagaagttgaattaaaacatttttagttgcattttgtcagtagacaaaactgaatgtttcaattctgagaacctgagattgtccagaaaaaaacaaagttcagtgtatgggacatgagtgatcacaaagtcagaaccaggttattttgcatttttcacagcagcattaactgggggggtggggggaggggtccctgaagttctgtatctgaatgaggctgggtttttgtttctgttttttttttttactgactcagtgttcactgcaatttgcaataatctccccttcccccaagtctgaagccttccttcccccctattcaaattgtctgcgtcattctcataatgctactatttgggtactcctgaagccaaaccaataaaaaatgctaggggagctttatatgaattcaaacatgatgccaaagtcatctccaaaaaagtttattagcatgattaaaaacattttcttgaataataacagaaagaatttctaaacatgaaagaatatcagtggctataccttaaaaccagtatttggaattgaatggacagctttattgccagtcttcaaaaaacaatccattgattggttccatgaagtcgtgactattgctttgtctgggaatgagtccctactgcaattaagtataaaaaatatcttccatcataattggagtgtgacctgcattggagagtggctctgagtaaagagttgataaaaatccacaaagagttgggtttttgtcttttaaaaacattcctttacacactacaaagaaataattagtattttggctttttaaattcctacatgatatttagaatggcggtccccaagggtcctcccttcacgtaattgtgaacacagaccctcttccaagggcacatcccggagggtgcggactctgaagacttcgacctccacgtgtttatactggtttgagaacaaagacagcgtcatccagaacgtagtagtcattatacatgtcgccttcacacaggtatggtagtctggtgaaagcttcgataacaaaaccagcttttctgaaaacttcaggcagactattcacttgttcttcccagttctgtcctttgatttccaaaatttctgatggtttctcccacttgccacctactaatacaaataagaacattcagttaaattcttgaacaaacaagtgatttaaagagggaagcagggaggagccatatctaccaaggacttggtacgttccaagcctgagggcttcatgagttacctcttttgtacttcccaggtactctttgagacaggtgggcagataaagaacagactcagaaggggtgaagaacttgcccacgcttgcaaggttaatgagtgtcagtatggaaatgtaagcccaggtttgtctggatccaaggccccacactgttatcttctctgacagttttgggtagtatctgccaatagactgactgcagggtgtaatggttaatgggtttggaaaactggtcattaaatgctggaatactgaaacagagagcaacatgtaatatctgaaggacagttttggacaaatgcaagaaaataccactggcatagtaaacttatgcaacttactacctagagagatttattaggctgaaaataaaaacaggctcatgaaggattttaatttagaaaagcagatcattggggagtttttctagggaagttgactcattctttgccttttcagaacaatttcataaacattaagctccaggaccagagagagatggaacagtaggatggatacaccgtccagcatttcttggactagagatgaagcctctatcagtcatttccaaacctatgagcaggagatgcctgggggacaaggggactagggaaggtcctcaaattcacatacaaacctggcactgactacagacacacacacagagatgacagtatatttaactttgggggtactttttaggtgctatggtgatacaaaaactacatacatctgttgaagtgttaaaaccagattgaggccgggcgtggtggcacatgcctgtaatcccagcactttgggaggccgaggtgggcggatcacgaggtcaggagatcaagaccatcctgactaacacagtgaaaccccgtctctactaaaaaaaatacaaaaaaattagctgggcatggcaacatgcacctgtagtcccagctacttgggaggctgaggcaggagaatggtgtgaacccgggaggcggagcttgcagcgagccaagatcgtgccactgcactccagcctgggcgacagagcgagactctgtctcaaaaaaaaaaaaaaaaaaaaaaacaaaacagactgagaataactttctgttaatgagaaaatatatcatgagcagatgccaagggcacagacatcatatcatggtggggagatttttcataattttcagtggtgcagatgacgctcttcccatgtctggggaattgcctgcccagagtctgggagagacacaaggcctgggagccgctttcctggcctgccgtgcagctgaggcactggcacgcagcctaagccaggcacacttgcccatgccctggaatggagagccagtgacccagagtagtggggatgtgagcttctccttctctgggggtggagcaatggcagtgagaccaaggggctggggcagtggttgagcgatgctgacaacagggctgatggcacctagtgtttggcagtggcagtagcatcctcttcagacctgtttatggtgtgatttgaggcattcttcctggctgtggaccccacacaagattcactagccctcccagtgactctaggatctaccttcaaatgtttgcataaatttccttttaagtcagcctgagtctgtttctgctgctttacaaagaagacccttactgaatcaccactaagtgctgggggagaggacacagaggacagagggcccacatatttgtttctcaacacattaaaagggggtctttgggccaggcatggtggctcacacctgtaatcctaacactttgggaggccaaggcagggggatcgcttgagggcaggactagcctagacaacacagaatctacaaaaaaaaaaaaaaattagccaggggtggtggtgcatgcctgtagtcccagctactcaggaagctgaggctgcaatgacctgcaatcttgccactgcattccagcctgggtgatagagaccctgtcaaaaaaggggggaaggcaggtgtctttggattcaaaactggagtacaaaaagttaataacagacaatttatttattcgctgcattagaatgtgttgtttactaacttttctcatctctacacaaagccacttctccttctgctgttctttgttcccagcagttactggcccagagtggcacccagagcaggtaccctagacagtgactgaactgttctgaaaaatccaagtacgaattatttgtcaaacaatactccttcctggaaatatgtgctaggtgtaaatcaaaatctcacccagaaacatctaacacctatgacaactgtaaaatccatggaaaaaaaaaagatatgcacatttctaaatgtgctccaggccaaaatctcaatgttaaatggtgaagccatccttgcacaatttcaaaaagttcctgattatggttccttcataagaggttcctctcttcagctcttcttcccttctgaaaaaagaaagccaactttcctttcaaatacacaccccaacccgccccggcatacacagaaatggggactgcgagcagaagcaacatcgctcgccatctgcaaaccaatctcattctattttgtgtcggtaaggttctttttcttctcctccttcattttatttaaatcaactgctatttttcacctaatgcatttatattttaagctccttcagattaatttttaaatgtataacattatgaaaactgcctaagaggataagtttcctttttcccctgagaaatagacaataaaaaaatagctgagaaaaagtttcatattaaccttgaaaagtctctttgctattatgctaattggagacaatctgaccaaagggttgaaaatattcttaaaatcgtaggtataagttatcaataatttaattatcatacaaacttgatctgcacatagaaagcaataaatgattatttgctgaatattttcaaagaacaatttctataaaagtacttttcatttaagaaaaaaaaaactgccatgactccaatagccatcccatagtatatctatttttaaaattctgtctacttctgtttttttatctatgaaagagaaaggatttccaatacatctagtaatctcagatttgcccacacaatttggattatagggcagggaaggggggaaagttcttaattttttctcatctgtgaagaaatatatcaaaatgttaatgggagttatttcaggcaaaaggactatgggtgactttttgcttctacttttaataacctgttttttgctaataagtatatattactttcatagactattttaattagcattattttaaagaagaattcctgtcttttagagatatattctgaaagatgcagataaaatggctgggatttgctctaaaataatatgggagtgagggagtaggtgggaggagaaaagaaacaagattgggtcgaagccatgtgatggcagggggttgactgtactacttcgctactttgatatgttagaaatttgaaatctaatataata

SEQ ID NO: 6896 - DNA, 6000 bp, Homo sapiens
gaaaaatagaaaaaaattaaagtcaaagttgaatagaaaaaaaattaacaaagtcaaaataggttcttttttttttttttttttgagacacagtcttgctctatcacccaggctggagtgcagtggcctgacctcggctcactgcaatctctgcctcccaggttcaagcaattatcctgcctcagcctcctgagtagctgggattacaggcgccaaccaccacggctggctaatttttgtgtttttagtagagacggggtttcaccatgttggccaggctggtctcaaactcctgacctcagatgatctgcccgtattggcctcccaaagtgctgggattataggcgtgagccaccgcacccggcctgcagctgattcttttaaaagagcaacagaattcacaaatttcagcagactgaccaagggaaaaaaaaattaccaaagtcaggaaagaacaggcagacgtcacaattctacagatgagaaaagactatatgaggatcctttgaacaattttatgccaacaaattatacaacttggatgaaatggacaattatttttgagatggagtcttgctctgttgccctggctggaatgcagtggtacaatcacggcttcctccaacctccgcttcccaggctcaagcaatcctgcctcagcctccctagcagctgggactacaaaaaaaacacaaaataaaaaaaaatttaaaaaaattagccatgcaagtgtaatcataagaaagctggagtggctatgttaatatcacatacaatagacttttttttttttttttagacaaagtcttgctctgtctcccaggctgcagcgcagtggcgcaatctcacctcactgcaacctccacctcctggattcaagcaattctcctgcctcagcctcccaagtagctgggattacaggcacccaccaccatgcccggctaatttttgtatttttagtagagacgaggtttcaccctgttggccaggctggtctcgaactcccgacctcaagtgattcggcctcccaaagtgctgtgattacaggtgtgagccaccgcacctggcctaaaaccgacaatttttttttttttttttttgggtggagtcttgctctgttgcccaggctggagtgcaatggcgcaatctccacctactgcaacctccgcctcctgggttcaagcaattctcctgcctcagcctctcgagtagctgggattacaggtgtgtgccatcatgcccagctaatttttgtatttttagtaaagacagggtttcaccctatttgggccaggctggtcgcgaactcctgacctcaagctatccgtcgccttggcctcccaaagtgttaggattacagcactttgtgcctggtcccaagattcatttgccatcttaaaatcaattactatatcatttgaatagaatgtgacaagaaccacatgattatctcaataggcagagaaaaaaaaatacaaaatccaacatcctaaaaaaactctcaacaaactaggaatagaaagggacttctggccgggtgcggtggctcacgcctgtaacccagcactttgggaggcagaggcaggtggatcacctgaggtcatgagttcgagaccagcttggccaacatggtgaaaccccgtctttagtaaaaatatgaaaaattagccacatgtggtggtgggcacctctaatcccagttacttggaaggctgaggcagaagaatcgcttgaacccgggagacggaggttgcagtgagccgagattgcgccattgcactccagcctgggcaaaaaaagcaaaactccgtccccccgcgcccgcccccccaaaaaaaaattgcaaaggaaaaagtgtctattcacagatgacatgatcctgtatgtaaacaaatcccaaccaacaccccaacacacaaactagaagacaaatttaacagtcaaatggtacaagataaatctataaaaatcaattgttgctgagtgtggtggctcacgcctgtaatcccagcactttgggaggctgaggcaggtggatcacctgaagtcagaagttcaagaccagcctggccaacatggcaaaacctcgtctctacaaaaattagctgggtgtggtgacacatgcctgtaatcccagctacttgggaggctgaggcaggagaattgcttgaatctgggagacggaggttgcagtgagctgagattgccctgctgtactccagcctgtgtgacaaagcaagactccatcacacacacacacacaaaatcatttttctgtaacaagaaactatgaaaattaagaaaattccattcatgttagcattaaaaggaaatacttattttatttatttattttttgagatggagtctcactctgtcacccaggctggataacagtggcccgatctctgttcactgcaacctttgcctcccgggttcaagcagttctcctgcctcagcctcctgagtagctgggattacaggtgcacacaaccacgccaggctgtttttgtattttcagtagagacggggtttcaccatgttgggcaggctagtcttgtatggaactcctgaccttgtgatcctcctgcctcggcctcccaaagtgctgggattgcaggcatgagccactgcacctagaaaaggaaatacttataaataaataaatttaacaaaataagtgcaagacttgtattatacaatgaaaactacaaaatattgctgagagaaattaaagaagatctaaatcagatctaaatccccaggggtgattcctactagggaacacttggcactgtgtggacagatttttggttgccacaacttggagaggatgttgctcctaatgggtagcggccagggatgctgcgaaatatcttacaatgcataggacagcccccataactaaaaattatctgggctcagtagtgccaaggctgaaaaattcccatctaaataaatgaagaggcgtttcatgctatggattggaacagtcaatattgtcatgatggcaattctcctaaaattaatccaacaattcaacagttcaacataatccctgtcaaaatcccagcaggattttttttttttttgggggggatggagtctcggtctgttgcccaggctggagtgcagtggcggatctcggttcactgcaacctctgcctcctaggttcaagcgattctcctgcctctgcctcctgagtggctgggattacaggcgcgtgccaccatgcccagctaatttttttattattagtagagatggggtttgaccatgttggtcaggctggtctcaaactcctgacctcatcatctgcctgcctcggcctcccaaagtgctgggattacaggcgtgagccactgtgtcctgcctaaatttttaacaagagcaaagtaagaggacttacactatcagattgctcccctcgtctcccctccctgcattgctcccctcctctctccttccctcctctcccctccccccaaataactgggactcctagcagaagggttaccccagttaaaacctactcaacccagaagaatgagacaaaccaagggagatgccaatgaaaaacgagtgactatcaggcctggagatggcagccagccactcataccccaatggcaggccaacctggaaaactgtcccctgtagggtttccaaggatgacatcttgtcctcccccttgggttggtcccactcttgaaacaacataaaaacttagaacctaaagaataccctcataccttcccctaccttttcttcttttcttttcgagacagggtctcgctctgtcacccaggctggagtgcagtggcgtgatcacagctcactgcagcctcgacctcctgggctcaggcaatcctctcaccccagcctctcgagtagctgagactacaggtgtgcgccaccacactcagctaatttttaatttttttgcagagacggggtcttcctatgttgcccaggctgagaaattgtttgtgattatgggttatgcacagatttctcagccgcaacaccaaaagcatgatccataaaaaaaggtgataaggaacttaacaaactttaaaaggtctgcacctcaaaacacatcattaagaaaataattagttaggccaggcgcggtgactcacgcctgtgatcccaacactttgggaggccgaggcaggcggatcacctgaggttgggagtttgaggccagcctggccagcgtggtgaaaccccatctctactaataatacaaaaagtagccgggcgtggtggcacgcgcctgtaatcccagctactcgggaggctgaggcaagacactcgcttgaacctgggaggcggaggttgcagtgagccgagatcgcgtcacttcgctccaacctgggcgacagagcaagactccgtctcagaaaaaaataaagaaagaaagaaaaagaaagaaatagccgggcgtgttgtcgcgcgcctgtagtcccagctactctggaggctgaggtgggaggatcgctggagcccagaaatttgaggctgcagtgagctgagatcgttcaattgcccaggaatttgaggctgtagtgagcagagatcgttcaattgcactccattgctgcccactgcgctccactgttgcccaggctgtcctagaactcctggcctcaagcgattctcccgcgtcagcttcctaaagagctgggattacaggcgcgagccaccgcgtaaatgcgctaatgtatgtcagggctttatagtaagcatatagtttagtcctcggcaaatgttagcagacatgggatatttgtcggtgccgggagctctcagtccggggcgttttcccacacccacctctgctcagcgctccggacgcctgcagtcactatggtaacggccaacgacttccggaagaagaacggcgggcggcgagggtcattcccagccgcaaactgagtgcgctgagcggggaagcgcaaaggggcaagttacccgtcctggcgtttctggggttcgcctcggaggctagcctcggtgctctcgcaggctcgctcgcttctgcatccccgttgccgcccggagccaactcttaagttctggacgccaggcctgaggcagttccgccatggacttctccaagttcctggcagacgacttcgacgtgaaggagtggatcaatgcggccttcagggccggctccaaggaggcggcgtccgggaaggcggatggccacgcagccaccctggtgatgaagctgcagctgttcatccaagaggtgaaccacgccgtggagggtgagccgctcggggccctggccgcgggaccctcccctgctctcggctgggcagaggtcaccgaacttgcgtgaggcactcaggtgggcggggcacgcatggacagcaaataccctcggcaaaagagcaagccccgaactcctgatcacgtcagcgggagtctcagctgggtgccgggctgtcttgaacacttgctaattttgggtgttgtttttcctcctctggctgggctataagtttcctttttcttttctttctttctctttgttttttcttttgaaacagggtctctctacagtggctcgatcatagctcactgcagcctcgaactcctgcactcaagcgatcctctcgcctctcgagtcgctaggactacaggcgcgagccaccgcgccccacaaattctgtttaaaaaaaaaattgtagagatgggatctcactgtgttgccaggctggtctcaaattcaaattcctgggcataatgggttttccagtcttggcctcccaaagtactgtgattatacctgtgagccaccacatctggcctgaagtttccttttggaacttaaaagagtggatcttattgcagtagctcttctctaaataattcaatagcagatctctgggattccctttttattattatccataggcactggaagacaagatggatctttttaaatgctagaagttttaaccagttcttaacatgtctttgtt

SEQ ID NO: 6897 - DNA, 6000 bp, Homo sapiens; identical to SEQ ID NO: 732

SEQ ID NO: 6898 - DNA, 6000 bp, Homo sapiens
cctctcctgctcctctttgctcagggccagaactcccatgagctccacctcccctgcctccctttcctcgggttgcttagttggggtctgggcgccccccatcagctcaggtccttggcctttggtgacgctgtgtgtgaggccaccccattccacgcccagtaggccacagctagtctgggccgcctcactctcctcccctgtgagctcctcctcaggcctggcctctggagttgcctccaagtcggcagtgccttcagcctctccatctgagggcagctcagccactggatccctgctgctccctctctcctcctgggcctcctctgcctgtaccagctcttccatcctggcccggtcggccctgatccccaagtcctgcctcatctcagcctccttaccacgcaggtctacctggccctcaaagctctcccctgcctcctggcctcccacagcttccctccctgcggtctggctctcagcagcctcttctgttctttcagtgcccaggacctggggctgtttggggaaagggctcacctcagcctctctctcctcatccccctcctcctctaggacccagacttttccagtagcctctaggagcctttctcctgggactgctccatattctgtctgtctgactcccagcaggtcagcctcctctttgcctgaggttgtccaggcctcgtcccctcctgaggctgtcccggcctcctcccctcctgaggctgtcccggcctcctcccctcctgaggctgtcccagcctccccgcctgaggctatcccggcctcctcccctcccgaggctgtcccggcctcctccccgcctgaggctgtttcagcctcctccccgcctgaggctgtctcagcctcctccccgcctgagattgtcctggcttcctccccatctaaaattgccctggcctcttccctacctggggttgtcctggcctcctctctgcctaagattccccagtcctcaggctctgcccctgggccccacgtcccccatgccctagtgctttcacaggccttctccaccactaccacctcttctcctttcccagccccttcggccccaggctcctcagtttcccctgcatctgcctccctgaccccctgctccatctcccggttgtcccctgccgcctttggcccaacagcaccagccttcccctccgtctccccatgccaggtccactctgactccgcccctctggccatccctggctctcttgccctgacctcttcctcctcctcctcctgttcccagcttctcagcctctcttctctgttcacttcctgctcatgggactcctgcctctcctgggcttggccgctcctgtcttggcaagccccagaccctgccttggatttctttctggcctccaagtgggcgcttggctcctggcacctggcagccttggctgtctccccagccccactgtcctgcctctctgcttgggacccatgggagctgccatctccccagccccaggtctgttctacagctgagctccccacttcatgtcttctgtcatctccaggccctctcagccttccagccccctcgttttggctgcctctaaggccctccaggtcctcctgggcttcctcctctacaatcttccctgtctttcccaccgccaccacccccagttcctcagccgcctgcgcctcccgctctacagtggggactgcatctcccaggaggtaggagacaaaggtgccgagggaatcctaggaaaaaagagagagagaggggagagtcattgaggagagtcccagccctttccctgggggccctggctggaggagcccaggttaaggaagagggtactgggatctgaaaggagaagaagaggatttgcagaaggagccagaaggggcatcgattaggggtacgaggacgcatggttggaggtggggactgaaattcagaaaatattaggccaggagtctgcctgaacctgagaaagcaatctccagtttgaggagatcagaaggaggaggggaaaggtgaggccccaggggaggtgcccggaagtgaggccccagggaatggggtgcaagtatctggcagctgtctgcccttctcaccagtgcccccctcaaggcctggtgcagcccagggaggtatagccggaggaagtccatcctgtctgtctctgtctgtgtgtccagaaagctgataatgaccgtccccacccaccaagacaagccaaccttccccaggaccaaaggcacttcctcttcccctgtctccctgatgcgtccccaccccaggccctgcccacggcccctgatgcccacagtagcccccactgcagcccgggaaatgggtgtacatcacacaggggactcaggtgcacatttggaaataaaggacaagcaagaggccagaaaggacaaagtgggagcaggagaccttagaactggggagggggagagggaggggacatgtggcaacagcagctcaagtgactcaggtctcgtatccgcacctcagccatttctgcctcccctacaagccacagccactctgcaagaggaagctggggtttgtggttcctgttttgcctgggaagaaagagtagcagtgaagagggggctggtgggagctctgacacatttcggcgtcattaatgcttcccccaggggcggaaggggccggattggtggctctggggtgcatcccctcacctatgattaggcttgcaaaaaagaacttggctaaactttatattgtggatatctgtgtctgcctcccaccttcctgtgacttccttgatggcagatgccatgtatgaaacgctgctgaatttctagagccctgcacgttagtaggattccattttccatcagctgagtgacctgggaggcacactagagagggcacatttcttttcttttcttttctttttttttttgagacagtctcactctgtcacccaggctggagtgtagtggcgcagtctcagctcactgcaacctctgcctcctgggttcaagtgattctcctgcctcagcctcccgagtagctgggattacaggtgcgtgccaccacacctggttaatttttgtatctttagtagagacagggtttcaccatgttagccaggctggtttcgaactcctgacctcaggtgatctgcccaccttggcctcccaaagtgctgggatgacaggcatgagccaccacacccagacgagagggcacatttccaactgcattctgaaggcctggtggtgagaaagagcatatagaggtggcacagcccatagcagagatgaggccaaggacaagaagagaatgcaggatgccgctttccacctagaagaaggtaagggtatgattccttatttggaactacataaagtgaccttgctctacttctcttccccataccctccttctcccctccccagccccactttcctattccaattagggcaattctatgaaatcacagcatcagaatcttaggccttaaaatcatttagtctggccaggtgcagtggctcacgcctgtagtcctagcactttgggaagccaaggcaggtggattgcttgagctcaggagtttgaggccaccctgggcaacgtggcaaaatccagtctctacaaaaaacacaaaaattagctgggcacagtggtgcgcacctgctgtcccagctactcgggaggctgaggtgggaggatcacctgagcctgggaggtcaaggttgcagcaaaccaagatcctgccactgcactccagcctgggcaacagagcaaaaccctgtcaaaaaaaaaaaaaaaatctggtctaagcaccacctttgatggaggcaggaatcctgcagcagcctggagccaacccaatggctccctgcctctggtgctctatttcttatcaccatacaggtctctaaggtcacctttaggtctaacattgtatgaatgattgtcagcaactttccaatttttttcatatacatatattttttttattttattttttactttttctttttttgagacaggatctcactctgtcacccaggctggagtgcagtggcgtgatcatagctcactgtagcttcaacctcctgggcacaagtgatcctcccacctcagcttccaaggtacctgtgactacaggaatgcgccaccatgcccggctaattttgttatatatatatatatatatatttgtaccttggttttctcatctgtaacaccaggggttgaagtgctgtgatattttttggttctaggataatttggaaatagggatctcttaacatcttggatactgccaatagatcattcacgaaatccctttagatgagtgttatgtttacttaggtctctaaaacaatttgtaaggtcaacagatggggataagaatgacctgaagctggtcgtctttgttcgcaaccagaaacagtcctgcctcaaaaaaaaaaaaaaaaaaaagggagtaggcaggtggccatatttgtttctggcaagtgagtgctgaaggaaaggagctgaagcctcccacagtcataactggtgctggcaggctactgtctcggtcttgggcgccactgatctaaggtcacggctctgcttgctgctcccacccgctccagtttaaaacctgcggttccagggttctccagcccctccctttttcacgctccgaagccgagaaggcccaaagcgaagacagagaggacccggaagtagggaaaacctctgagcacgtgatgggggaacacgcgggtgctgtcacgtgatccgacaaacggcctctgcatagtgcagaacattctgctgctcttaaaggtacaggcctcagggtccctgctgtagacggggcgggggagagtacgatgggtggggcgtggtgggtcgtagggcgctcgagatggagcccccagcttccttgatggatcgcggggcgcgagtgccctagacaagccggagctgggaccggcaatcgggcgttgatccttgtcacctgtcgcagaccctcatccctcccgtgggagccccctttggacactctatgaccctggaccctcgggggacctgaacttgatgcgatgggaggctgtgcaggctcgcggcggcgcttttcggattccgagggtgagtattcccgcccaccctcatggaacgaccacctctggctcgcagcccacctgaggggaatgagagctgactcggccccgggaggacacgcaaggagcggtcgtgcacctgagagtaggtgggggtcatgccctcttctcgctctcccaggggaggagaccgtcccggagccccggctccctctgttggaccatcagggcgcgcattggaagaacgcggtgggcttctggtgagtggcctgagacttcagcgagtgacaatggcatgagaagagggaagtgaccggaggaaagggggaagaaagagttaagctgcgcaaaggagctgaacccacaaatatttactgaatccactggtttgccccaggggcagcatgtaaaatttccaaacttcactccttatcaccttccggatttagcaagatcctcatacctaccacctgtaggattatttacttttttcttccagccaattcagccttaacgttttttagtgcacatatttttaaaaagaaaactttaaatcacgactccacttggaaaaccagcgttttcctagtgaacgtttaaataaatgcatcactactaaaacttttttatttttttaatttattttattttatcttatttttttttctttttgagacagggtcttgctctgtttcccaggttggaatgcagtagtgcaatcacagctccctgcagcctggaactcctgggctcaagtgattctcccacctcagcctccaagtaggtgtggctacaggtgtgcaccaccgcatctgcctaatttttatatttttttatagagatgggggtctcactatgggacctgggctggtctcaaactcgtggcctcaagtgatcctc

SEQ ID NO: 6899 - DNA, 6000 bp, Homo sapiens
aaagcactttcattcctggtggtatccttgctggctgaggctggagggtcctgtgatgaatccagaacactttgaaggcttcgggatgatgctgctcatgaccaggaggtccccacaaacggaagtggttaacgagtggcaaaagagtagttttgaggcatgttctagggacaaaaagggggaggcatgagaagccaagagcatcaaagaggggtgggctcatcttccaaactgactgttaggaagagctccataaaagagacagagccttttcactctttagacccaaggctcatgtcttttttatttttctcgagacaggtctccctctgtcagccaggctagagtgcagtggtgtaatcatatcttcctgcagcctcaacctgggctccaatgatcctcccacctcagcctcccgagtagctgggaccacagctgtgcaccaccatacccggctaattttttaaacctcttgatagcaggaactctgtttcgttcactgcaacaccccagcccctcgagcagtgctggcacatagtaagtgcttaatttttatttatttaattttttggagacagagtctcgatctgtggcccaggctggagtgcagtggtgcaatctcagctcactgcaacctccacctcccgggttcaatcaagtctctgcctcagcttctcaagtagctgggattacaggtgcgtgacacaatgcctggcttttttttttttttttttttttgagaaagagtcttgctctgcagcccaggctggagtgcagtggtgtgatctcggctcactgcaacctccaactcctgggttcaagcgattctcctgcctcagcctcctgagtagctgggattagaggtgcataccaccaacccagctaatttttgtatttttagtagagacagggtttccccatgttggccaggctggtctcaaactcctgacctcaggtgatctgcccgcctgggcctcccaaagtgctgagattacaggtgtgagccaccgcgcctgacctaacgtttgtatttttagttaagacaaggtttcactatgttggccaggctgatcttgaactcctgacctcatgatccacccgccttggcctcccaaagtgctgggattacaggtatgagccaccgcacccagctcctcctactatttctttctttcttttcttttttttaaatttttctttttgagacagggtcttgcactgtcactcaggctggaatgcggtggcatgaacatggttcactgcagcctcaacctcctaggctcaagtgatcctctggcctccgcctctcaagtagctgagaccacaggttcgtgccaccacacctggctaatttttttaactttttatagagatggggtctctctatgttgcccaggctattcttgaactcctgggctcaagcgatcctcccacctcccaagtaactgggatcacaggcacatgccatcatgcctggggtatcaccatgttgcccaggctggtctcaaactcctggacgcaagcgatcctcctgcttcagcttcccaaagtgctgggattacaggcataagcgaccacacccagccaggaaagtgtgtaaggctctaaacaaggcacataaagtctcttgagtcccctcttaccttgcctgtagactccagctgctaaactgcttctccctgccctaaatacacacagatgctcacactggctctgcgaagactgctctttgcctttgttcatgcaaccccaactgcttgaaagactcctactaacctcttttttttttaacctggaaaattatttctttttttttttgagatggtctcactgtcgcccaggctggagtgcagtggtatgatctcagctcactgcaacctctgtcaccatgttgaccaggctggtctcaaactcctgccctgaagtgatcagcccacctcagcctcccaaaaatgctgggattacaggtgtgagccactgcacctggtggaaaattatttctttaggtgctacctccttcaagaagctccaaagcctgtaatcccaacactatgggaggccaaggagggcggatcatgaggtcaggagatcaagaccatcctggctaacacggtgaaaccccgtctctactaaaaatacaaaaaaattagtcgggtgtggtggcgggtgcctgtagtcccagctacttgggaggctgaggcaggagaatggcgtgaacccaggaggtggagcttgcagtgagctgagatcacaccactgcactccagcctgggcaacagagcaagactccgtctcaaaaaaaaaaagaagaagctccatggctcctgtccttcctgtccaattgaagctgggataagagtactatcccactgtgtccatttctattatggaaacttatccagactgtattataattggccatttccttgtctgtccccacactgaactgtgaactcttcaagggctgagactgtaccattcatttcagtgtcccaagctcctaagacagggaccaacatatagtgcaaactcaaaaggtttggttaatatcgaatagccttggcagccatggaccctgcatgtaccttttcaccaggagttggcaggaggtatgccttgctgcaggtacggtttctgtccgagcaggagatggtggaagagaggggagagggctgagaattcagaatttgaggatcagggcagaatagaatggaagtgcacggttcaaaaattcccccaccctgctgggatattgtgaaaccctcactctctcccctccaggttcctcacctctctcccaggacaaagagcatctcccttgaagcctcactcaccaggtgtctgtgcctcaggtcttggtgaagaatgctggaagtagaggacctagtcagagaaaggactatccccgtggccagaagagatgcggccagggcagacggggctaaggggattctcggccagcagtgaggagtgggtactgggttagcgggtgagaggggcatttcacaggtcctagggctggctgtgagatggatgagatgggcacagactcctggagagttcagctaggggtgggaggggtcagggactgtaaccaggcatagtgggggcagcggttctctagacacggtggtcctgaggcagggggttaccgcgtttggatatctgagtcgcttggtcttgtgactgcttttttttgatgggcacagggttcaagtggcagcaagcagtgcacaaagcctcctccatgagttctgcactgatctgggacaggtattcctcagaacgagataacgaagcctgggaaaggaaaagccggaggggttcagcctgggagctcccacatgggagtgctggctgtgggagttcccaggctggggcctgtgggtccaaggagcttgctcctgaaggactgggccttgagatttagctagaaagctctggacctgggggaggggggtttggtgggggtttagagtcagggcctagtgctgagagctatgagtcggggcttcaggactcagggttgaggctagagtctcagggcccgtggctcagacctggcacggggtgcctctgcctgggaggctttcacttcattacattcccacctctagggttccctgcagtgctcaccggacctcctctcaaggagggtgcagcttgagatggccagctgctcttcttctccccctcattccccatcggagtggacgccatccccctgggaacagtcgaagcctgagttgacctgagaaaccagcccgctttcccccagaacccagtccaccaccattccccgggcccaggtttaaacaaggcctttagaggaaacatcccgctgcctcattccctctcacaagaaaaaataataataataataaaggttgctttatatcttcgggagtgagagggaactcccgcaaccccctacccctcaccccttcgcctggtgggcctctccttccttcttccctcccaagcaccttcccaagccgaggcagccgacttgacgccccagacctggcagatgggtggaaaccttgggctactcggcaaaaggagagacgtggaggcctaaggacctctggtataggtcgtgggggatggagaatgggagatggggaggaaggctggaaaagggggagccggctccgtgtcgctaccggacgctataaaacccttggagtctgcagaggttccgcagcctcgttgctaggagatcaggggttctagaactaaagacagaggaatttcctagcgcgccccgtttgctcctccagcctcccctccgtacccctccaggtgcctccttgagggcagtgaccccaagcgccagacgcttgagaagcttgggaggatgacgtagggtggagcctgcgacctaatcctcccatcacaaggggcacgcgaaaagcaacccatctgcagggcgctctggagcctctctagccgcctagagcctgcgagagcaaaggcggctggagacttagggggcggggagtaaagtgaggactgcaccaaatctcctggcctcttggggacgcaaagactcaggaggaggaattttatcgccttatctttgcctccaggaagtcataccctccacaaaaggaaagcagagatttttattcggtcttctcttttaccctttccttttccgtttctaactttgcttgacgttaatggttccttcctccctctcctcctctgcgctttggtacgagccaagggagaggggcggagggaggaaaagggaaaggaagccgacaggccttaaaggggccgcaactatttttttaagccactttttcctctctccaattttgcaacgacgggcgcggaggaggaggttcccggaagccacgcgcagctggagcagcggcgaccgcagctggaggcccggagcgcctgcggggctggcagaggcgagggaggttgcgggtaggaagggcggactgcgcgcgccccctgcgtcccgcgcacctcggggccggtccatgctcccgacggctgcgggcttcagcatctggggccaggttggggcggcggggtccagggcgcaggtggtgcggccgatgcgccgggccggaggctgaggccgcgctgcggggctgggacagcactggcatctccagagcaggcccggggcagcaagggaggcgccgcgatgccagacgaaaatatcttcctgttcgtgcccaacctcatcggtgagtgctgcccacggccccgggccgaacgagagggcgaggggccttggcgggctccctgatcctgccctgtctccccgcgtcccgttccaaggttatgcccggattgtcttcgccatcatttctttctacttcatgccctgctgccccctcacggcctcctccttctacctgctcagcggcctgctggacgctttcgatggacacgctgctcgcgctcttaatcaaggtgacagacacccctctcagccagccttggggttcaacaatcccctcctcccttcccctgcctcctcgggacctcagagtcagagggctgtcattcccatctctggaaaaagcagaacaggatggcctggggctttttgttttgtgttttgtttttttgtttttgagacagggtctcgctctgtcacttaggctggagtgcagtggcgcgatcatggctcactgcagcccccatcttctgggctcaagtaatcctcccacctcagcctcctgactagctgggactacaggagcgtgccaccacacccggctaatttttaaatttttgtagagactgggtcttgcagtgtcgcccagattggtccccagctcctagcctcaagcgatcctcctgccttgctcccaaagtgccgcgcccagcaagaatggactgattttgtagcaaaaggaatttaagctagctcttgagaactcactgcttgtgagaggtgtggattagcaagacatgacatggcggtggcgctgctggaggtctctctgaatacaagtccattcaggc

SEQ ID NO: 6900 - DNA, 6000 bp, Homo sapiens
cagggatgagccacggcacctggcagcaacctctcatttcgagaaaagagaaggcttcctggaggaaatggcttttcctcctgggctttcgacagtttgactcaagagcttactgtgtgataggcgctgtctcactgagaggtataagattaaagacgttcctggcccaaggaccacatggctgagtgctgtgaggaaagtgagcagccaactcaactgatgggggaacaggaagccaacccagaggaagtgtggcacttgaaaacttgagtactgaaggctgagtaggagtttttcaggaggtggtacgggggaaggggattctaggttgaaaagaacagcacatgtggcatctgtcaggattggccagaaggttttcatgatttagagcacagagagagggaagagaggaaggattgggaactgatcctgaggctagtgtgccctgaagtgtaggacacatccagctggcagcacaggagatgattgggggcaaaacaaggtcatggcatggaataacagaaaattatttccttttccattttcttccagtctttaagacatcaaaaagtgccaggtgcggtggctcacgcctgtaatctcagcactttgggaggccaaggcaggaggatcacttgagttcaggagttcaggtccagcctgtctttacacaatttttttttcttgtttttgagatgaagtttcgctcttgttgcccaggctggagtgcaatgttgtgatctcggctcactgcaacctccgcctcccgagttcaagtgattctcctgcctcggcctcccgagtagctgggattacaggcatgcgacaccacacccagctaattttctgtaattttagtagagacaggatttctccatgttggtcagctggtctcgaactcccagcctcaggtgatccgcctgcctcagcctcccaaagtgctgggattacaggcgtgagccaccgcgcctggcctacgtaaatttttaaaaaatcagccaagcatggtggtgggcacctgtggtcccagctactcaggaggctgaggtgagaggatcctttgatctcaggaggttaaggctgtagtgagccatgtttgtgccactgcactccagcctgggtgacagagtgagaccctgtctcaaaaaaaaaaaaaaaagaaaaagaaaaaatctcagtttggtgctactgtaactttgacaccccaccaacccttttaaaaaagaaggtgtagggctaggcacggtggctcatgcctgtaatcccagcactttgggaggccgaggcggattgatcacgaggtcaggagatggagaccatcctggctaacatggtgaaaccctgtcttcactaaaaatacaaaataaaaaaaaattagccaggtgtagtggcaggtgcctgtagtcccagatactcgggaggctgaggcaggagaatggtatgaacccgggaggtggagcttgcagtgagccaagatcgtgccactgcactctcgcctgggcgacagagcgagactcctcaaaaaagaaaaaagtgtaggcttcaggatcagagagactagagcacttaactagaatgttctagactgttgaaagctttcttttttaaatttcagcttgtgtttatgagtactttcttgtcacccaggctggagtgcagtagcacaatctcagctcactgcagcctcaaactgctgagctccagtgaacctcccacctcaccctctccagtagctgggaccataggcatgggccaccgcgcccggctaattgttttattatttgtagagacaaggtctcactgtgttgtccaggctttttatgagtactatttagggcaagtaatactgatagtgctataaatatttcttttaaatacgtagaacaaaaggtcggggggagagccaaggtgaagaaacgcagtacagatgggaatgaccacggcaaagcttatgaaggtggtgtgcagataaccgaggctgaggaaatgctgctgtgggtggcaacagggagccatggaagaagagaggcacaatgagaaccagacagcagacggctctggcggagagaagggtctgggggggaaatcatcgaggcaaggaggttgtcagtaggcggcagctacttacccagatggcatctgacccgggcattggtgggcccacagcggccctcgagccgggccccaggcaggagaacggaaaagccggcattgccgaaggtgttggcactcataaagcttcgaagccccctcagtgcccgataggcccccgggcaccggcggcagttgctgggttggcaccggcctgcttggtacagcaggagctggtagcacccgggggccagaggtggggaccagccccgaggcggaggggtagtccctgagaagtcccagctcacagccccgaagtcccgcaaaatggcagggaagctgctctccaggagctccacgtcgtgccgctgggcgtcccgcggcacaaagggggctgaaggcaggtctggtaggaaaagcaggcctgggcgctgaatacctaggacccctggccctctcccagggcctgggccaccctgagctgcccgcctcactctacccatcccagcccaggagtagcgccttgcgtaggcccgaagccgccggctcactaggccttccgtcctaggtccttccccgggatccccaggaccccctgggcttggcccgccggcctccgagcatcccacaggcccaccacgaacacccccagctcggctcccagcccctagggcctgcatgtcttgggagcccaggcggtagcagtaccagaggaacagggaagtgagggccccgaagagcaaggtgagggccgaggaggccaggggtagtggccacgggagcatgatcagggaggccctggccaagaggcctggggcgtcctccggaccccagttcccctgtccccccagctccccacctgtcccttccatggctgccccctggctccccgctggactgtttcccttccacattccactctgggctgtctctctctccttccgcggtcctctctccacgctgaagctccctctcccctccttcatgcacctccaaccctcctctctcctttctctcccctttctctctccttctacctcttcttcctcctctccctctgtcgcctcctcaccctcttctttctccttccagcagcctcctctctctcgctctgcttctctctcccacctcaatctccccctttcctccccacccccgcttttcgctcgctctctctccccgcttcctcctagctcccctgggcagcggttcctaccctgcctggacctgcagtcccgggaacccgcagcctgtcttcctccgcggcagcttctttctctccggcctcactgctctctccttgccctcgctcctcactagccccgaccctgcggtcctgcctggctctcgctccctctctcctactcgctccttcctgggctcccactcaccctgacgtcactccttcccggagccctctcagctcagccacccccgaaccctcccagtggcacagcaaatcagccgggtgccgggggaggggggagagttgtcgctggaggtgcctccccaccccccccgcccggaaagggcgccacgtggggcgcaggggccacggtgccagcctccagccgtcccgcaatgcgaaagaaggggcgggtcgtatcgggcggggcctgaggggcggggcctgaggggcggggcgagcgcggactgacggctgggcaggcgcccgggactgcgggcaaggatgctgaggccagtccgtcgggcggctggtccgtcggtcggtcggcctgtgactcccgctggccctaggcagcccgggagcccgcgagcctggcaaacaccgaaagcggcctcagccaatcgcgggcggcgtcgggccgggcccgccccggcggggcgaggggagctgtccgcgcgccgctggtgctgaaaagggcgctccggagggaaaatcagagccgaggccgcctgttagctggccggggtcagggtttatggaagaggaggggtctgtctctcctccccaaaccccggcccgtcacccacgagacttgtcacaatcgtggaagctctctattcccctggaggagggagagcccattccacccgagctactgtaaaaggggaagggaagccccttgggaggtctgaatgtgaacagggggcataattgggggcctagcaggcgcgaaccaagctatgcagcccctcggcaccctgggaagaggagattcagattccagatgtgctggaatggcaggcggagggggctaattactgctgggaccagagagtttcctttgcctcccctaggggccgcgggagtgaggattacggccctggctcgtatgatccctccctcctccatctgcacttcctcctcctccctccccgtcaaataaatcccaggcccctccctccgcccgtccccaggatctgacgtgggctcgatacctttctcagcttctccctcccgcagctccagtgcccgagcttcggctctcccagttccccaacccaccccttcccctccccgacaagccccgctagagcccagtggagaccccctcgatcctcgaccccaccctaaacccccagaagctgtctttctcctccccagtcccctagcttggggtccagacagcccagtggacccaggcgcctgagcaggagggtaacccaggccacccggccccttcggccctctcggccccaccccctgcagccggagccgcgccccctccaccacagagccgcgagaagaggacagaggagactgagcaaaggggggtgggctccaggcgacccctagcccaattctgcccctccatcccaaggggcagagaaattgtctttctttgctgactcctacgaggaaaaaaaaaaaaaaaaaaaaaacaattaaagggaaagataaacggagacggaggaaaggtggcagccagattacttagagaggcacagaggagagagatcggggtgagtcgccatggggactcccagggcccagcacccgccgcctccccagctgctgttcctaattctgctgagctgtccctggatccagggtaaggacatgagactgtgggggtgggccccaggaaggcgtccagcggggtcctccaccctcctttctcttaatatcctgggtcttccgagcacatgggggaggggagaggcacagctgatggggaaggggcaagccagagctttcaggcttgaacccgaagccccttaaccctcaatattgagaaggcagagaaatgaatgagagaagcttttagcagtgtctcaggggctagatccaagaaggagggctgggaaagttggggggatgtctgcggaggcggcagaagcatggagggacctgggtgggagatggaggtgctgagagagatgccaggcgctgtacacacaactgttcttggatgaatggacaaagacagatgagcagaggcagggctcaaagaccagattttcagtcccccactctgacccccagccagactccagggaaggaggcagagactgcagaggaccagagagagagagggtgggggggagagagagagagagagagagagaaaagacagccacactgcagagacagaaacccagagagaaagccaggcactgcggaagcaagggctgggaggtgcggccagatcctctgcagagccccagggttggggggagatcaccactgaggtgaaagggaaggcagcaccggcgacccctctgccttgctggcgctgtccagggtccataagagctaaggtgttcaatgaaggcccacacagcccagggagaagggagaggggaggggagagaagaggtgtgggagtgggagtatgagggcagctgggagcccctcctccgatcttggccctcagtcgagcctgggaccatctgagcccctgcaggcccagctgatggaggagggaggaagagttctagaaa

SEQ ID NO: 6901 - DNA, 6000 bp, Homo sapiens
tcccagcactttgggaggccaaggtaggaggatggcttgaggccaggagtttgaaaccagcctgggcaccatagtaagacccatctctacaaaacaaacaaacaaacaaaaacagattagccaggcatggtggtgcatacctatagtcccagctacatgggaggctaaagtgggaggatcgcctgagcccaagagttcgaggatgtcgtgagctatgatcttgccactgcactccagcctaggcaacacagtgagaccctgtctcaaaaaaaaaaaaaaaaagaaaaaggaaggaaagaaggaaggaagaaaggaaggaaggaaggaaggaaagaagaaaagaaagaaaaagacaagaccaaaatttggccaggcacagtggctcatgcctgtaatctcagcactttgggaggccgaggcaggcggatcacctgaggtcaggagttcaagatcagcctggccaacatggtgaaaacccatctctacaaaaatacaaaaaaattagccgagcatgatggcgggtgcctgtaatcccagctactcaggagtgtgacgcgggagaatcacttgaacccgagaggcggaggttgcggtgagccgcgatcgagcaattgcactctagcctgggtgacagagcgagactccatctcaaaaacaaacaaacaaacaaacaaacaaagaaataccaaaatttattattttaatgtattctttggaacaggtaacctatgcatgtggcacaaaattcaaaaaatacaaaaggatgtacgttgaaaagtaagtctttcctcttcctgccctgtctccccagaggtcaccatagttatattttcttctgtgtatttattatttttttattattatttttattttttcactctctcagcttgtcaagagacacagttaccattcttgtgcaggcctccagaaacaacatatgaacaactaagcaaacacggctaagctctttccctctcaaatggcagtattccaagcatgcttctctgcacttgcttttcttttttgatttttttttcttttttctttttcttctgagatggagtcttgttctgttgcccaggctggagtgcagtggcatgatctcggctcactgcaacctccgcctcccaggttcaagcaattctcctgcctcagcctcccaagattacaggtgcccgccaacatgcccagctaatttttgtaattttaatagagacagcgtttcagcatgttggctaggctgatcttgaactcctgacctcgtgatcctcccgcctcggcctcccaaattgcggggattacaggtgtaagccaccatgcccagcctgcactttgctttttttttctttgagatggagtctcgttctgtcgcccaggctggagtgcagtggcgcaatctcggctcactgcaagctctacctcctgggttcatgccattctcctgcctcagcctcccaagcagctgggactacagttgcccgcctccacgcccagctaattttttgtatttttagtagagatggggtttcaccgtgttagacaagatggtctcgatctcctgacctcgtgatccacccgccttggcctcccaaaatgctgggattacaggcgtgagccatggcgcctggcctgcacttggcttttctaagttaaaatgaaactgtgaaatgattctagggccaggcacagtggcgcacgcctgtaatcccaggactttgggaggccgaagcgggaggattgcttgagtccaggaatttgagaccagcttgggcaaagtagtgagaccttgtatatttaaaaaaaaaaaaaaagatgattctaaacaagagcaaaacagcctcttgtggctgcaccctatttcactgcatggaattacatcatgactgatttaactggtcccctgcttctgggtatctcagttgtttccagtcttttggaacgtgctacatttaagaattttgaacttcatggccaggcgcggtggctcacagctgtaatcccagcactttgggagaccgaagcaggcggatcatgaggtcaggagttcaagaccagcggggctaagatggtgaaacaccgtctctactaaaaatacaaaaacttagccaagtgtggggcgtgcgcccctgtaatcccagctacttgggaggctgaggcaggagaattgcttgaacccaggaggcagaggttgcggtgagccaagatcgcaccattgcactccagcctgggcaacaagagtgaaagtctgtctcaaaaaaaaaaaaagaaaaaaagaatttgaacttctattatttggcttatgggttggcatatctgtaagataaaatcctaaaagtggaatttctgggtctaaggattttttttttttttttttttttttgagacagggtctcactctgttacccaggctggagtgcagtggagtgattatagcttactgcagccttgaccttctgggctcaagagatcctcccaccatcacgaggtcaggagatcgagaccatcttggctaagaaggtgaaaccccatctctattaaaaatacaaaaaaattagtcaggcgtggaggcgggcacctgtagtcccagctacccgggaggctgaggcaggagaatggcatgaacctgggaggtggagcttgcagtgagccgagatcacgccactgcactccagcctgggcgacagagcgagactccatctcaaaaaaaaaaaaaagaaaagaaaaaaaaagaagagagatcctcccacctcagcctcttgagtagctgggaccacaggcacacaccactatgcctggattttttttttttttttttttttttttttgtagagacagggcctcaccatgttgcccaggctggtcttgaacttctgagctcaagggatcagtccgtctcagcttccccccagcccagacactttggctttgcccattttatgggtaataagtgatatctcagggttttttgtttgtttgtttgtttgtttgttttgagactgagttttgctcttacagcccaggctggagtgcagtggcacgatctcagctcactgcaacctccgcctcccgggttcaagcgatcctcctgcctcagcctcccaagacacataccaccacgcccggcatttttagcagagatggggtttcaccatgttggccaggctagtctcaaactcctgacctcaggtgatccacccacctcggcctcccaaagcgctgggattacaggcgtgagccactgcgccccgccccctcagtgttgttgactttacatttctcttacttttttttttttttttttttaagagactgtgtctcactgtgttgcccaggctggcttcactcaagcgatcctctcgccgcagtccctggagtagctaggattacaggcacccgccaccactctcggccccatttctcttatttaaaaaaaaaaaaattgccgtgaaatacgcatatcgaaatgtaccatcttcaccatttttaagggtaagattaggtggtgttaggtatgttcagttgtcgtgcaaccagattgctgttttaaataacagcacttagagatgccgacttcgtgccaggcccagtttgggacattagggactcccagatgaatcagccgctccagtggaactccctgctggtgggggaggcactggcgaagcggtgctgagccgagtcctgacggcgctggagctgaggggcagtgcgggatgccccaggaaggctcctaggaagaggggacccacggtgacttcctaaggaagcgcggttcccaggtagaggagcgcatgtgagccaagatccctaggcctgagccgtctaggtgtgtcccaggaactgcaggaaacggttgggtgagtcagtggtgggcagcgagggtgataagccccttcgtgtcttcgggatggtaagtttggggcacaggtgagtgaagaccgaaggccaggggtggactgacactccgtggcaggcgcagggccgggcaggggggcggcttgggggtggcaaggtttgggtgagaaatggcagcccatggggaactaccgcagggctctgagaccttcagagccaagccccgacgccccttcccacctgcggggcagaactggggatggcaggggggagggtggttcccaaaggagataccatccctggtaaggggacatgggcccctgggagttgggttgggccacaaggagagaggcctgaacggccaaagggagggggcgtgggggaagccgcagcatcagacctctgcctcctccctcagatcgtgaggctccccagcctggctcgggagaccccgagatccccggccggtgacagcaggcgaccccctgctcctgtcaacctgtgggtccctacggacgtggggaagggaggagggaggccccagctccctgcgggggaggggcgtgaagacgcgcgggggtggggggagatgagccggcgtcgccatgacaacgaggccggtggtccggccttggggacccgggagggagggaggcgccgtggccgcgcgcgcgggcgggggcggggggccaggtctcccaggagtagttggggaacacccggcgattctggcggctgcttcctggtggcgcagggagcccgcgtgtttgcgagtgcgtgtgtgtgcgaagttctccgggtaagtgtgccagcgcgcgcctgggtgtgtgcaagggtgtgagcgtgcacacgtgggcacgggcgtgtgcgcgcgggggtgcccggttggatgtgtgcacacgagtgtgtgccggtccgcgtgcccctgcgtgagtgtgcgcgcgcgagcacacgtgtgtgtgcgcgctcgcgtgcgctcccgagcgggccccgggtgggagtccgagatcccgccccctccccagccccagcgcccctccccgtcccccgccgccgcgccggctgcatcctcgcctccacctcgctcaccccctcctccccgcactttctcggcgctccctccctctcggctcgcacagctcgactccgcgctctcctcgccggccgccgccgcccagcctgcgcccgccgtccccccagtgcctgggcacctgttggaggcagaggcaggtgcagggggctgggcaggccgggggcgtgagggtgcggggaagcgtgccagcctgtgtgcgctacgggggtgttcggctctcctgcggctgcaatttctggctcccctgaggagccagaggtggcatctgaggctggggtctccaccgtgggctgtggtgagcgagcgggggaaccaggcaggcagacaggtcctggggctgaatgaggggacagtgggcagttggagcctagaggggtgggtgacaccctgactagaccagcgcctggtgcagaggaggacagagcctccgagaaacagaggcggggccctgcagggccccttgggggacaggcaggctcaggagcagaggggagccccggaggagaggaaggagctggcaagatgatacagggacaacctagaagtgggtgggtgaggacggggtggtgcaacctcgacttctgcaaggagtgggttggcagcccagcccctgtggagtcagcttggggtctgcagggcccaggcctcccacctgccaccggctggcacacaccaccctctccctcgacacctaggaagggaggccagtgagggccccacagaccgaggaggccgtcgcctggccctcagccaggatggctaggtatgatgggctcactggctcacacgccctctcctagccaggggtgctgcatgaggggccgcaggggcgatcgcatgaccatcaacatccaggagcacatggccatcaacgtgtgccccgggcccatccggcccatccgccagatctctgactacttcccccggggaccaggacctgaagggggcggcgggggcggcggggaggcccccgcccatctggtccccctggctctggccccccctgcagccctccttggggccaccacgcctgaggatggtgcggaggtgga

SEQ ID NO: 6902 - DNA, 6000 bp, Homo sapiens
ctcattgggggtgaagaaggctgctggggggtctgagggtgttgtgttgaggtgttctcatggccgtctttttctgccttcttggctgcaggcaggcatgaccctgctgttcgcagtgggttgcgtcttcttcccgttgtgcttcactgccctgcgctggggcttgcagaaccacaccaacctgcagatggagagacaagaggctgtcctggtagcatccaagtaagaggaccagggtgagggtgtccttcctggggccatggctggtggaactgatcttttactttcagaatgagtttgtggtgaaagcagaagcagagtgtggagtggagctggaatgtggagtcaaaagacaccagcaggctgggcgtggtggctcacgcctataattccagcactttgggaagctgaggcaggtggatcacctgaggtcagtagttcaagaccagcctggccaacatggtgaaaccctgtctgaactaaaaatacaaaaattagccaggtatggtggcaggtgcctgtaatcccagctactctggaggctgagacaggggaatcacatgaactcgggaggtggaggttgtggtgagctgagatggcgccactgcactccagcctaggtgacagagtgagactctgtctcaaaaaaaaaaaaaagaaaaagaaaaaaagacaccaacagtggggtcttttgtgagtcatttaacttctctgaacttcagatccctcactggtaaatgggcttaataataacaccccactttcctttcttcgtggagatgttgtgtgaggatcatatgaatcagcgtctgtagagcaggggttgaaaactgctgcagataatatgagggctgtgggctctgcagggatgatataggctggaggactcaccttctctgctgagggccagtgctgctcagctccagccactgataatgttatatggttagaacgtgggccaatattttcggagttatgattctttgtcgttgttgagacaggttgagacagggtcttgctctgttgcctaggctggagtgcagtggcacgatcatggctcactgcagccttgaactcctgggctcaagcaatcctcctgccatagctgggactacaggcaatgcaccaccaagcctggctaattttttttttttttttttttggtagagacagggtctcactatgttgcccaagctagtcttgaactcctgggctcacaggattgttccttctcagcctccgaagtgctgggattacaggcatgagccactgtacccggcctcttctttttttttgagacagagtctcactgtgtcacccaggctgaagtgcagtgacaccaccatgattcactgcagccttgacctccctgacaagtgattctccctgagaatcgggctgactcctgagtttcttggactacaggtgtgcaccaccatgcctggctaatttttgtactttcagtagaggcggggtttctccatgttgcccaggctggtcttgaactcctgggctcaagtgatcctcctgccttggcttcctgagtagctgagactacaggtgcatgtcattgtggtgggctgtctcccaattctttttatttttttgagatagaatctcactctgttgcccaggctggagttcagtggctcaatcttggctcactgcaaccttcacctcccaagttcaagcaacatttctgcctcaacctcccgagtagctggtattacaggtgtgcaccaccacgtccggctaatttttgtatttttagtagagacggggacggggtttcaccatgttggccaggctggtctcaaactcctgatctcaggtgatctgcccactttggcctcctaaagtgctaggattacaggcatgagccaccacgcccaacctcttccaattcttgaatactgataagtaactaagaatttatttaagaactactatactgacaactgcatactggccaaacaaaacatgtctgtgggccggattgggcccttgggctgcagatctatgacctgtgtgacaaagcttaccataaaagtgcagtatcagcaaaccacaggaggcgtaggaggtacacggaacacagattttactagggtgtctacgtggattccctggcagacaaaaaaagcctgtctctactcatccaaagtgaaaccacagttccatgaccagccttgtagtcctcaatcgagtagttacggtggccgcccatcacccagcctccccagcctctgtcctttttgcagttttgctcatgagtggctttggggttatgcaactatggttttttggtttttctgttttcttttaagatggagtctcgctctgtcgcccaggctggagtgcgatggcacgatctcggctcactgcaacctccgcctcccaggttcaagcaattctcctgcctcagcctctcaagtagctgggactacaggcgcatgccaccatgcccggctaattttttgtatttttagaagagacggggtttcgctgtgttagccaggatggtctcgatctcatgattcgccagccttggcctcccaaagcgctgggattacaggtgtgagacaccttgcccggctgcaaccatgggtttgaaacccagctttcatccgggcgtggtggctcccacctgtaatatcagcatgttgggaggcagaggtgggtggatcgcttgagcccaggagtttgagaccagcctggctaacgtggtgaaacttcatctctacaaaaaatacaaaaattagctgagcatggtggtgtgcgcctgtagtcccagctactggggatactgaggtataaggatcatttcagcccggggaggttgaggttgcagtgagccatgatcgcgccactgtactccagcctgggggacagaatgagaccctatctcaaaaaaaaaaaaaaaaaaaaaaccccacaaaatttctaaacctgtttcttctgtaaaacagggataccaagtaagaaccagtagaaatcacctggtactgtgcccagcatgtagtaaaaactcagggagctggatcccctttccccctcccgtgaagggctgaggacaggagctaggtccgctattgtctctacaaccgtctctaaatcagcgtgagacttcttgggtgctttcctacagattgccgctagagggcagcacaaaacagcaaatcccagtccctggcctttctttgggggaggcgaggagtgggctctggcagagaaaggcaaaccatagggttgactattgaacttggagaccaaaggagtttgcataacaggcccttgtcatgctgaagtccacaggacagttgggagcaggatgggaggccagaagtcaaagggggcagtgtctctggctcaggtcccacagctccacccgggcccagtccccaggcctcactttccttatgggccagtgaggagcttgcaccagcccaccccgcagtcctttcccactctgaaactaggctgtatgtggaagttgcagagaaaggggagctagtagcattaaggaaactgaggaaaaagtgaggggtgggaatttagagaaggccaggaggggctggcagtctgaagaacagggcctgggcatcctagggctccctgggacttcctgagaggcagctgccccgcgctctcgccaccgtttccccttcttccactccttgcccctccaacgcctgcaatgagagggctgtgccacttctgaactgggtgacctcagggagcctcaggatcgttgatggccctgtgggaaggacagacgcagtgacctcggagctcctgcagcagacaggacatgggcagccctgcagcacagtcaggtgccccctctggccaatgtcagcttccttccccgccatcgggtgagggggcctctggctctgaggatgctgtgttgagatgtttttgctcctatcccctccttcagctcttccttctgagaaagcaccacttactccctctcccagggaacgctctcttccgctggaatggccacccaaagctcggacccggggcaggccacagagggatggcttggtgagggaggagatgccaggcatttgcaaagtgctgatgggaagcagggtcaggcccctgtgggggctcagggccccctcccagctggccaaggagccctgggcccccttcctccccaagagaagagctggcccctgtcccctgtccccagcagccccctgtgccaccgcagctgctgttcctttaagggcctccccctccctctttctctgctccccccatctctgtcgcagccgcggctgtggctcagagctgcatggggagacgccgctgcaggtccggtttctcggtgtctggtcggtgccatcattttcctgcccctcccccgtcctccccaagctggccacttcccctccccctccccctccccaccgagggggcagggggctgggcacggagtctctatgatgatgccatgtgcggtgtctgtgccgggcggcagggactggggcggcagcgagaggaggcagtggagccaggagagcggtggtgaccgctgaccgcttgcccggctgctcctccgctccctcccgcccacctccttcctttggggctggtactcagacccacccccaccccctccccgcctcctcgggccctcccagcctctcacgtaagcctcccctccccacctgcctggtggctccctcccctcccccatccgcatcctcctcctcctgtcccctcttcctctctgtccctcaccaagccatcccctctttgcctctccccatccctcgctggcctgctcctgctccccttctcccatcctcccctcccccgtctctgcccagccagccccctcccgactccccagtttcatcggactccctggccccatcccgtccccgccctggcccctttgtgccccttctcatcgttttctccctccttcccgggcttggcgtcccttctccacccctaactccttccactcggcctccctgccccttcacggcccgcctgcctccctgcccaagtcctgagccaccatgctgaccccgatggtggccgggggggtggtgttccccggactcttcctcctctccaagaacacgctccagcggctgccccagctacgctgggaggaggccgacgcagtcattgtctcagccaggtaaaccactttctttcccctcagcccctgtctgcttcttgggcttctcagggaatggaagggacctggcacttctctggaccctcagcggtgggggactgggagctcctgtgggggtccggggctttacccccaggcttcctctctcctcactgcctgccttgctcactgttctgggagacctcatccagcccggccatctggtctactagtgttcagcccgcctctctcttcttccccgtacaccctcccaccctccaaaacagggccagcatgcggcgaagacattcctataagacattagggactgaggccagggccagacagctaggtgtcattcagggtgagtgtttgggggccagggatggaggagtggatggtacaactctacacccctagaacagggccagagtgcagagtggaggctggtggcagtcaggagacagtgggaaagtgactggggaactcggggtcacaaagggtccagagtgaggcctgcgtcatgactggacagctaagcggggcaagaaccggcccaggctcccctcgtggggagaggtccaggccagcagttcactctcagtctcacctcaggacagacaccctgcgggcttgagaagagggagactcagtttccacaaatggggaaggaagaaggtggcaaggagtggggtggactgaggaacagcagccgagcgggccggagagccgtgaggtacctgtggtggggcacacctcaggcagcccagccttgggcgaaggcaggcaaggactggcccgagaagtggctgaacgcaaagcgcagtcgttagactagcaacgaggagaaa

SEQ ID NO: 6903 - DNA, 6000 bp, Homo sapiens
gagtttgagaccagcctggccaatatggtgaaaccccgtctctactaaaaacacaaaaatcagccacgcatagtggctggtgcctgtaatcacagctactcaggaggctaaggcaggagaatcacttgaatccgggaggcagaggttgcagtgagccgagattgcaccactgcatttcagcctgggcagcagagtgggactgtctcacattaattaattaattgattaaatgctagaagaaaatatggtcaaaatcttttataactcttggagtgaggaaggcaatctcggctcactacaacttccacctcccgggttcaaatgattctcctgcctcagcctcctgagtagctgggattacaggcacccaccaccatgcccggctaatttttgtatttttagtagagacgaggtttcgccatgttggccaagcttgtcttaaactcctgacctcaggtgatccacccacctcagcctcccaaattgctgggattacaggcatgagccaccatgccccgcctaattttaaaaatgtttataaagacagagtcttaccacgttgtccagacctgtctcaaactcctgggctcaagtcattgtcttgtctcagcctcccaaagttctgggactacaggtgtgcaccaccacacctggctaattttgtttattttttatagagtgagggtctccctgtgttgtccagggtgtctcaaactcctgggctcaagtggtcctcctgcctcagcctcccaaagtgctgggattataggcataagccactgcacctggccccagtgtgtgtcttctgaggctaagtcataaagagattgcggcttctattttgcttcctcttagatcactcattctgggggaaaccaacaataaataacaggaacacaccaggagatcagagaaagctgagatacaggcctaatgcccagtcctctgtattcatttctaattgctgctgtaacaagttactgcacatttaatgatgtaaaacaacacaaatttatcttacagttctgtagcttagaagtctgacagagtctcactgggctgaaatcaagatgttgatagttccttcccggtgactctagagtgagaatccagttctttaccctttcttgcctttagaggccacccgtatttattagctcacaatccccttcctccatcttcaaaccagaaacattgcagctctctgtgtcttttttctttactcacatctccctctgactttcttctgccatcctccttcattttttaaggacccctgtgggccaggcatggtggcttatgcctgtaatcccagcactttgagaggcggaggcaggcgggtcacctgaggtcaggagttccagaccagcctggccaacatggcaaaaccccatctccactgaaaatacaaaaattgggccaggcacggcggctcacacccgtaatccccatactttgagaggctgaggcaggtggatcacttgaggtcaggagttcaagaccagcctggccaacatggtgaaatcccgtctctactaaaaaaaaaaaaaattacaataattagtcaggcgtggtggccagcacctataatcccagctacttgggaggttgaggcacaagaattgcttgaacccgagagggggaggttgcagtgagctgagattgcaccaccgtactccagcctggatgacagagcaagactctgtctcaaaataaaaattaagataaataataaaaaataaataaaaatcagcaaattaggccaggtgtggtggtggctcatgcctgtactcccagcactttgaggtgggaaggttgcttgaaaccagaagtttagaccagcctgggaaacaaagtgagaccccatctctacaaaaataaaaataaattagccaggtgtggtgggacgtacttgtactcctagctactagggaggctgaggtgcaagaatcgcttgaacctgggagacggaggttgcagtgagttatgacagtgccactacactccagcctgggtgtcaagggtctttgaaaaaataaacaaaataggctgggcgtggtggcttacacttgtaatcccagcactttgggaggctgaggcaggcagatcacaaagtcaggagttcgagaccagcctggccaacacagtgaaaccccgtctctactaaaaatacaaaaattagccaggcatggttgcacgcgcctgtagtcccaactgctcgggaggctgaggcaggagaatggcttgaacctgggggggggcggaagttataatgagccaagattgtgccactgcactccagcctaggcaacagagcgagactccgtctcaaaaataaaaataaaaataaatcaatagagcctggtatgatggctcacgcctataatcccagcactttgggaggcccaggtgggtggatcatctgaggtcaggagtttgagaccagcctgaccaacatggagaaaccccatctctactaaaaatacaaaaaattagccaggcgtggtggcacatgcctataatcccagctactcaggagcctgaggcaggagaatcgctttaaccggggaggtggaggttgcggtgagtcgagatagcaccattgcattctagcctgggcaacaagagcaaaactccatctcaaaaataaataaataaatagatagataggctgggcacggtggctcacgcctgtaatcccagcactttgggaggccgaggtgggcggatcacctgaggtcaggagttcaagaccagcctggccaatatagcgaaaccctgtctctactaaaaatttaaaaaattagccaggcatgatggcgggtgcctgtaatcccagctactcgggaggctgaggcaggagaatctctcgaacctggcaggcggaggttgcagtgagccgagatcacaccattgcactccagttgggcaacaagagcgaaactccacctcaaaaacaaaataaaataaaataaaatcaggagattggtcagcttaattccatctgcaaccttaattcccttttggccatttaacctatcatattcacaagttccagggattcatgcagggacatctttggtgaccattattctgtctaccacactctctagaagagagtagatgtgagaaacagcatctggagagggaggagccagcaggagagggaaatatcacagacgccagaggaagagagttcccagaagggtaggtgcaacagtaagggatccctctgggaagtcaagcaagagaagacctgaaaaacaaccattggccgggtgcggtggctcacgcctataatcctagcattttgggaggccgaggtgggtggatcacttgaggtcaggagtttaagacaagcctggccaacatggtgaaaccctgtctctactaaaaatacaaaaattagccagacatggtggcaggcacctgtagtccaaactacttgggaggctgaggcacgagaaccacttgaaccctggaggcggaagttgcagtgagccgagatggcaccgctgcactccagcctgggcgacagagtgagactccgtctcaaaataagtaaataaataaataaataaccattgggtctagcgtcttggtgacaccagccactaggtgtcagggcaatgctggaggcagcagctagtttatggcgtgggcagcaaggaagaagtgaggaagtagagactgggagtgtagaatctttccaaaaacttgaatgtggaggggtagatgggataatgccgggagaggaggctggtgaaggacctcttagtgaagggagatttgttgctgtttctgagatgggaaagagaaacaagttgcagtgtagatggggaggatggagaggttgaaggtgtaggagagatgggtcaccatcagatgggacgtctgtgaaggagagacctcatctggcccacagcttggaaaggagagactgactgttgagttgatgcaagctcaggtgttgccaggcgggcgccatgatagtagagaggttaggatactgtcaagggtgtgtgtggccaaaggagtggttctgtgaatgtatgggagaaagggagaccgaccaccaggaagcactggtgaggcaggacccgggaggatgggaggctgcagcccgaatggtgcctgaaatagtttcaggggaaatgcttggttcccgaatcggatcgccgtattcgctggatcccctgatccgctggtctctaggtcccggatgctgcaattcttacaacaggacttggcatagggtaagcgcaaatgctgttaaccacactaacacacttttttttttcttttttttttttgagacagagtctcactctgtcggcctggctggagtgcagtggcacgatctcggctcactgcaacctccggctccccggctcaagcaattctcctgcctcagcctcccgagtagctgggattacaggcatgtgccaccacgcccggctaatttttgtatttttagttgagatggggtttcaccatgttggcgaggctggtcttgaactcctgacctcaggtaatccgccagcctcggcctcccaaagtgctgggattacaagcgtgagccaccgtgcccggccaacagtttttaaatctgtggagacttcatttcccttgatgccttgcagccgcgccgactacaactcccatcatgcctggcagccgctggggccgcgattccgcacgtcccttacccgcttcactagtcccggcattcttcgctgttttcctaactcgcccgcttgactagcgccctggaacagccatttgggtcgtggagtgcgagcacggccggccaatcgccgagtcagagggccaggaggggcgcggccattcgccgcccggcccctgctccgtggctggttttctccgcgggcgcctcgggcggaacctggagataatgggcagcacctgggggagccctggctgggtgcggctcgctctttgcctgacgggcttagtgctctcgctctacgcgctgcacgtgaaggcggcgcgcgcccgggaccgggattaccgcgcgctctgcgacgtgggcaccgccatcagctgttcgcgcgtcttctcctccaggtgtgcacgggagtgggaggcgtggggcctcggagcagggcggccaggatgccagatgattattctggagtctgggatcggtgtgcccggggaacggacacggggctggactgctcgcggggtcgttgcacaggggctgagctacccagcgatactggtgttcgaaataagagtgcgaggcaagggaccagacagtgctggggactgggattattccggggactcgcacgtgaattggatgccaaggaataacggtgaccaggaaaggcggggaggcaggatggcggtagagattgacgatggtctcaaggacggcgcgcaggtgaaggggggtgttggcgatggctgcgcccaggaacaaggtggcccggtctggctgtgcgtgatggccaggcgttagcataatgacggaatacagaggaggcgagtgagtggccagggagctggagattctggggtccagggcaaagataatctgcccccgactcccagtctctgatgcaaaaccgagtgaaccgttataccagccttgccattttaagaattacttaagggccgggcgcggtggcccactcctgtaatcccagcactttgggaggccgaggcggatggatcacttgaagtcaggagttgaccagcctggccaacatggtgaaagcctgtctctaccaaaaatagaaaaattaatcgggcgctatggcgggtgccttaatcccagctactcgggggggctaaggcaggagaatcgcttgaacccgggaggcggaggtttcagtgagccgagatcgcgccactgcactccagcctgggccagagtgagactccgtctcaaaaaaaaaaaaaaaaaaaaaaaaaaagagacttacttaaggtctaagatgaaaagcagggcctacggagtagccacgtccg

SEQ ID NO: 6904 - DNA, 6000 bp, Homo sapiens
gtgagcagctgagcctggatttggctatgctttccctctagcgtcaggagggccaagaaagacaccgtagttgaactttgatagaagagcaggaggtgggcttggggatgttagagggaagggagttccaggggacaagaatgacacgaggaaaggcatggagatataaaaatgcagggaataacgggataggagtagaaggtgcgtgggaataggtggcatgccctaaagtggaaagccaggttaggaaattggggctttaccccataagcaatgggaaaccagggaaattttctgatcaggggctggcctggttatatcaatgctttaaaaatttggccaggcacagtggctcacacctgtaatcccagcacttttgggaggccaaggcaggtggattgcttgaggtcaggagttcaagaccagcgtgggcaacatggtgaaaccctgtctctacaaaaaatacaaaaaaattagatgggtgagatggcacatgcctgtggtcccagctacttgggaggctgaagtgggaggatcgcttgaacctgggaggtggaggttgcagtgagtggagattgtgccactgcactccagcctgggtgacagagcaaggcgccatctcaaaaaaaaaaaaaaaaaaaaaagggtggggggcactgggtaggagactgcataggaagttccttcatgattcagatgactcactttgggtagcccataagtggtcatgaatgtaatgagcttgaaatcactgatcagtgagaggaattgccatatgtgtgtgcctgtgtccatctttagagctgcagacagatttgagtggtgcgccattcactcattcattcctataacacataattactgagcgcctaccatgtgccaggtgccgtggagccactggagaaccagcagtgaacacacaacagacaaaactccctgccttcacagtttgctttgttctttatgcctgggtaaaacgggtgcaggaatatgccatttattcattctgatttttttgtttgtttgtttttgagacagagtcttgctctgtctcccaggctggagtgcagtggcacgatcttggctcactccaacctccgcctcccaggttcaaccatacttgttgcctcagcccccagagtagctgggattacaggcacatgctaccacacctggctaatttttatatttttattttttatttttatgtatttatttatgtatttttgagatggagtttcgctcttattgcccaggctggagtgtaatggcatgatctcggcttactgcaacctccgcctcccaggttcaagcaattctcctgcctcagcctccctagtgcctgggattacaggcatgtgccactacgcctggctaatttcatatatttagtagagacagggtttctccacgttggtcaggctggtctcgaactccccacctcaggtgatccacctgcctcagcctcccaaagtgctaggattacaggcatgagccactgcgcccggcaggtcacatttgttttgggggcaatcacattaaggactggggaggaagacatatgtaaaggaaaggggctttgttcaagtgggaagaccagagagagaaggctgtgctgacggcccaggtgaaagacagtgagggcctagactgacctgaggtggtggggacaggagagggcctagagacggctctgggtgtcacagttgagagaggagctataagagcatgcttttacaagaatgggttgtgagccaggtgcagtggtgtgcccctgtagtcccagccactcaggaggatgaggtaggaagactgagcccaggagtttgagtccaggctgggcaacagagtaagaccccatctcttaaaaaagaagaagaagaagaaggagaaggagaaggaaaaaagaaagaagaaagagaaggaagaagaagaagaggaagaggaagaagaggaagaggaagaagaggaagaggaagaagaggaagaggaagaagaagaagaaaagaagaagaagaagaagaagaagaagaagaagaagaaagaagaggaagaggaagaggaagaggaagaggaagaagaagaagaagaagaagaagaagaagaagaagaagaagaagaagaagaagaagaagaaagaagaaaagaagaatgggctttgcaatcaaaagatacaaacaaggtcagacacagtggcttatgcctataataccagcacttgggaagccgaggtgagagcccaggaggctaggaccaatctcgtctctgcaaaaaaaagaaaaaaagaaagttaaattagggccaggcacagtggctcacacctgcagtcccagcactttgggaagccaaggcgggtggatcatttgaggtcaggagttccagaccagcctggccaacatggcgaaaccctgtctctactaaaaatataaaaattagccaggcatggtggcaggcacctgtaatcacagctacttgggaggttgaggcaggagaatcacttgaacccaggaggcggagattgcagtgagccaagatcgcgccattgcactccagcctgggtgacagagcgagactctctctcaaaaaaagaaagaaagaaagaaagaaaattagctggacacagtggtgtacacctgtagtcccagctactcaggaggctgagatgggaggattgcttgagcccaggaggtcaaggctgctgtgaggtgtgattgcaccactgcactccagcctggggaacagagtgagaccctgtctctggaaaaaaaaaaaaaaaagcaaacaagaccccagccctgccctttattaaccttgtgaacttggatatgttatgtgaccatgcaaagcctcagtgtccttgtctatacacttgggatcttagcagtggctactgtgaggttgggaggtttctgggagctaccagcatagtgaatgcaacacgttggatgcccagaacgtgctggcattataatggcggggaggcaaggacagctttctgtgctttgagtggctgggtggatggagatgacgccatctctgagggagaacacaggaaggaacactttggggacagccacctccttgaggtccccacgtcagcgctagccatgcccactgtagtcatggatctactcatggctctggtggcatcttcaatctctgtcttcttggtgcccagctcagagcttaggcatatagtaggggctgtcttacagggggaggatctggctcgcaggtacagatgtgggcactgcagacacggaggtgcagaaagatgcaggtaaagaaggaagagaatgccaggcatggtggcccaggcctgtaatctcagcactttgggaggctgaggcaggaggatcgcttgaccctaggagttcaaaaccagcctggacaacatagtgagaccctgtctctacaaaaaataaaattagccaggtgtggtggcgcgtgcctgtagtcccagctactcaggaggctgaggtgggaggatcacttgagcctgggacgttgaggctgcagtgagccgagattgcaccactgtactctagcctgggcaacagaatgagaccctaactcaaaaaaaaaaaaaaagagagaatggacggagcccagggaaccctgaggttgaagggctgtgggaaaaaaggtaaggacctggaaagaggctgggagacaacactcacagatcaggttggggggtaggtgggcggagcaccacagacaggagggtttcaggaagaggggctcatcagggtcacatgctgctgagaggtcagggatggtaaggcccgactggcggtgtgggatgagggtttatcagacacagatttggcaccaaggaggtcactgggtacctggcaagagaatgccgggtgcggtggcccaggcatggaatcccagcactttgggaggctgaggcaggaggatcgattgagagtcaagacctgtcccattggggaccggcgccccattgcagggggtgggaggagctggtgtggtgtaaggatggggagaggagaggtgggcatcagaacaggaggtcactcagaccctcaggggcacctgatttcccctcccactaaggacaaatttcatgttcaacagtcagagccatctgcagatgggccaagaggtcctgggaggtagtgagcaccctgtccctggaggcagacaagcagagctccgagacccaccgcggcgggagaggcccaggctgtgcaacacaagccccgtgtccttctcagcaagcacctggctggttccctgcatcgtaaaaaccacacagagggtcggtctttctatttatagtgtccaaagagcctcctgcaagaacacacatgggctcgcacccagaggtggtcggcgcgcagcctcacgcagacaccagacacaaaacacagccgcgatctgtgtctcctggaaagggatccacatcctggctcccaggttattccctgaattcattccgtcaccccctctttccgccgggccaccccaccccccgggccaccctagcatctccgcttggctctccgcatctctccctgctcctcgggctctgcccacccccacccgcctccaggcctctcccgccccctcctcgggtgtcccccaagcccgtgactacaacccccaggcgcccccggcccgggtgctgcgcatgccccctgctccttgcgcgctcccgctccccccgccctcgcttcctcctcacctccctccgcccccctcccccgcgctcggctcccgcatccctccatcctaccctgtgccgcagccgcatcgccaccgcagcccggcagagccgagcccggcccaggcccctgcccctgcccggccctcggccagtcgcccccggccccgcccccgcccgcaggccccccgcagcggccgcggcgccccccggcgcccccagaccccggcctccggcacagaggcgggagacccggagcagcagcagaggcaggaggactaggaggaggaggaggagccgtcgcaggatgaaggatcggactcaagagctgcggagtgtgagcttgggggtggggagaatgggggggcgggaccccaatattgggggagcgcgtggggatggagtgggggaggtgctgggacgtgggggcgaaggatgagatcggaggttggtagccggagcaccccagtatcttcaggcgcctgatgtctctccagtgaacctgcattttggggacagtgcctggaaggggttggaggccatgaagacacaagggggcaggagaggtctcaggggcctcgaacaccccgcattcccaggagggccccggggtctggtctggggatgggagagagtggatatcaggagaaaccggaggagactgtcatcccctgggcaggtttgccaaagagaagcatgggggcggtgactgggccaggctgagagtctagcaggacccagattcaggggatgctacggggaaggacacaggttgggactgagatgccagcacctggcagtgaatgaagtgtgtgtgtgtgtgcacacgcgtgtgtcactccctatagggagggggcatctctccgagacagggagggaagaggtggcctccggagagagccagagggccagggcctgagacagggtgacccagaggtgggagatggggatgcagaggagagggccatggaacacgggccgtgctctgcttgggggaactggggcaccccgggcagtcaagggctgatgcaggccccaggtctgcaggcctgaagaggcccggctccaagagtctggccaggcagtccctggttttggggggacaggggaaggactgcagtggaggctgctacctggaggaactggggagtggggttcgatgagaatggtttcaggggcagggaggacgctggggtatttggagaaatgacctggggcccgaggaggcagcactgacagtccgcactgtgctgggctggtggtgttatgttaataagggtaccggccccggctgagctgcccaatgc

SEQ ID NO: 6905 - DNA, 6000 bp, Homo sapiens
tcctccacacatttgtagaaatgagattaccacaaattgccaagatggttacatcaaattttcagcagcatcagtcataggacaaaaaggcctttgagtgtatttttaataatcagcatttactggtggcaaaatactggtttagaaaatatctgagattatggtcaggcacggtagctcacgctggtaatcccaacattttgggaggctgaggcaggtggatcacctgaagtcaggagttcaagaccagtctggccataatttcagatggtgagattatagtgaaaccccatctctactaaaaatgcaaaaattagctgggcgtgatggcacacatctacaattccagctactcaggaggctgaggctgcagtgagctgagatcgcaccactgcactctagcctgggcaacacagtgagactccatctaaaaaaaaatctgagattaataggttgccattttaggcgctctttatagaccagctggcctagtggtcctggttctgtaatatgtgaagtaaaggtctcgcaggggagcaccagtttcaaactctgtcctagtttgcagccttggctggagtgaccccagtcatgaggcaaactgagcacaagtgtgcaagtgtcatggattcagccagaacatcagtgttcccagcatcagacacagattcgggagaaatcaagtcacagtgtagagatgtattgtgatgtgtcactacactattatgaaatggaagaaaataaaattacaagcctcaacctttaaacatttagcaacttgggctgtatctcaatgtgtaatttatttgtctcacttcattttcacaaacattaaatcccttcatatcaagtgcctatgaggtttaattcattaaaggcatgcatactccagaatgtttattaaatacatttctatcatttctacaaaagaagccccaaaacttcaataaaatatggatcacagtacaggggaacagaaatcagaaatgtgctggtaaaagtttagagatgtggtatagcttcataaaaaatgtttaacaataaattaggacttaaagccccatttctaactggcttttacgaataggggatttgttatttcacataactgaaaagtcttaagagttcagctctttctcaattccggcacatcttgactcagggattcacataatattaacaaggctagatctcccatttttcaggtctgctctgaaaatggcttcaatattggcttcaattgaaggccccagcctgaggctccagcagctccaagtccagttgaagtataattgtgtttcaacagtccaagagacaggcctgaaaattggaactcatggacttgtgcccctccctacaacaatcatcccagcctgggcaacacagtgagacccatctctacaaaaaattaaaaaattagctgagcacagtggtttgtgcctataatcccagctacttggtaggctgacataggaggaatgcttgagcccaggagttcgaggctgcagtgagctatgaacacaccactgcactccagcctgggtgacagagccagactctgtctcaaaacaaaatacaaaaaacaatcactacggccaggtggggtggctcacgcctgtaatcccagcactttgggaggccgaggcaggcagatcacttaaggccagaagttcgagaccagcctggccaacatggtgaaaccccatctctactaaaaatacaaaaaagtagccaagcatggtggtgtgcacctgtaatcccagctactcaggaggctgaggctgaataatcacttgaacatgggagacaggggttgcagtgtgccaagactgcaccactgcactccagcttgggggacagagtgagactctgtctcaaaaaaaaaaaatcactatgacctggagaatagaatgctctgattgggtaggcctggatcatgtggcccttcttggagctagaggagggagtcaaccccacttgaacttgaactgagaataaggggggcaggggtgtgtgtgtcagtatcagaaaagaaggcatagatatattggtcatatgacacaaaacagtagacatccactatcacatagccactggcccctcccaagtgcagagggagctcagagccccatttatttagagtctatgtccctgttgccactggaccccaccccaatgctgtctgagctccatctctctgtacctgttcgttctagctaacccatgtcctgtatcacagttgtttttccaggactattctaatttcaaatacgctgtccctagggcccccataaacatttatacttagtagatcacatgtaatcgatctttgctttagaaaatgtggtcatggtatgcagcatcccaggaagagggcacaagagaaactgaccctgagtcatgcctccacctccttcaccaccaacagctgagatactctgaacagaggctgagatgctgccctccggggtttatttagcacctggtgagtttgttcttccctctgcctaaagtggaggaaaaattaaacctctagaaactgaaagtgttggcagcagccaggttaagaactgtgtgagtgagaacttacagaaacaatggtgagtgcacagcctggaagagacagctctgcacaccctctagagaggcaggtaagatggtgacaagcccagaaaagcacagaccacctgagcggaggtctctgggtacctgggcaagtgcacctcgtgatggtgacagcagcccaggacagaagtggccctcctcagggcgttcttgacatcccagcaagaaaacctctccacaggagctcccaagctgagaacaaagggatgggaattcccagggaattgtttggcagcaaccagaaaaactctgaggggccttttaggggagaaaagaaacctagaaccttttcttccttttttccttctttttttttttcttgagagagtcttactctgtcacccaggctgaagtgcagtggcacaatcttggctcactacaacctccacctcctgggatcaagcgattctcctgcctcagcctcccgagtagctgggattacaggcacgggccaccacacccagctaatttttgcatttttagtagagatggggtttcaccatgttggccaggcaggactcaaactcttgacctcaagtgatccgccctcctcattctcccaaaagtgctgggattacaagcgtgggccactatgccaggcctctagaactttgtcaagtaaaaatacctgtcttcatgtctgttttctccaggagccattatcttatatacgtagggagggggctatgtgtagagggagatgccaggtatctttaactggaatagggccccatcttctctgcaacaatgccaaagtccagctgggaaaaaaactgtaggaagaattctattatagctcagtgagagctcaggaataatttttgtaacactgtataacatttgactgctcaaggaggttattttttttaaaaatagcagcagcttaaagttggatggaacatactgttcagtttattaccaatgagaaacaggtatagagccccttcttgaaaatatatcttcctcgttttttttatatattaaattcagattatatgtctatataattcattcttcttttgtatattaagttcatattagtacatcagcccttgatcaaagctagaagcttcctattggattgtaattctgaaaaggcattgttgtagggttaaccaaagtaacaaggttcaagcattcattacatacatatttttagaacacctccttcatgccaaggtccctgcccgttgctgaggacagaacaggcagatgtcatccctgcctggtcttgtggctttcttgtgacctgctttgatagagggttcacaccagccctgtctaggcttgctttctccaagtagtcatatttttcagattgaaataatgcactttgcagtagacacctgtcaggcttgtggctgcctggaaccttttgaatactcatcctagacctggagattttccctacaattcctgcctccctaaggcagaatccagagctcagtttcccatcccctcctgcagctgggggacctaggggttgccagttggtgcaatcacataattctttcagaaaagagcgacccaggatacaggtttcatgaagaatctgttttcaagaggggatgagggtggaaaattctggttttccagggcagccttaatgaagcttttggcatccagggtccagcagtgtgagctgtgggggtgtcactgcagctggccaacggaatgacttgtttatgactgtgcagactgtaggcatctctggctatatcagacatagtaagctacctaagattctcaattacttatcttctaaaactagtaagagtgagttctgttctttgcaaagaactgtgactaatacatatactgaactactgttacctgccaaaatccaggttgacacattcctaccttacataaacttcataaaaatgatgtaagggccgtgtagtggctcatgcctgtaatcccagcactgtgggaggctgaggcgggaggatcacgtgagctcaagagttccacaccagcctggacaatatagtgagatccccgtctccagtatttaaaaaatcttttaaggtacgaattattatacattttacagctgaaaacactgagactcaaaaagacacttaattcattctacaaatatttattaaagcccaactgtgtgccagccaccaggcatagaatagggaacaaaatagtttccctgcaactatataaaaagaatggcatattgtacttaaatgcctccttgccaaaataagaggcacaggacaacagctgtctggagatgacctcaagccagtcaggccccattttaaatatagaaacccctaagaatagccgccagtgctccagactcaacaggtgattggcccagagaggggaggtgaccccaggccccaggaaagggagcgaggacagcgctggttcccggctccccgcaccatcatggctttgcctctgaggcccctgacccggggcttggccagcgctgccaaaggaggccacggaggagcaggaggtgagtggggaacgggcggatccgggggctcccctaccctgcccacctgttcacaggcccgccgccccaggaccgccgcgctcaccccgctccgtccgcagctcgtacctggcgtctgctgaccttcgtgctggcgctgcccagcgtggccctctgcaccttcaactcctatctccactcgggccaccgcccgcgccccgagttccgtccctaccaacacctccgcatccgcaccaaggtacgcgggacgggcgcgcgggcggcacgggggtgctgcgggggcgggggggggtgctgcgggggcgggggggggtgctgcggggggggggtcgcgcggggcgcggactccggactcacggcgctcacgcgcgctccctcccccgctctctccacagccctacccctggggggacggcaaccacactctgttccacaatagccacgtgaaccctctgcccacgggctacgaacacccctgaggccccggacgcccccggacacaataaaggtgtgaagcttcgagtctgcggctctgtggggagggcggggccacggggagcgcgcccagaggcgcccgctccgcgcatgcgcccagcttggtaagcgctcctgctccgcgcatgcgcctagcgcggtgggcgctccacgtgcttttcccacgccgctgatacggaggtgctcgagggagcctcctccactcacaggtaggcgatcccagctccctgtctctcacctggtaataatgaggcctccctctcacacacacctattaataattagggctctaggctgtaatgggcttccgcgtacaccgaatcctcacagtaacgctgggagcagggtataaatttagttcaccttctcccgaggaagacctgagattcttgggaatt

SEQ ID NO: 6906 - DNA, 6000 bp, Homo sapiens
taagcaaacatatctcttttcaacatgggattttggttttaaagaaaaaaaaaagataccatatatgttagtaactttattctaagaaatacacagtcatatgtcacttaatgacagacatacattctaagaaatgcatcattgtgcaaacttcatagagtgtccttacacaaacctagatggtgtagcctattacacacctaggctctacagtttatcgtattattcctatgctacaaacctgtacagcaagtgactgtactgaatagtgtaggcaattacttcctacacacaatggtaagtatttgtatatctaatgatatctaaacatagaaaaggcacagtaaaaatatggtattataagcttatacagttgtgtatgtggtccatcatccaccaaaaggtcattatgcagcacatgactaaaattagggcatttcttagtttttcacaatcaaaggaaagtaactaatgaccagaaattttcttgacaatttgaaattttcctggtaaagatgaaatattttatattaataggaagcaatatttcttaaaagcgttctttaaaattatgctaaccagaaatttagaagtttaggggacagtgttactgaaagaattctttgaccccctgacagctcttcttcaatatcaataacacaggaatgattgtggctcttgcattttatgggctgaattgtgtttcccgcaaattcacatgtcgaagccctatccctctatataactttttggagacagggcctttaaggaaatagttaaggttaaatgaggtcagaagggttggaccctaatccaataggactggtgtccttattagaagaggaagagaccaggggtgcacacagaaagagtaaaaggccgctgaagacacagtgagaaggtaacggtccgcaagccaggagagaggcctcagcagaaaccagcctccagaactgtgagaaaatacatttctacactataagccacccagtctatagctacactgtaattctgccatggcagcctgagcagactaacagaatgcactttttaaaaattacaattttcctctcttccttccctaaaaaaaaccctacagttgtgtaataaacactgaaatcttcatatactgagaacccacctgattgtttttcactaaatgtcaccattgctgtagccatatttgcaccctgtaaagatccatattatattttactacaaatagtttctgcacataaaagtttggttctttttaaattcctctaccttccttagttataatctctgtattagctggttcagcctgccacaacaaaataccatagactgggtagctgaaacaacagacatacttcctcacagttctggaggctaaagtctcagatcaaggcaggagccaattcagtttctgatgaggatgctcttcctggcttgcagatgactgccttcttgctgtgtcctcacatggcctttcctggtgcctgtgcatgaagagacagcaggctctctgatatctcttcccatcaggacactatttctttcagatcagggacccacccatacggcctcatttaaccttaattacttccctcaaggccctcctcttcaaatacagccacactgtacgttagggcttcaacatatgaactaggaggggacacagacagtaagtaacaatctccaaacgcaacaacctgctttcctcggctgtcatgtaataaaatgttaacactcccaaacaatagcaaaacagagacacaacaaaaatctgttaagtgtataaatattgacaataaaatgcttccttttaaaaaatggttcattcagccgggcgtggtggctcacacctgtaatcccagcactttgggaggccgaggcaggcagattacctgaggtcgggagttcgagatcagcctgaccaacatggtgaaaccccgtttctactaaaaatacaaaaaaaaaaaattagccgggcataatggcaggcgcctgtaatcccagctacaagggaggctgaggcaggagaatcgcttgaacctgggaggcggaggttgcagtgagccattgcactccagcctgggtgacagagtgagactccgtctcaaaaaaaaaaacaaggttcattctagtaacaagtaaatgccatgcaataccattcaagtactacatgggacttggtcagagaaaacccagttcaaactataggaatgattgtgaggagttggagagcctgaatggatgcctgggagactggcaggatgcaaggaaagccgagccctcagtcacctggaaactgccaggtaatctgggaacagactgggtgctactgggtgatcttccaggaaaataataattcaaatacagaacccaagtgagagatatgaaaacgcttcccttttgatttggctaacatatggccacacagtagtctcagctatgatctgtgctttcctacattcctcgaaaaatcgactgcagacgattccaccagcacatctaaaaaagataggtgtcttaaaagggagccacaaaatgaacattcccaattggaatctactcccaagccaacattctagaggaaaaaagattttttaggtttaatcaaaataatacaagtaagagcttctaaagtaaacgtagaagtattacagatctacttttggaattcttgtggttgctctaatctctccccttttattacaacctcaactgccagatgaaatcttcccagaactccattactgcactattaaaagtaatcatttacctaactagcatttgagcacctatctccataatcaaagcccaccatgtccaacctctttataccaaacacaacacttgccccacgttccaggctcatcctgctccctgcctgctgagctcttcttctgcctcctctcctctcgccaccccaagcatttccatggtttgtgtgtcacctccttcaggaagtcttctctgatgacatgacacgcagatttttccttcagtcaacaacttcacattaagaaactattatgttaatttgagagccccttcctctcaaatttttttggttcactgttgtctgtaacctatacttaatattgtcttcttactctcctattctactaatatgctacatcattattattatttgagacggagtctcgctgttgcccaagctggagtgcagttcaagcgattctcctgcctcagcctccctagtagctgggactacaggcgcgtgccaccacgcccagctaatttttgtatttttagtagagatggggtttcaccatgtcggccaggctggtcttaaacctctgacctcgggtgacccgcctgcctcagcctcccaaagttctgggattacatgcgtgagccaccttttcatatccgtgggaaaaagttcttaaatgttttatttcctaattggttctcgtgtgcgatcttaactgtagtaggtggttacctttaggaacccaaacttacccatcttttatgcccccattcacagcacatggcaaagggtgaaacacctcgatattaattggtgttaagtatgtttttcctttgtaaatctcatgaattatttatgcttttgtacctttcttgaaggaatacaaagtgagagagaagagcttaacacctgaaaaatgtttcagttgcctgacattgtctttagctacaattggttagacaaacgtttacagagttcctactacacgcagagacaggcataaatattctattatggtaaggccttgatcacggttgttatctccagcaccaatcattgtcttctgcacataattaacacccaatacgtatgtgtggagtgaaaaaaatgaatgcagtcggcctgcctgcaagcagctgatattttaatggtgtgagggtgagggagatataaaggatgaacaaataaataaatgaggaaggtcatatcagtgtgataaccgctgtggagaaaataaagcaggatcatgaataccaccaacagccaggcagttgttggcagacctggagactcccatcagctggcgaagctgcccagcgtagtggttagctgctaggagggcagccccgggggaggtgcacagccctgccgctcattcgctacgcggctctggacgaagggcttcacctctctggcctcgactttccaatcccctaaaacctacttcatgagggggagtctgaggagttggtactaaagtgcctgtcaacctggcgggcgctagggaaacgccggcagcgccgcgggtcgggaactcaccggcgcgaagggcacggagagcctcgggctccctctgccgatgtccgcgcttccctgcccagggtcgagcaaggctgagctgggcaaagttttgaccttgaatggaggtctgggggactagggaccggcgcccctctctgtctgctagggctggcggagacccggcaggccggcgagggtgcggggccgaggtgggcggcgcttcccgggcgcctccgtcagacgggaggcatcgagggctcggccagctgccccgggcgccctgcgcggcggctgggcacgggccggtcactgccccggcgccggcctctcggacgaggccgccgcgcagccacggcgagaggcaccctcactacccccgcgcccagccggctcccagccctaacggcagccggcggggagcgacgccgtcccacggcgcgaggccgcggcgggcgcgcgaggcgcggcgcggggcggggcggggcgggcacatgcgcacaggcggcgcagccggcacgcggcgctcgcgctccctccttaaatgagcctgggcgccccgcgcccgccacttcagtggatcccgcgccggggccgcgggcggagctgcctgccggtcccgcgccgcgcgtccgcactcctcggccctcgggcggtcgatgggacggggcgccgcggagcaggaggcggcgcccgtcggggtgctcgggccgcgcgggagcccactgtggggctcgggcatggcgggccgcaggacctgagctctcctcaggggagcggggaggcagctgctggccggcgatggggacggagtggggccgtcgccgccgcgccgagccgtgagcgccgagccaccgccgccgctacctcagcccttcgcgaagcgccgggcagctcgggaacatggccctggagcggctctgctcggtcctcaaaggtaaggaccggggctggggccacggacggcgccccctgcgggccgaggctggcgcgccgccctgcccgcgcctctgcgtcccttacccgcgcccgggacccgacgcgcctctttgtctggcggggctcgcggctactcggagcggaccgcggggcgcgagccctgcccggctccgccggctctccgggcgcgccgcttccgacccctgcgagtccggccgacgttcgcggggcgcgtgtgggaagagggatcgggtcgggaaggcggccaggaggcccctgggcccagcagggccctccgggctgcgccctcgcgccgcttccgtagaattccgcgcatccctttgcaaagttgtgagattcctgtcgtggagcggaggccgctctttctccagatgtgatggcaaaaagtaattccacgagaacaataaaagccgcggccgtgacgtcgtgcagtggttttcgaatagccccgcggcgcctgcacctcgcggcggggaacggggcctgctgggccagccgggtcccacctgctgcggccacggaggctgcggcaccactgcgggctccgggggcggcgcgcgggcgccgcggacccggcttgtcccggcccccggggagcgctgctgctcgggtgcttcccgggacgcggcgctcctcgcgctccgccagaggtctcagaattccccgccgctggtgttcggttcttactaatttgttgtactgggaattaaaacagttggcttgtccagagcacagagctctaaaacctactccaccggctttgcatttcccaggaggtggtaatttagatgaaaatt

SEQ ID NO: 6907 - DNA, 6000 bp, Homo sapiens
gtacccagtaatgggattgctgggtcaaatggtatttctgcctctagatctttgaggaattgccagactgtcttccgcaatggtcaaactaatttacactctcaccaacagtgtaaaagtattcctttttctctgcaacctcgccagcatctattgtttcttgactttttaataattgccattctgactggtgtaagatggcatctcactgtggttttgatttgcatttctctaatgatcagtgatgttgagctttttttcatgtttgttggccacatgaatatcttcttttgagaagtgtctgttcatgtcctttgcccactgtttaatggggttgtttgtttttaaatttgtttgtaaatttgtttaagttccttctagactctggatattagacctttgtcagattgcaaaatttttcttccattctgtaggttgtctgttcactctgctggtagtttcttttgctgtgcagaagctctttagcttaattagatcccatttgtcaatttttgtttttgttgcaattgcttttgttgttttcatcatgaaatcttgccggtgcctatatcctgaatggtattacctagatttttttttttttttttttttttttgtgacacagtctcgctctgttgcctaggctagagtgcagtggcacgatctcagctcactgcaagctccgcctcctgggttcacgccattctcctgcctcagcctcccgagtagctgggactacaggcatctgccaccacacctggctaattttttgtatttttggtagagacggggtttcactgtgttagccaggatggtcttgatctcctgacctcgtgatccgcccgcctcagcctcccaaagtcctgggattacaggcgtgagccacctcgcccagcccttctagagtttttatagttttgggttttacatttaatccatcttgagttaatttttgtataaggtgtaaggaaggggtccagtttcaattttctgcatatggctaaccagttctcccagcactatttattaaattgggaatcctttccccattgcttgtttttgtcaagtttgttgaagatcaggtggttgtaggtgtaattttacatttattatttagaattctactataagaaagagctgttccatctcccccatttatttacttactcaattactttttaatgttagtatggtcttacagatatttagtttttatggtttttttttttttttttttttttttagacagagtctcctctgtcgcccaggctggagtgtagtggcgagatctcggctcactgcaagctctgcctcccaggttcatgccattcttctgcctcagcctcccaagtagctgggactacaggttcccaccaccaagcctggctaattttttgtatttttagtagagacggggtttcaccgtgttagccaggatggtctcgatctcctgaccttgtgatccacctgccttggcctcccaaagtgctgggattacaggcgtgagccaccgcgcccggcctagtttttatggattctaatccgataatattatcttttttttgtttttttttgcttgaattgttttggatttgaccatttctgcatgttgagatttgacttgggtttggccttaggttgcaggtggaacattttctccaatgtgaagtccagcagtgctttcagaattccagaaggagttgaaagtccattcatatcaagagttatttgttaagcgacttctcagtgccaggccctgagctaattgcagaagggtagacaggtcccaaaacaaggtcctactctcaagcatctctcagccaggggaacagacccatagacatctgagtatgaggtagggcagacagaactgtgtgtttatatgtgtgcaacagataagggaaagagaaatcaggttactaggtgctgtgggagagacacaaatatagaaacttagaagctcctgcctaaagctctttgtctgacaggatcccaccttctttcattcattcactgaacatcattttcacattgcttaatattcatttcaataaccattcactaaaaatattttttgaacacctatgatgtgctggacactattctaggtaatggggaatacatcagggaatcagacagacaagatttctgctttcatgaagctgacattctagtgggaaaaacaaacaataagcaaggaaagaaataaggaaaatatttctggatagtaataagccttttagatggtcagggaaggtctctgaaaagacgacatttgaactgagccctgcagtatgagaaagcataaatcaatgcaaagattagggggtgggggccaagggcactgttgtaggcagaaaaagcagcacttgcaaagaccctgtggctagaatgaatttagggtgtttgaggaacctgttcctggaatgtctgagcttgggacctagtgatttcagttgcaataaggtgggcagagtcagattatagagggctctgtaggctctggtaaggagtttgggtcttactctaaacctgacggaagccatgggagagatcaagttgaggaataacattatctagcttatattttcaaaagttaattttgactgctatgtggagaatggaacgtaaggatttaagatcaaaagcagggaggccagtcaggaggtggttgcagttgtccaggcaagaagtgatgacttagactaggagcagttgctgtcaagctatgtttgattgtagcttcaagagaatatgctgatggattggacatgaagatttaaggaaaaacagttgagaaggattatcctaggttggggcctaagccaccagggcctggagagaggttgagccagtagctgaagatcctggctataatgagggtctcattcacttctctggatatgtacaatgtgccctaccttgtgacagattctgagggtggtacagagataaaacatatgtggcccagattcccaagcgcttaccttttcatcaagggtctctccaagggtaagaggggaggggctgcattcattcaggcttccagagttttaacaaagaacttctaaaaccagcttacaaactttatggtatatttttaaaacactaatgtttaataattttaacccacttatgccggaggttgcaatttttttggatttttgcaatcagacctcggtgatgaccttgagcagtaggatataaataactttcacatgcttagcattcccataatggaacactaggcatcaatggcctaatacatacatgtgccccaacaaccacaataaacaatactatataaatgttctgttcacataataatggctggatttagtttttaaaacacaaattaatgctgctctatagaagatgtggtgtggtgtgggaataggcccaagtttaacctgcctgcttgatgaaaaccctctttcaatcctgtcactgtatctctgtgatgggatgtgtcagcctactttggagaacaccaagaatttaaatgtgaagtctttcgtgactgtgtggctttcctagctccttttttgacagactctgcatgtacttcattcattgatccattgaatatttgttatgcatatactatgtgctgggcactcttctagacccaaggacacatctgtgaacatgacagacaaggtccctggtttcaaagagcttacattcaatgaggtatgcagaaaacaaataagccaacaaggaaagaaatggcaatttcagaatgtgatgagtaaaggaagtagattaggaaaatatgcagaaggtggtatggagagaggggatctgggaaggttactctgaggaggtggcatttgagtagagtcctgaatgtcaagaatgaaccagctctgcaaggaggtgggaggagaatattcttgtcagatattaggactaatgcaaagatcaaggtgagaggatcatcctagcttctgaaattgaggagaaggccaggtactgagatgtggggattcttcaggcaacaagatgccctcctgaagctactgaaactaacagaaggaaataaacctaagagcagagaaagttaaatagcacagggcgaggtacaggaggagtaagatctaatcacttaaacttctttagggcccagctggcaggtgcttctggctccttgccctggacacttccttaaccactgatgtaccttctgatcttggacactagaccctgctgcataagaacatggaaataaatcagctcctccagaaagcccatgatacaggttaccccgctccagtggctcccctcctgttcacagtctgtttcaccatacgcaaacaacccacgtccaaaccaaatttgtcatcctgacctttgcctctggggattgggaaaacacagggctggaagcatctgctgtttcctctctattttattcccagtcatgtcctggtttccatcctgactacaatgatggtcttacaccaattagagtgaataaactccagctccattttcttccggaaagagaattgggagtccagggaatgcttccgggactgccaaggaaggttctggagggaattcccctggtcagtccaggaagtggagatgggccccatggaactggaaggaggcccaagctaatgtgtggctgagctcgagctcgtttgcttgggatgagcgactgatgttctgcaaacataactattacaatgtttgcattttcttaattttcgttgggtttcattttccatgtcgttagtttcctggatgaatcttgaataggaaagagtcacactatgtgctgggcactcttctagatccaaagacacatttgtgaacaggacagacaaggtccctggtttcaaagagcttacattctaatgaggtatgcagaaaacaaataagccaacaaggaaagaaatggtaatttcagaatgtgatgagtaaccctcattgcatctctttgcatctctttgcatctctagttgtgaaaccttcgttacctctctttgcaggtgtatttgaataaaccaggttggcaaatcatactatagctgaaaggtgagagaaaatctaatttctttacttggtctttataaatctggtcttcctcatgatcccccacttgctggttaatgagggaaaaataaatgttttggcttaccattttaagaccttgtttgagccaataatttaagtcattttatcaaataattctcactaaaggctctgtctaggagttgtcacctggcagagaaagaatcaggaacctgggcacagtgacctctgctcctaggctttcccaggggaggtcttttgtctacttgctcactgcctgtcctgctgtctttgcaagccagctggatcttggcttgcacagtaatccttttttggctcactcacctggggatgttctctgagttgctaggcctcccctgtcccacttctgttggcagcataaccccctccaagatctctccatgactctcagctgtttgcaacctgggttgtccactatgacacttctgggaagcccttcacccagacttttagcaacttcttgttcccatctataccacagggaagccaagaaagctaaccaccaggcacagccagccacagcccatagagcacttagaagtgaattggaaaatgatgtgcccggcaagacgaggatttaggaaaaggcagcactctcgcaagatggatgccacagtggtcggctagtacctgttcatactgcctcatgacaatcatcggtcaaattttcatgaactttgagagcatagctgctaaacacaaacattaataaaaaaaaaattatataaacttacaattaaataaattacatcaaaaacaaagataatactcaaaatgtatcatttcctacttattttgctaccttttgctgttatttatacttctgaggttacttacatctattatatctctatggtagaaacagtatatgatgatgccgtgctgcgcatctcttcccagctctgcattcagtgg

SEQ ID NO: 6908 - DNA, 6000 bp, Homo sapiens
agagtgaagtttgttttttcgccatgtgatgaagaccactgtgattttttaaaaaagtagataatacttaaaatggcgtaataattctgcacttgaatttgtactgttaacagcacatttggaagattttaaaactttttattgtcttataaatagcattcacttattattttggatatttaagggttccattaagttaacactgtatttggacaaagtgtgaccaaattagccagtctgttttcttccatgtttaattagaagtgagaggtagaagtacttcaaattcaacaggccagcaagcaatcggcttaaaattccctttcttaaatgttgtgctcttatgttctcggctttttaatgactttatttttacagtacttgttcagtcacttgagatgaaatgcttggggtagcttttccatcctcaaacttaatgtttttactagttcatagtgtttggaacagtatatgccaatcactgagactgcatcagagtttgcaattttgtatgtttcattgccaaagaaggcttagtggttgttgactgtagtataagtcagctttctgtagcataagatttgattttcccatacttacttcacttgttatacatcactgattatttgggttaaactggactcatttcaagcagtttgcttttgttcaaatcgtgatgagaaacctaatactgtaatttgatttgagccataaaacacattttaatattagcttgtattatagttattaagcttgtttttgtggaaaaaaacttactaaaacctaggtaactctagattaggccagttcaggtgtattttgtatcttagtaatggatcatatcgtaaaaatagagataagttgggaagatatattgattatgctgttctgttgagggaaaggtcatgtatttagaaatttaaacttttggttattgtgttcacatcatagtattcaagcatcatttatagtttggttttgagaacttttctggtattacgtttatggcaaatgtataaaagaaacaagttttggttatatttttatatttgtaaagtaagtttggttaaagtgatcactgttctttttttattttattgtcatttcaataaaaaatatttgaaagagaatgactctgtgattgttttgggatagtagtcctgtatgtgtggctgctgatcctactgtgctagtagaaatcttgcatggttcgtcactgtgagtggccgagggcctttaggtaagagacagcttagcataatagcaagggcctgatggcctgggtcactgatgttgccctctccttgtgccccacacactccctcctcccattgtgtgttagcagtgtttcagtttcctgaggtgtgaaagggtcactagatttggaacatgaaggccacaagttagaagttgctacacagttgtgttaactgtgtgtagtccatatcattggggactgagtccgagtttcctcatctgtaaagggagggttgactcctttagttttttttctcaaacttgcctggaattcataatgttctatgacacacaccatacctgctgcatatgtaatactgtgtaattcaatgttatcttaaatagaaagtttacccaaaatacgggaatatatgtgtgtctgataaaactatagccttttcagcctttatatctgaacagaagtgtgaatgaaacctgatagaaattgaaaggttttttctgaaaactttactacttgtgtattttatagcaggcaccaaagatctatgaaaaataaatatgaaagaaaagctacaaatggaaatatatccattagtttagtttttcctctaaaaacttgaagagttggttatttttctctctgctagatttagctgtggaacatgggtccagctgatgaaacactagcatgccatgggaatacatttaaagctactggattagatagtgaagttcagcttctaggattctgagaatcttaagcaacaacaaagccacccaacccgtctcacatgatggtgaatgaggtcatgaatatgaaaggacttcagatattttaaaaatgaaaatagcattgtatctaggtatgaatcttactccacacaaactgatttgtctgaagtaattattttattccctttaaatcaaaccaagtcagaaccaccatcccacaaagacggcaggaaattaagtctatcagtcataatggaaatgaaggacctatttgaagtctcaaatctggaaggcatagtgttattctgaaatcaaggttgtggtgacgggggacctctagctttcatcatggactctattgattcttgtccaagcaggaccagcctctcaaagtctgatgctgtcatctgtctgccacacttggggcttgggacacagctgacaggtagcccgtatgttgatctagtctccccaggcacattaagcattcatcccttttgggtcctgcctccttcccagtcctctcatggagtaagatgcagttaccaagaactagaagtattggttaagaaggcttgtttggttattgccaaaatgtccttccttgagaacaacggtgtgcaaagtaccttcttggagtgtgtcttggagtgggaaaggaaaaagtaatggtagaaaaattactaattctagtaaaagatccaaacacaaacgatttacgttcttttgggttaacttcccccattcatgtgaagtttcagaaggttcaagcttctaaaagtttaataagggcagatctgttaacagcagcctgtttctaagggtgatgggacaaatttggtttgtgacagtttagaactactgtggctaggattgaataaagattgccagtcagtggtttaaaagttatggtggctcagatcttgacctgtaaagtagaacacttccctggaaaattacaatagtttttcaaaataaagctttcctttattttactgataaagtttaaagtttagcattttaattgcatggctgtgggaagagaaccaaagtgaattcaagtctagtattcatatagaccttgtattaaaaaaatgcacgtgtgcaaaggtaaggcctctccctgtcccggtaaagccaaacgttcatcaaagaccctttaacaagatgtttctaaaatttccaaagtggaattgtaagcttgagagatcttttgttttctagttaatagacttttagaatattaggcatgaaaaagaccttgaaagataatttggtccttttctttagaaagtttggaaaatcctacaaatatttacagagcacctactctgggctgagaactcttacaggccctggggatgcaaaaggaataaaactcccaaggtaacatttttttcctttggtaacagcttattgagatacaattcgcatattgagatagaactatttaaagtgtacaatgatttttcaattcagagttgggcaatcatcacctcaattttacattttcattactttgaaaacaaacctatcccagccagtgactcacgcctgtaatccctgcactttgtgaaggcaaggtgggaggatcacttgagctcaggagccacagactggtctggacaacatagcaagacgctgtctctaccaaaaattaaaaattagccaggtgtggtggcatacgcctgtaatcccagctactggagagactgaagcaggaagatttcttgagtccaggagatggaggatgcagtgagcatgccactgtactctagcctgggccacagaccctgtctcttaaaagaaacctgcaccctttatcaccccctactcccctcttcctcccatccctaagcaatcattaatcaactttctgtgtctgtatatgtacttgcctattgtggacatttcatatcaatggaatcacacaacacgtggacctttgtggctgtcttctttgacttagcacgtgtttaaggttcgttcctattgtagcatgtatcagtagttcatttttatggccgaatagtacattttatggatgtatcacatttatccactcatcgcttgacggacattagcgttgttcccatcttttgattgttagaatgtaatcaacatttgtgtacaagttttgtgtggaggtatgtttccacttttcttagaggagtggaattactgggtcaaatggtcactcttgtttgactttaaggaaaggacaggttattttccaagacagctgcaccatttgacattctcacttctggggtatgagggaacacatttttatttcccgctaaatcaggttcattttttagtttctgctggaggctactagcaaacagcagaaacttgaaagactgttaatattctttcttctggggtttcgggcaccagggaagctgcgcggcccctaggagtgctgggggtaacctcttcagagggttaatggggtggggggggggcaagtggccgacggcctggtggccagggtgccccgcgccctgaggccctgcccgcctgccagcgcctgcgagcccgagtgacccctgcgccgcggccggagcaggtgccctctgtgtctgcgggcccagccaagccgtggtgcggacggcggatgatgctgggtgcccgccccccggcctgaggcccggggctacgcccgctaggcggcggcgcgaccgctgggggcgggggacgaaggccgcgcccctgcgcccgtcccgccagcgtcccgctgggggcggcggcctgtcccgagcccgcccaggctcttccgcgccggcaggggcagcagcgggagcagcgcggggcggagcggcgccagcagccaggagcggcccggcccggcccggcgcggcggcggcggcggcagcggcagcggcagcgacgccagagcccgtgggcgccgttcgcgaggccgccgcagaggcccggccgcagcgcagggaagcctgggggccagaggtcgccgctgccgccatgccgctgctcttcctcgagcgcttcccctggcccagcctccgcacctacacgggcctcagcggcctggccctgctgggcaccatcatcagcgcctaccgcgcgctcagccagcccgaggccggccccggcgagccggaccagctaacggcctcgctgcagcctgagccgccggcgcccgcccggccgagcgccgggggaccccgggcccgcgatgtggcccagtacctgctctcagacagcctcttcgtgtgggtgagcgaggcggccgggcccgcggggcaggggcggggtccgctgcgtcaccctttatccgcgggggcgtggtgggcctaggggcccctccgccagggacccccgagggcgagcgcctggggggcgcggccttgctcgcgggagcgctgctgagggagagtggtgaggcgcggggagggggagggggccgcgggcgggaggaacatcgcgtggggttgcgaggaggaggccccgaggggcaggccagcgttgagggctccgggaagggggtcggggaggcggcgggtgatggtctgcgctggggcgcggacggggcctggggcaggggaaggggttaaggggcagtggggaggaacgggctgggttttctgagggaccctcgggagaaactagaagatctcagagggcaggttcaaggggaggtcgggatctgggagtgcgttatcccgagggttggacgaagtagagtgaagttgaaagcttttcccacttggtcaggcatgggattgttagcggattttcttccgacgaagaggagagggcagaggggagaattcagacgttgagtatgggggaattttcggcactcaggtgtctttggacattccggttggagagaggccgtctcccacaacttttttgccgcttagtattcgattgtcccctttgggagctgtgtaatgaaacaaacaccaaactgtgcttccttttctgctgcctttacctgatgttcatgacagttttcctttgatgtctgaacgcagcaaaacattcacagtgtcaagaggcagcccatcattttaactgaat

SEQ ID NO: 6909 - DNA, 6000 bp, Homo sapiens
tattatattttagtatgaaatacactctgttataccaaagtagtagtattttagggagtggggtaccttttttactcctctttcttctttttttattcttactcttttttcttctttcttctttttacttggaacacattgggaactatttttaattttttcctccttttttctcctaagttaaacaagagtggtctagaatcttaatctagttgctattctcctacagaagaaaaaaaaagatagagaaaaacccaaacactaatatgctaagtgtgtagtccacaaaacctggactggcttatttgatagctttgtatcagtcctcttaaatctatttactaccccacccgccgcccgtccgaccaagtttctgttcagaagctgaattgaagcttatctcttttctagtacctgggaagatggaagataatgccattttgaaaaccttctccaaaatgctctcagcacagatgtggttttcagaaagtgtttacacctccatttactgaaagtataatgacaaactcaagattagtaattatagtcaatattcagagatgcaggcctaatttcagggacagctaaaaccagcaagccaagaaatgtagagcatcacaactctgaatagcaagctcaatgatgattttatgtcaagaattcataactacttctaaagaaatcaatttagtttttcaaatcccatactaaacattagtgaggtactcagacgataaatttagtgtgcttacatttttattcttcttttcaaatcttgttttttaagatagtattttgtcttaaaacagaatattctgggacaaaaacagtaaatattaacacaatacactattttatttttttccttctcatctttatacatgtcacaagagaaagaaattgcctaaagcagtgttctcagatgttagcaggtaacagaatctcctagcacatttgttaaaacccagatttctgagccccactcagattcagggtcaaagaatttgcatttctaacaaatttccagaaaatattgaggcaggagctcgtccacggattgcaggttgaaaaccactcgtctaaaggaatctccagaattgctcacattggtttaatgagagcaccataataacttctcataatcttagtaagagaatggtttaaagcaaattcataaacaaaaaagctgtcctaaatttacttaaacatttacaaacttctcaaaacttcttcttttttattttattttttttttttttgagacggagtctcactttgttgcccaggctggagtggctcactgcaagttccgccttccaggttcacgccattctcctgcctcatcctcccgagtagctgggactacaggcgcccgccactacgcccggctaatttttgtatttttagtagagacggggtttcaccttgttagccaggatggtctcggtctcctgacctgtgatccgcccacctctgcctcccaaagtgctaggattacaggtgtgagccaccatgcccagccccaaaacttctctcttaatgttttaattcttatgacttacgcttcaatattggaatccaaaataaaatttaagtttcttaagcttaatgccagagttgttacatattacttacccttgccccataccccaaataaagggcatggtttcagatatcttcatcctaatgaaacacaggaaagggacccttcatttctggaaaaatattacatggtaatttgagttgtcatttttcatatgtcatattcttgagattttattttaaatgataatacctggcaccatagatatcacattacaagcaatccaataaatctaaaggttaccagtaatcataatatggtaaatacattttgtttttagtttgttttaatttttaattctatcttgatgaatgaaaacgacgaaagattgcattttaacgcagcaaataatagttatgttccattctgtcatctcctgctccaaccagagaagctggagacttcctaacactgtctccctcttcttgagctctgtttcctatgaaccatctgattccccactctgcaactagctgggcacttggtttactgtgtcccttggtcaaaattacgacaaacattccagccatagtgaaaaaataaaagtgtattttactacatggagtccctctccatctcattcactctctacagtagactcccctgcaaaactgcctgcctgtcaccgagacccaggctagagacatcctgcctcattctactttttgcattagtcagccaaggttattctgaatgcaatcttctctccctccccccaactccttctccaattatactcctgccctatcagataattcctcacccttcctcccccgcaatgctccacaacacatgcaatttcacttgccattctaaaaagcctatgtaccacagtcctcttcccgctggaaggctgtaaccctggagaggatgttgaaaagaaaacactttcttaagggggtaggctttcaccattgtgacattacactgcatcttattaagagtgggtggaattgttaaagagataaatgccttgtctttcagcatccctgattattttagaaatatccttatagggctttctaacattatcctaatcctctatcacactgcttaatcatccaaacctctcttaagaattagtcaggaaattcctattgtaacgctttgagcagatattagcaggtatagacaggttaccctgaattccagaggaccaaaattcagggaagacaatgtatataactgctgtaagagtaaatatggacaagatgagtcaaagcaaactcttcttaaccctagatacccaaagccattggattctggctctctttaaaagccattggattctgactatctttactatgtcagcatagtttgttaagaaaatgagatttgaggatattgtctaacaatctggcttttttttttttttttgagacaagtttgttacttgtgacaatccccagctttcagtagcacatgagtttttttgagttttcatagatgtaagaagttaccccaaggaacggttcaaattatttgttcaagtgaaaatgaatatctgaaattaagcacaacccaaaatgtgatctatttctttgtccacttgggactgtctggtctagcagcagttataatttgattgagccttgactgctgctcctttttccaagacagaattagccaattccaataccctgtaagcagacacagtctgagaagagaacaaacagttacttagtgactgcctgggggaaaaaaaataccacttggttctcttcacctctccctctctgaaataatccactaagtttcttgcctatgacagctagaacatgaaacaatcagatattagagctacagccaatactctttttcacatttcacaatgggttgtcagatgcagcacacaaaaaaatgtcaaatttgcataaatatcataagcatgttgtgcctattttctcattctgttcactctttctcattaatttgagtgagacagtacaagctctacagactgtgcgtcttgtcccctgcacctttttcccccttctgttcttgctctgtccccagatggtaaaatccaccctcaggctcacgtctagtgcacacagggaagggactaaatcgggatctcctgtggaggggagggtttttttttttaaggtaagaatttatttgtcttatatttatctaattttattagaagatgatgactgtggcatcgtctacatgttagccccagtgttgaaaaagaaaagaaatctggacctcctgattcatggtcccttttaccccagggtggccatttctcaagatctgagcgcagcccatcagaagacttgaagtgaccacagacagggcaggtcttggtggaggcaggagaaccgcaaggatggtatctgagaggatatgacaagatcagggcacattgagaagacctagaaattcctcccctatttcccaagcaagttctgctttgcctgccctcctccccacaaccaactactgcgcgcccctcctggctgccactctgctgtccctcatcccattttcccaaaggagcacggggacatcaggaatgcgctccatcacagaaccgcgacacacagcctctacatagcgtctgagttgcaggcaggggtctcacaatcaccctattctgtacgcaagaggcccttggaataaagaggaggtaagctgcccacgctcaaccctttgccctgtcgcgtcctcttcctcctacggaaaatagctgcgggtcactgagacgcttttcaacataacgccagccccagagctcaggtgagacctctagagagaaagctcgcaggtacctcatccgcatgctgttattatctgccagcccacttatccaggagctcggtcctcagcgggctgcgcgcaccgcgcggaagggcgcatcttcacctcgtggctctggcggcagagacgcgcggggcttgctcgggagcgaggagcgaaaagttgtgcgcccacttgggtagggggaaagagagcgatcgagccagcgcgggagagcgaagggggaaggcggggagggggcggggaggggggactgcttacatgaatttccaagtggtagacctgcctctgcgctctgcccaatgagatccgtcaggggaggcacccggctcacttttccacatcacttcacagttacatttggcaggcaggcgggctcgcacgccggagcgctcagcccagaattagtggatttatttggaatctccctgcctcctccaagctccgccgccgccgccggcttgtgcatagacggtagcgtcaagacaccagctgcactttgggttgcggacacccagagcccagcgcgcccgccctgcgtctccgcaccaagccctgtagctccgagaggcatgaacggaatccggaggcgcctgcctagcgagcgaggaccggtcggcgcttgccgccctcgggagctaaccccgagcacctccagccatttgtgaacctggaggcttgacattcgccagcgcagggccccacaagagtaagtgttcccctaacccacccccgttttcctctatgttccgactatccagaagggaccgtttcttataggaattcccatgccccttcggacaccttgcgcgcctcctgcccctcagatggtggatgagggttcttagcataggctctgggctaagctgtgtctttcgcgatatccgtgggtgataacgtacgtacgcctcaaggttttgcctgactgtttttgcaaactgctttgacaacagatcctagagagtagcaagctccaggctgtgcccctccagttttcctgccggtttccttccctgcggcgacttggctatttcgccgcttcccaacgcaggcaggcgcggctgcagccgcgcgccttcactgcggggtccgtgcggtgaatgggaagcacctgcagcccgctgtgcggagggtgcaagccagggaaaaaaggaggcgagggggcccgagtggtctatggctggttttctgcaccgcctcatctccgaggcgagggagggcgacccccgcggcagggctgcgggccaaggctcagctgcgaaagccccagcgcgaggctttcccacaagtggcagctccagctctgggaggtgcggtgcccgctacaaacttgccgggctccggagtcgccctgcggctctgccctcgccaagacgctgcccagcacccctgcaggacccccaggcagtgtctccccgcaactcgagattgcgtgcacggaggcccccttaagccggggactccgtagccgctctcctagggacagctgagcccagacctgcgctttctgtggtctggccgcttctcatccgggaacctttgaggggctggtcgcgcccctcgcaggatcggagggaaaaaggctcttgcctaggttctgccagtacgtaagaggttcataagggacc

SEQ ID NO: 6910 - DNA, 6000 bp, Homo sapiens
gaaaggagaattgcatctctgagatgttctgattttttcaaatcaatacatagaaattggacatatttatagggtacaatgtgatgtctcaatacatgaaatgatgagtagcacttaaaaagcccaggatttaaactctggaaaaaaccttcttcagagctcatttcaggtaagctcttatttgcagttagggaaactgaggctcagagaaaggaaatgactttcccaaggtgactcaatgaatttgtggcggatctaagatatgaactcagagcctcagcccccaagcctggcacatctcattctacctgacctcaatcaagccttatttagacaatttacagtgtcagaaattttgaactgccataatattcttggccagttttataaccagttctaagataagattaatctctataattattataattcacaattgtagcatgtctcttttcttgctcaggtcatttaaaatgtgataataatcaggcctcataattaataatagtaattaataactttcacttatgaagcctatgctccaagcttagtgcttttggctctaggtatgtgagcatgttgaatccccaccacaatctaggcacagatagtaatgcccattgtatagatttggaaagcatatctcaaggagataaagtctttagccaaagttatggcgctaaggagtggcagagccaggaatcagacagatcaaaggcctgtggtcctcccaccttgctctaaagatccagctgtgggaatatcttcctgaagtgtctgattcagaaatggtattcccattccatctttcttaacttcctcctctgcctggggaaggcgtggttggagcccactgcaatgtgatgaaactaacgccccgcttggatcttgcatcactctttacaccatttaccaaaggatgcctctagagcaggaagctttgagaagacctggggagcctggaacttctaagtctaaacaaggaactgactcagcagggtctggctatcttcagagtctgaggagaggcgcatcaaaggaatgacagcctggtacctttgatgaaggaactgacaggaaattaacagcctcgtgcaggcaaggacaaagacaagaaaaggcccatttgggcctcatatctctctggattggaacccgcaggaagcagaaggggctgtttaatcctggctccagagcaaccgtgaaggctggcttcctcccttgaagaagaacaaggtgaaggaaaggtgaggcaagttaagataaacacccaaacttctggctggctggctgaactgaatctttcgatttaagctgtcagtgggttcttttttttttttttttctattcttttacttttttaaatctaaactgtaatcacacaatactccacccaagtgcttgataaggatttctaagacagatcctaacacagtcataaaaaaatcccctctgaaatgtgcactttgtactgtgtctatgagtaggtgtgtttaaaatgtcacgaactggaatgcctaactctagttcccaggaattaatcacttagaagagtgaaaggggggaattaactttctttaaaacttataaggttctccaaagcagcagccaaaatagaacttgctgaatagaaatatggttatctttccataagaactaaaaatctttttttaacatatttttctctgaaactgctttgccaagtttcctcttgtggattagctgcaggtcacagatattctgggaataaagatatgaaaggatttttttttctttcttggttacaattcaatgattttagtaaatttatagatttgtgcaatcatcacaactatctagttttagagcattttgattgcccaacagaattccctcaagttctatttgcagtcaattcctgttcaaatcctcagccctgggcaaccacggctttatgtttctataagtttgcctttccagttcatataaatggccatttcatataaatgaaaatcatacaatatgttgtttttcatttggctttcagcatatgtttttgaagttcattcgtgatgtagcaaacatcagtatttcttccccttttattgctgaacaatattccatggtatggatacaccctgttttctttatctactcaccagctgatgggtatttatgttgtttcttttgtttatctgctcaccagttgatgggtatttgtgttgtttccagattttggctattataaataaggctgctatgaacattctggtgtgtgtttttgtgtgaacatgtttcctgttctcttgagtagaatcctaacttgctgggttgtgcaaagggttattgactgctgctatacactaggttccatctgattcaggtgtgtagtgtcagtggaaacttatcaagcagtttttaacttactttttaaaatcggctgatgcacccattactaaagggatggtctataaaaacaactgttgtgattcgataaatgctgaacagagaggagaggtcaaagtccagctaatgtcagctgacatgtggccaggttcatctttggacacgcttccaaaagggagtttatgaaacttgcttcatggatcaagagatgtcctaatcattacagatcccgggcatctttgtataatatatgtatgatcagattgatcgtgacttcacactccctctaggaccacgtggaagggttgagaaaatccaggcaatagtttgtagccaaacaagagcaaaactcgagtacctctgagggaaagccggaccccttgtccatcctctcctgtgtaagtaacttcatttataagctgaaatgacgccaccagatcatcctattaccatcaccatgcctcattagagtggggactttcggcggtggcttgggaagtacccaaagttttaggggttacagcagaggccaaaaaggcagacagaggaagcagggtagagctctgaaaaggttcagggccagggacccacagggggaggcaggagtggcaggcaccacgatctgctctctggcgctctacaggaaagcaccgggagtcaatgtcctcgcgcgtcccttgcgcagagtgtggtgcgaggttggggggttactggagacccagggggctatcaccttggacacctatggtggggggaaggctgaggagtaagataaccgggcagctggaaacttacagctcttcccccgcagtggaggaatgaggagttcaaaggccacgtccacacagagggtgacagaggcatcctctccgcgcaggacgcggactgggggcaggcacgcagcgccacccggatcctggagtcgtcaagaaaaacgcgggcgcgcaggccgaagagggtaggtcccggggcagcctcgccggcacccgcccccgcgggcgtctccccaagccgtgtggaaacccgggcggctgcgggcgctcgggacccgcgggctggtgaccaggagctggagggcagggctcggccgctcttgccttagccccgcactggggttccttccccatgcgctcaggatcccaagctttctcttccgttttcggcctctttttccgttaactcctgggcccgtctcctcccctctagccctttcaaactgcttggctgtggcgcccagctttccctccgcagcctccttccccgtctttttcgcgggtccatctcttctcctttcccagcctcatccccgtccccctaggcggttcctttttagccttcacccactggcgtctccaccttcctccgcctcctctcttgcctccacctcccaccctgcaaacttgttcaagccaggggtccccacacaggcatggttgttccctgctgggtgtgcggatccccacgccgttcccggtaccgcgagcgccccgcccagtccttggcgtgattcctaagccccggccctgccagccctttctcccggcgactcggggagggagggcaggaagcaggcccggggaaccctcacggtagcgagtcgtcagtgaggggaacagcggaggaaggagctaggactccggcgctgcgccccattaggccctttctcccgtagaaacgcacactccaccgggccctggcgggtctgtagcgagggagtggcaacaagtgacactaccggcgggggccactgatacctggctggggtaggggccaaggcaccctcccaaaagctggagcgaggccgaccccggcgaagcgctccccgcgcacccctctccgaggcgttgcgtggggggcactagacgagaggagagctgagagagaacggagactgggctcttcccaagtcctaagtctccctccccgcccgacttcaccaccagagccaccagaagagtttgcaagggatgggagattgagaggggtgggggctgggcaggagccgccaacgttgagggatttttggaaggtggggtggtggagtgagaaagaatagaacgcgctcccgaattcccaattgcttccctcacttggacgataccttcccccaaccaccatcccggcccgccaggcgagagcccagcctggccagctggagcggatttgggggaaggaggaaaatgggggctcccaacccctctccagcttccctccgccgccctccctgattggctgtgcgtccctggagcccaacttcagtcgctccagactccatctgagccctgagggagtcggagcgccgcgccacggggcgggaggggcggccacgaatccaggggttagcatctctgggcccctggggggaggggcgcggacggggtcggcccccgcagcctctgcgaggcccatctcgctgcctctcgcagcctcggcttctctcagcccccgccctttccttccctcacagcggcagcctccctcctcccgccccccccgccccgcacccgcctgcccgcccgccacctccccccggtttctcattcctgccactagcgcgctcggcggctcattccgcggccgccgccagctgaggggagcgtcgcgggccgaggagcagatgccgcgggggccgctcgcagccgccgctgacttgtgaatgggaccgggactggggccgggactgacaccgcagcgcttgccctgcgccagggactggcggctcggaggttgcgtccaccctcaagggccccaggtgaggtgcgccgccagtcccttcctctcgcctggttggggcttcttggaatggggggcaggattttctcaggaagagaatgtcttggcggggcggggtggtgagggggacggtggtatctgagtcgagaaggcttcactaacgcaaagcaaaagggagggagagatttgtttaaaaatcagaaagggagaagggagccagctgtgggcgcgggcaaagcaggggacggaggcttcagatgtgcgctccacgactctccctggctccggcctcctgtggggtctgcgccgaggccacagcagagggggtttgtacctggctggggcaagagactgcagagcagacctccggacacgccgactgtccccggtcatatctctggggaaagtcgcccacggcgcggtgcccgccagccctgcgccgcttccccaaagcggcgacatgaccgcgctctgcggggttcttactccatcctcccggatccctgccgaaagctccccggggcttagtccctgcagtcgagactgccgggtaagcccgggaaaacggaaagaccccagctccggaaggagattgcccgcactttaatagcgtgggtttggggccgccgactgtggttctggggcagcaggctgcggtgcgctacagccctccagcccgagtctctgcgggagctctggcgcccgtttgtaagctcccaccagcgcaggagtaggtccatgagcggcccagactcgggctcgcctctggcttgggattggcgaaagctgccagggtcaacgttaactttgagaaccacaccttcccgaaacctgcgccgcttctcggagcgcgccaagcctctctagctcccggcacgcacg

SEQ ID NO: 6911 - DNA, 6000 bp, Homo sapiens
cccagggcaggggagggaggagtgagttgggttagaggtctgggagtgccaggctcgtgtcgggggcatgaggactgttgggcagatgtgtgttgtgtgttctccaggacgggggccgctggttgcccggccactgcatggccatgggggatgcctatgtcattgtgtactcagtgacggacaagggcagcttcgagaaggcctcagaactgcgggtccagctgcggcgtgcacggcaaacagatgatgtgcccatcatcctcgtgggcaacaagagcgacctggtgcgctctcgtgaggtctcggtggatggtgagtaggcggcaggttgcagggggagggagagcccagctgggccctgatccaggcagtcttggctcagcttgagtccctggggatcatcagaggctaaaaatgttcagaaagaaaactggcggggagggaaatgggagagagctggtgcctgctcacagggctccggaaggccccagagggctggggaaagaaccaaatctgataggggagctgggcaccgcagggccctcctctcctgcccctcttggtcctggcctggctggttgggggggtaaatgggtggaagagagtgtaggggaacaggccaggaggtcagagcctgtgtgctaggtctgggccattcttagagtagacttggccctggggaagacccttcccacttggcctcagcatccttttctgtggaccccagtactgagcccctcagaggaacccagcagtgacttggtgaccttgcctccgcaaccccagtccactggatcattcatcatgatataacctcgaattaaaaaatactaagttgtgcggggcatgggccagggggtggctaacgcctgtaatcccagcactttgggaggccgaggcgggtggatcacgaggtcaggagatcgagaccatcctggctagcatggtgaaaccccatctctactaaaaatacaaaaattagccgggcgtggtggcgggcgcctgtagtcccagctactcgggaggctgaggcaggagaatggcgtgaacccgggaggcggagctttcagtgagcagagattgtgccactgcactccagcctgggagacagcgagactctatctcagaaaaataaaataaaataaaataaaatactaagttgtccaacatagttctcattttcctgtgtttactactgtcgtactttgtttaaatatcaggcttcaaattatttcaataaatggatctccttttgagggccactgttttgggggctccttaaatgcaggcactctgcctactgggtgacgcagcagtgcccagtaccctcagtacaggagctggggtctctgtgttttcggggaggaccttgcaaattctcgagtggcagcttccatgggtggccactgttggaggggactcctcattcacccaccctttgtttactggtgcctgcctttccccacccacacagagggccgggcctgcgcggtggtctttgactgcaagttcattgagacatcagcggcattgcaccacaatgtccaggcgctgtttgaaggtgtcgtgcgccagatacgcctgcgcagggacagcaaagaagccaacgcacgacggcaagcaggcacccggaggcgagagagccttggcaaaaaggcgaagcgcttcttgggccgcatcgtagctcgtaacagccgcaagatggcctttcgcgccaaatccaagtcctgccacgacctctcggttctctaggtcccacccgctcccactatggtgggagacgaacggaagggttggtgggctggcccagccaactgccccgggtgcctcagagcaggctcagactctgggtccctcggagctgccagccgggcacccccaacctcatggtcatggacagatagacagtgctgccctgcgaagtggctctcaggggccagtgagggctgggcccacagagatgcatgcgcaggctcatatgcgtcccaagcagccgcagcgcagccgccgggcaggcctgcgtgccgggagaggactctgccttttttcacagcccgggtgtgcctgccctggagggaggctcttcagtgcggtagctatttgtttacatgcagatttttgtaataaaggctatttcctgatagtcatggctgttgactctctttcctcctatctgggcgcttcaggagctggaaggatttctgaagttgagggatgggggctcactgccccaccctagtgtgtggccatgatgtgttaatgtgagggtccagatttagccagctgggatgggcatcgggtctggttagaggttcaaggagcaggagacacaaacccctcccagtccctgttatccagattcttctctttctgcactggggcctggcgttgcccaactgattgagggttcaatcacttcactgtccataaagggaaacaggctgctcaggggagcacattctgccctgggtctcacaaccaggcaggaaccctgggtctcacaaccaggcaggaaccctgggtctcacaaccagacaggatctggctccacagctggtatttctgccctgttccctcttgaggggctggaatcagctgaggttggggatagagacctccgaggggtggtttgtgaaggcacacacagctccacatggctcctccaccacttcactggggttgagctacggaggaggcactcactgttctctctaccatgagtatccaggccagaacattccatgctcagcattggctaattcagttttggtgggaacagctgccgggagcccgccctgcctggaatgagaggtcttgcatttgtataggaaggtgtactcgtgcttatgtttagggatgcacctgtctccctgcccacccatgcccatggctccctcaccctcggcacaagtgctgctaagagtttttatctacatggtctcaggaaaaaccatccccatctggtgctgggtgggaagtggctgagtggggactggtatacaggtctgcccatctccaaagcctggaggcagcctggggcgaggtggggggcagtttctaagaaggttctgggccaaggtccatacattccttccttagttcaatttattcaatttattcattccctcaccctcggcacaagtgctgctaagagtttttatctacatggtctcaggaaaaaccatccccatctggtgctgggtgggaagtggctgagtggggactggtatacaggtctgcccatctccaaagcctggaggcagcctggggcaaggtggggggcagtttctaagaaggttctgggccaaggtccatacattccttccttagttcaatttattcaatttattcattccacagactccagggagccctggcaacctggttagaatcctgattgcagcttattgaatggcaggaggaggcttgagggctgcccctccatgtacaggggagcgctgagattcacccacgtgctccccagggcagaggtaactgctcagagctgttgctgctctgcccctcctccccacatacttcaaggaatgcagaaggcatggtattttcagatcaagtgagggtccccaggccttcctggctctgtcacttattgactgtgtgaccctaggcaaaccactcagcttctctgtgccccagcatgtgcccaatgccccttcagaacgcagtatgtggcataatgaaggtatgtgctcagagcagtgctgggcacagagcaggagcttaacacgtgtgaaacccccttcaacctccccacactacactgctccaggctgggtgccagagtgaccctgaagcaggcactcagcttgtgacaaggctgggggcagctgggggtagcttctggcctgagagagactaatcagatgtacagtgggaaggacttcgtggggaccatgggaagctccaaggctggagagggactggagaccttcttcccaccctctcccctcattccagactcccaggccccagaagcatctcctggctctgcttggctgccctcattgcggggagagcccctgttcagccctgcaactccctcaaggtcacctgagccagtttaatcttcttaggggcatgagactgcccactgtctcagccctgtcactgttgagtggccagtgtaaggacttcgggagctcataggctgctgcactcccccaccacaggtccccctggggggggtggtctggagccccaatacccacttccactcatgtactgctcacccatcctttgcaacctccagctccttgtcttagttccacaagccatgcggagctgccagggcagaatgagagccaggtcattcctgagtccctgagttctgctctcaaagggctcccaatctaatggaagaggcagacaatgacaagctggtgtcctctgtgtattaatagagatagcacatggcatggtgtgagggggaggggcattcccagaggaggctcctgaacaagcctgggaacataggggaagtttcctggaaaaaggaatatttgagctgagcactgaagcatgcatgagcaggtgcttaccacacagatgaatgagtgggaagggtgttccatgcaaaaggaacagagtgtgaaaaggtgtggctgcagacactggagcctgggagataagtcagaccaagtctggagccacagaaaaagtaacgtccagaaccagagggccaaggaatacctcctgggctgtgctggggtcgagggagtgccaggccaaccatctccccacctcctggagctggcagtcacggatgctgagcagctcctggctttccaaagtcaatgagtaacttggggggctgggcggggccaggcctgctgctgtgggcccagtggccttttccactcctgagcaagcgtggctgaaccctcctacctgctcaagtgccctgccttgccccacccagcccagcctggccagagccccctggagaaggagctctcttcttgcttggcagctggaccaagggagccagtcttgggcgctggagggtgaggggctgggagtggaggggagggcatggctgaggctgaggttggtggtggggaaaggagaaacactgccctgtcctcgccatctgggaaagaattcccagggcctcatcttagaggggttgtcgatttgtcgctgctctgcctgcccagctccatgacaagggctggaaaatgatgagacaagggccgggctcctgctccgggggttctccttgtctagaaggtggcagtgggaggcaggacagtcccagaggccctgagctaggaggactcctcctgtggtcaagtcctctgtgaccttggccagaccccagcattcaggccttgcctgcaacaagaggtgacttcaggaagtgaccctccaagtcttcaggaactttccagcttcaaacttttgtgatttgggggattgctagaaaattaccactttgggatctgcggcctggggaggctatggtgagaaggagctggaggtctggaggtgaaattctgatagagtgcttgatggaccaagagcctagaagcagggtggctgggcctgggggccttggtgggcctggccgaggagcagggcactaccctgcaggagatggagagcctcagctcctttggaggggaggaagagaagactagtctgcagtacgatcccactagttgtgtgtgtgggatggaaagcccctccctacccacctgggctggatcctcactgccgtgtccctcaggcctgtcctgaccatggtccctgcctggctgtggctgctttgtgtctccgtcccccaggtgagctaggccctgccccctctccttcaggtcttggctttgggggttgacacccttgcccccaactccacctggaccaattgcactgaccgtgagaacggtgcaaggcatgggaggggtcagagctgggactatagagccactgtgggatgaggaggtcaaagaccagagcgcgggtggatggactaaggta

SEQ ID NO: 6912 - DNA, 6000 bp, Homo sapiens
gctgacttctataaaatggtctcaagttttcatagaaattggccaggttggggagggggtgttgtcgggaggagctggaacagcacaagttaaagagaaccctgtgggaagaagcctgagggtgaaaacagatgttgccagttccaggagctgcagaatcgtcacagaggacaggaagaagctccacataccagaagcctgcccagcagggcattggaagccacactttgtcatttcagttgatcctaaaggcaaaagggagccctggaatctcttaagcaaggctgatgaggtggtgttttcacatttagaaagatttctctggcacctgccaggcaacgtgtgactttcctcagtcggtgatgccctgtgcagtgtcagcttctggattggggaccacacaaggatgacagactcagaaagagcatgatcaacttgaggtcaggagttcgagaccagcctggtcaacctggtgaaaccccaactctactaaaaatacaaaaattagctgggtgtggtggtacaggcctgtaatcccagctactcaggaggccgaggcaggagaattgcttgaacctgggaagtggaggttgcagtgagccaagattgcgccactgcactccagcctgggtgactccgtctcaaaaaaaaaaaaaaagcatgatcaaactgcctgtgcttttcaaaagcagatttggggtgagagaatcatcttctcacagaacctggcttggagtcatgcaaaaagatgtcaagggaggccaggcgccatggctcatgcctgtaatcccagcattttgggaggctgaggtgggtggatggcttgagctcaggagtttgagatcagcctgggcaacatagcaagaccctgtctgtatcaaaagtacaaaaaaaaaaaaaaaacaaaaaaaaccccgagcaaggtgtgatggtgtatgcctgtagtccgagctactcaggaggctgaggtgggaggatcgtttgagcccaggagacggaggctgcagtgagccaagatcacggcactctgctctaggctgtgtgacagagagagaactcatcccctgcccccccaaccacccccctcccgcccgcttaaaaaataaaagatgtcaaaggaatctgagctgtctcttggatttttgtttcaattgaaaacagctttcactgggcatatatatgtgcacttaaccctgtttgcaaaccactgtatccatttcctattgctgctgaaacaaatcactgccaattgtgtcatcttgacagttcttgaggtcagaagttggaaatgggtccccctgggctagagtcgaggtaacagcaggctgattccttctggagcctctagaggagggtctgccccctagccttttccagcatctagaggctgcctgcattccttggctcaggccccttcctccatcttcaaagcccacagtgtagcaccttcaaatctctctgacctctgtcgttacgtggtccttctcccatgtgaccctcctgcctccctcttataaggacctttgtgactacattgagctcactcagataacctgggataatctcttccatcttgagatcttaacttcatctcatctgcaaaatcccctttgatgtatcacataacacattcaaagattccagggattagggcgatgacatcattgtggcgctatcattcagactactacctcctctaacaaagagaaggaaggatagtctggcaactgagaggaggatgggccggaagtgggcaggctgatgttagggagaactggaggctgctgcaggctcagcaaggaagatgctggtggtctgggctggggtggagcaggaagaatggacacagaatgtgtttcagagtgagggcagcctggtcacaggcactatctggtttaggtgggcaaggactagcaggagagacatgggaagatgcctaagtgtacagatgggcttactgggtagatggtggtgcccttcagagggcccaaggggaggagcagatttgtggcaaggacaaagaggacatgtggggatgtgttacatcccagacaccaatgggacatccaggagagaagcccctgagtcaagtggatccagggtcttttgggtccctccccttattatgggaatatatggattcatctttcactttgttttttaatttttatttgtatttgcatttatttatttatttaaagacagagtcttgttctgtcgcctgtaaggagtgcaatggcacaatctcggctcactgcaacctctgcctcctgggttcaagcgatcctcccatctcagcctcccgagtagctgggattacaggcgcagaccaccatgcccggccaatttttgtatttttggtagagacagggtttcgtcatgttgcccaggctggtctcaaactcctgacctctagtgatctgcctgcctcggcctcccaaagtgctcagattacaggtgtgagccaccatgcccagtcccaccttgttttttaaaatatttatttatttattattattttttaaagagataaaatctgaccgggcacagtggctcatgcctgcaatcccatggtggcaggcaactgtaatcccagctactcgggaggttgaggcaggggaatcgcctgaacccgggaggtggaagctgcagtcaactgagatcgcaccactgcactccagcctgggagacagagcgagactccgtctcaaaaaaaaaaaaaaaagagagagagagagagataagattttttttgtgtgtgacagagtctcactctgtcactcaggctggagtagagtggtgcgatctcgggtcactgcaacctctgcctcctgggttcaagccattctcttgcctcagcctcccgagtagctgggactacaggcacatgccatcacgcctggcttactttgtacttttagtggagatggggtttcaccgtgttagccaggatggtctcgatctcctgacctcatgatccacctgccttggcctcccaaagtgttgggattacaggtgtgagccactgagaccagctgagagataagatcttactttcacccaggctggagtgcagtggcatgatcgtaattcactgcaatcttgaactcccgaactcaagtgattcttttctcctgccccagcctcgtgagtagctgggactataggcacaggccaccaggcccagctattttttttcatcttttgtagagatgggagtctctctatgtatcccaggctggtctcaaactcctggcttcaagtgattttcctgcctcagcctccttaaagtgctgggattacaggtgtgagccactgcatccagcctcatccttcaccttgatttctgggtcatgatctctgtttgacccgaagttttccaattccagataagagttaagtagtcagcttgtactctgaagccagaatagcattgatatttatctcacattgagtttgagtttatcagtcttgaaaacaagaatttaagtaataggttatgtcacttgcacaaggacccacacacctgtcatgtgacagagaaggagtagttatgttgcctaataaaacatacaataagtatgcttgtgacttatacattttagagataaggatgttttctttccctatctgtcatatctgccttggagatgcgcacaggacagatagcagaagacaaagtgtcttcctgtcttttgagaaagcctgagctcatagaagattccattctgagtgtccacaaggagaagaggagaggggacttttagggaaaccaagttagcagggaagtctcccaggtagagaaagggaagggaggctgcaggccatggagcagaggaagcaggtgtctgtccctggcagccccagggagaggcaggggcctcaggcagggatggcctcatagagcccaaacctgaaaatctttgtggactggagcaatggttgtggcctcagtaccagacaaaaccctgaccagagagttttttgcttatttgtttttgattgttgttttttgctataggaaaacatgagtcctttggaattacctagctaaaaggagtacagtggagactgagactgaatttcccggccgggcaggggctcacgcctgtaatcctagcacttttggaggctgaggtgggcgggtcgcttgagttcaggagttcgaaaccagcctgggcaacatggcaaaaccacgcctctacaaaaaaatgcgaaaattagtcgggcgtggtggtgttcgcctgtagtcctagctactctggaggctgaggcgggaggatcgcctgagcccaggagttcgaggctgcagagagccgtgatcgtgccactgcactccagcctgggtaacagagaccagtttaaaaaatagaaaaagactgaatttcccatcagcctggaagattggggcttgatttttgcttgatttaaaggcaataaataaatgagatattttgtgctgcttattttaagctcttacgcttctcgctttatattctggggtacctgcatttttagtggtgtaatttatttgtctagatctgtttgcctcttaacctgtaagctcccggaagggtcgggatatcatggatgttccagcacatacgctcattgaagtgtgcaggttgactggggttgggggaggtctcttcttgagagcggtggtctcaggatagaaactggaagggggcgcttttgagatgttaggatttcggggagacaagctgtgactcgggagtagggaaaagcggattttctagacgaaaggttaggaagaatctgggaatgggccgactggggcaccaagagggtccctggcaagccccgccctggccgggggaccggcgcggagtgacgcagcgcggtttggccgctgtggggcgccgtagcccgcgccgttgtcaggggaacgggcccagcgccggacgaggcccagccagtctgggtctggcctggccgcccctccagcctgctggagccggagccggagccggagccggagccggagccggagccagagccagagctcgaggactcaccggcccagtctccgtccgggatggggccccgctcccgggcgcgttgccgcccagtcccggggaccgtccctaccgcgagggtctgaggcgcggctgccccggggagggtggaaggccaggcgtggggcccgaacctctggctgactttggcagggcccatctggcacggcctccgcggcgcgcaggtgaggagtccccgcccggtttctcacctcggagcctggcttgagccacggggtagcggatgctgccgcctggccggctttgggctcgcttccgcctggagccggtggcctgagttccagggccccggcagagcgcggggcttccttttagcatgcatcaagttcacagatcttccttgagcgcttactctttgccaggctctgtgccaggcgtgggcacagaggactcccaacagacgtggtctgtctccagaacccagagcattaaggaagggggctgggaagcggatgtcatacatgactaaagtgatttcaggtcgggttaggctctctggtattgaaatggaggggttggtcatggagggtctgttttaaaaggaaaccatgggaagagttttagttttttctttgagacggagtttcgctcttgtcacccaggctggatggagcgcagtggcacgactcgggtcattgcaacctccgcctcccgggttcaagccattctgctgcctcagcctctggagtagctgggattacaggcgcccgccgccacgcccggctaagttttatatttttagtagggacggggtttcaccatgttggccaggctgttctcgaactcctgacctcaggtgatccacccgcctcggcctccgaaagcgttgggattacaggtgtgagccaccgttcccagccaattttttatttttttgagacaaggtctccctttgtcacccaggctggagtgctgtggtgtgaacatgggtcaccgcagg

SEQ ID NO: 6913 - DNA, 6000 bp, Homo sapiens; identical to SEQ ID NO: 1886

SEQ ID NO: 6914 - DNA, 6000 bp, Homo sapiens; identical to SEQ ID NO: 1887

SEQ ID NO: 6915 - DNA, 6000 bp, Homo sapiens
taatccgcccgtctcggcctcccaaagtgctgggattacaggtatgagccactgcacccggccacttttcactttcttaatagtctctcctaaatgcacaaaagctcactgcctgtttttgtaaatggaagttttcttgaaacacagccatgctcatttgacaattacatattgtctgtggctgcttttgtactacaatggcaagagttcagcagtcacaggggcctgcaaagccaaaaatatttaccatctggccttttaataaaaagtccacaggcccttgtcttctaccatatacagagaacataaaacatcacctggaatggtaacgacatgctgagtacatctaaatctagaggtcctctggaagagctctctagtttgagtactgaagttttccattatttaaaaacaaaacaaaaggccggggcagtggctcatgaccataatcccaacactttgggaggccagtgtgggtggatctcttgagcccagtagttcgagatgagcctgggcaacatggcaaaaccctgtctctacaataaaaaaaaaaaaaaattagctgggtgtagtggcatgtgcctgtagtcccagctactagggaggctgaggtgggaagatcacttgagcgcagaaggttgaggctgcagtgagctgtgactgcgccactgtactcctgcctgggcaaacaagtgagaccctgtctcataaaacaaaaacaaaaattttaaactcaaatccagaccatatttcatacatagcaaacacaacatttaacaactatcattgtattgtacatcttaaaatcatatgggtaaattatttgacttgagataggttagtgctagtgagcgctcaggtgaggctagatgggggtttggaagaatcccccttaaaattgtctctctcataggacggcacacaaaaggtgcagaacaatatctttcacatgtggcgatactacaactttgcccggatgaggaaaatggctgactttttccttatccaatcaaactataactacgtgaactggtggtcgacagcccagagccttgttattattctttctgggatcctgcaactgtatttcttgaagcgtctcttcaatgttccaacaactacagatacaaagaagccaagatgctaagctaaggtgactatagcaccctggctgttttcttctggggcttagtcgaatcagctttgtaatgttatgggacaaaaatcaattatctcattaatgttttagtctgctgcacacatctaaaaaagcaaaatggcaataaaatcataacagtgaaaaagttctgaagaagtatgtattaaatgtatgcatcaaaatactgttcatcatatagcagtcccttagccttcactgagtctacttagaggctaacagaaaaccttagaaggaagatgagttgaaaaaggccacaatcaagtttgcttacatataaaagcaggagttggtaatgttttattcttaaagacttcacctttggaacttaaaataagcaatatattcattaaagaaatagtttaattttgcaatacagatagtctttaaattttttgtctataaaatatttaaagaaatattctaaggatcttaaagtaactttgggaggcacggggaaggacaaagggactgaatttttatgtcgtggcctctgatcagtgcttttagtccaatccagtcaagtaagtaaaggttcatagaaaaaattgttttataaaatcatagtgatgaaaaaaactttccagcctagcgtcatcccatccaagaaaaatactgagaaaacagcttgtaaaaaagaaggtaataaaatcaaattatactcataaaactctacacttaataacaggaatacataatatatataatataaaaataattaccatttattccatacctatcatttccaaggcactgtacactgtactagatgctttacaatcagatggagtctcactctgtcacgcccaggctggagtgcaatggcaccatcttggctcactgcaagctctgcttccccagttcaagccattctcctgcctcagcctcccaagtaactaggaccacagccatgtgtcaccacacctaattttttttttttttttagtagagatggggtttcaccatgttggccaggctggtctcaaactcctaacctcaagtgatccgtccgccttggcctcccaaagtgctgggattacaggcgcgagccactgtgcccagcctacaatcatgatttctaattccaaaaatcagactttctaattctcaggtagatggccaaagctgattttcaagttttgtgtctttttaaacagaagaaaatgaaccttattaaagctgaatgactcattcaaggccatatagctggtaggtggcagaagtggggtttgaacccgtttttcttctataccacacaccaattactgtatagaaaaatagctgaattgctcctattagccaaatttcatttttaaaaccccacatgtggtttattattctgttatggcaatgtctatgttgcatattaataaaaaagaaaatccttgtgtttagaaaacagtgttatcacagataacaataagctattcttgttcctggttccaatgattttgaacctatttctcagaacaagaagccctctgattcaaatatgaaacagtattctatttcgtcacaaagatctgaaaccccatttttgagccatctctgtatataataagaatccagcctgcatttgtcagtgatagagagtacagtaaataagaagtccctgaagaggccagagtgttgacaaaattcaacatgatggtggagtccacacaaacacaggaaacaaagctcggcctttccatacagccgtctgtccttggaatggcttcgttttaagtcaacgtctcttcatgccgcacatattccccaatgtctgcttgatgaaataccacaatcgccatggggtctacttttctgcagtcttgtgtagatttggctgccaccccaaaaccctgggattcaaaagaagagacactaactcactgaagtcattcaatatgcccatattgagggctggaaataacaaagacggaaaaaatacagttctggtctttctgggattcaaaacgtgctgagaatttattctctcaagcactcagattgaagacatacccttcttgaataagagtacttgagttctgtaacagctaccatctctactcaccaaagggatgtctgccatggagtacaccaccacgccctggtactgagaagtattttcagtgattcgacccagaccagatttcaacacatggttcccatacaggaaggactgctctgcaccaggctttatccaaactttatactataagagaattaaaatccaagagacataaaaacgttactatttctatccatgcagacaagctagctgctggatctgtgaataattttctgaaataattttaagggaaacagagagactcatgttttcctcaaactgtctatctcctgaacagaaatgcaggaagttgcccggtgcagtggctcacgcttgtaatcccagcactttgggaggccaaggcaggtggatcacttgaggccaggagttcgagaccagcctggccaacacagtgaaacactgtctctactaaaaacacacaaaaaaatcagccaggtgtggtggcacatgcctgtaatcccagctactgaggcacaagaatcactggaaactggaaagtggaggctgcagtgagatcgcaccactgcactctagcctgggcgacagagtgaaactgtgtcaggaagaaagagaaagagaaatgaaaagaaaaaacagagcaagaaagaaaaagaaaaaaatagaaaaagttattttctcaactctacaaggatcatcctccatggccaggttaacagctctttttctggaccccggtgtcttcattgctgccacttatttgctttctgatctctagctgggtctccctaggctcttctacttcgctggagaaaactaaccctacgcagccacatagcattcctatcccatagccctgaccatgctcaagctgcaagacctctacacatctccatgtgctgaaactcctccaagcacactgtcagggactctgtgggagagaagctgccggacaatctgcctaatccttgacttcatcgcccgtggcagaattggaaaccgccccacaaaccttggcataaggtgcaaggtaatccagagctgtgacgtgcaaccgaaacttgtgggttttagtgaattttccaaagcaggtccccagcgacaccagcttgtccccggaaatattggcggccagcttcataatcttctcactaaaagggtaaagggggagcaaggttgcggatgaaggaggctcgtgggacccaggacccctctcccctgggtccatgctgcctgcccggccccgcctcacctcacatagtacacccggtcgttgtgcagacggaaacagtaggtgccatcgggccggtccaccagcagttgaagattctccccaatgctgagggcaaaaagaggactggagaccgcgcccgaacgaaccggtctccggcaccgcgcccccactccacccttggccaccacacccacacactcccgcgtccgccccgcgcgctcctactatttcgctatcttctcaaacatgacacgggtctcctcttcagtcaaaggccgcatttttccccctgggttggaacaccggatcctcgtgccttggtaactggaaacggaagtcggtcgctcgctgctccccggcaatcccaaagccttcctctctagccccgtaccaatagttcgtctcgctagcgcccaatagtctggacgaccgcaggggaaagcaagccggccggatgagaaagcatagagaccggaaatgtgcctgtttcttcctgtcctaagttcggagtcagcgccccttgtggtccggaagggaagtgacgttgttgctgggaagatggcgaccgcggcgactatcccatcggtagccacggccacagcagcggctctcggcgaggtggaggatgaagggctcctggcgtcgctgttccgggaccgcttccccgaggcccagtggcgcgagcggcccgatgtgggccgctacctccgggagttgagcggctcggggctggagcggctgcggcgcgagcccgagcgcctggcggaggagcgggcgcagctgctgcagcagacgcgcgacttggccttcgctaactacaagaccttcatccgcggcgccgagtgcaccgagcgcatccaccgcctgtttggcgacgtggaggcgtcgctcggccgcctgctcgaccgtttgcccagcttccagcagagctgcaggtgcgacgcgcctggcgctaaaggggttttataactgtaaaagctgacatttacgatggtagaaataactaacacataaagcgtttaccacgttccaggttctctgctgagcgctttattaatccatttaaacctcacaacagccttcgagataggtactgttattccttttttatcttttttgagacggagtctcgccctgtcgccaggctggagtgcagtggcgagatctcggctcgctgcaacctacctctgcctcctgggttcaagcgattctcctgcctcagcctcctgagtagcagggaccataggcgcgcgccaccacgcccagctaatttttttggatttttagtagagacggggtttcagcatgttggctgggatggtctcgatcttttgatgtcgtgatctgtccgcctcggcctcccaaagcgctgggattacaggcataatccactgcgcccagccctgttatttccattttacatatgagcaagtcaagacagagattagtgacgtccaaggacacagctaggaggtttcgaattcagaactggttacccagaagcacgtccctccctcgaagggcagttgtgggcacaaagaaaaaggattcatgcaa

SEQ ID NO: 6916 - DNA, 6000 bp, Homo sapiens
tcactgcgacctccgtctcccgggctcacgccattctcctgcctcagcctcccgagtagctgggactacaggcgcccgccatcacgcccggctaatgttttgtatttttagtagagacggggtttcaccgtgttagccaggatggtctcgatctcctgacctcgtgatccacccaactcggcctcccaaagtgctgggattacaggcatgagccaccgcgcctggcatctgctgtttctttcagaagctgggctgggatgagaattttgggcaacctccttcgacgtgggggaggtcccatttccacttcatcactgttggagatcatggagctaagaagcagagccaagtccacccatgtccttggcagagatgacaggcacacagcttgtgcagtgccagaatatcattagcgtttcccttctttagtggtttgcttaaatttaaatccctggtaatctgtagaaccttctcctaggaaatggtgaagtctattaggagccacttgtgactccatgacctgttaaaaccagcaatgtgagtattatttggagtaaatttgttccacgtcaagttctggccttctgatgcaaatgcaaaggaacttagtctgttatgaacccaggttgatgacagaccagtccttgtggaataagattccctttaaaaactctttagccagtcgtgacatcaaccctagacctgtctgccttggcatttgctgtcaacatctgctgggctatgtaggcaggttaatcctccacttctcatgtggttgaaccagtgtgttttttggtaaaatggtgattgtagataagattagttccctgatcccctgccccctgtcccctgcctcttttcccaattcccttccttatgctggacttttaaagcttaaaaaaaatccgattgaatataaatgcctaatttcattctttgtgaaatggttgcttcctcctgattccctaattgtgctgtgttcgtgtcttgcactggaattcaacattcccttctccttttgtactgtgttgtgcttgctgtctctcccggacacccttaaagactgtctttttagcaaaaaatttcagtaaagtgttttctgtaatctttttttaaaaggtgagaactaattattgtccatacttgtagcattcttcattaaagtcttgcttctctcaactgtaagtagctgtttaattgcagcacagcatgtatccacagagggaggtagcaaaatgttaaactttgctgaactattttgatcaagaagctgatgtcagactttattgaatgttttaatccttggaagctatgtcaaacagatgatatggaagtttcctcttaacctttcagtttcctcatatatcatttctggggacaaaagaattccccctttctcacttctgagtgagtgaaaggcaaggcttaaagaaatgctaaagttttaaaattcatccattaggccaggcatggtggctaatgcctgtaatcccagcactctgggaggccgaggcaggaggatcacttgaggtcaggagttcgagaccagcgcggccaacatagtaaaaccctatgtactaaaaatacaaaaattagctgggcgtggtggcgggtgcctgtaatcccagctattcaggaggctgaggcacaagaatcgcttgaactcgggagatggaggttgcaacgagccaagatcatgccactgcactccagcctgggcaacaaagcgagactctatctcaaaacaaaacaaaactggctgggagccatggctcacccctgtaatcccagcactttgcgaggccaagaagggtaggatcacctgaggtcaggagttcaagaccagcctggccaacatggtgaaaccccatctctactaaaaatacaaaaacttagccagccatggtggcaggcgcctgtaatcccgacctctcgggaggctgaggcaggagaattgcttgaacttgggaggcggaggttgtgatgagcggagatggtgccattgcactccagcctgggcaaaaagagcaaaactccttctcaaaaaaaaaaaaaaaaagtttaaaattaaaaattttgaaaaatacaaaattagccaggcatggtggcaggcgcctgtagtcccagctactcggaaggctgaggcaggagaatcgcttgaaccggggaggtggcggttgcaataaaccgagatcgcaccactgcactccagcctgggtgatagagtgagactccatctcaaaaaaaaaaaaaattcatccattagttacaagttggaaacttcatacagctttattacctattaactgcattttggggtttagtacctattgttcttctatcaaccaaccccaactgaaaccacagggagaagttgagaacttgagctcctttcaggctagccgccttctgcctgcagctggtttggtctccctctgaaccggattagaatccagaagcttttctccccttaactctcatgtgagtcaatggtgctctccaggtagaggagtgaaactgatgcatttagggaaacaaaatatcctaatcagtgtttctttttatttatttatttatttatttatttatttatttatttatttatgaaatggagtctcactctgtcacccaggctggagtgcagtggtgctatctcagctcactgcaagctctgcctctgggttcacaccattctcctgcctcagcctcctgagtagctgggactacaggcacccgccaccacacctggctaattttttgtatttttcgtagagatggggtttcaccgtgttagccaggatggtctcgatctcctgacctcgtgatccgcccacctcagcctcccaaagtgctgggattacaggcgtgagccaccacacccggcatcagtgtttcttaaacttgagaatgcctatgttcattaatattttttcacataattcagtgttgtttttattatagttattgaaatgtgtgcaaagataaaactatgcttacagcttctgtagaactataaaacttactatgaactgacgattgtttcgccgaaaccaagtcactgcttatggcatgaccagtgctaggactgcgacggtggtgggactcgggtgggggatgcctgtgccacgtgtgctgatagaagttcccagactcttctgtcacttgagcaagactgccatagagccactgtgctcccagagtgctgtgctgtcatttggcctttgctagaactgaaccccatgtatagagtctgttttctgcctacttagcttgtgacactttgagtcaatgcaaataattgctggaaggtgttaatgctgttttgttttttgttttttaagattatgactaaggctaggcacggtggctcacacctgtaatcctagcacttcaggaggccaaagcatggggatcacttgagcccaggagtttgagaccagcctaggcaacatggcaaaacctcatctctacaaacaatacaaaaatcagccaggtgtggtggtgcactcctgtgggtccagctacttgggaggctgaggtgggaggatcgtttgagcccaagggggtgaggctgcagtgagctatgtttgtgccactgcactccagcctggaagacagagtgataccatctcaaggaagcaaaaaaaaaaaaaaaaaaaaaagattaggactgaaaaatggttaggcagtgtcagaactcagagactgacagcttgagaatgagaaacactgtcctgcctggtggttaagagcatgagcccccaccggggacccagctctgccaggtgtgcttgtgggagcgtgagccaccactggaatctctgaatgtctgtgtcctcatctctaatgccagagctcacaatacctcccttgcagggctattgtgagaataaaataagatgcaggtaaatcttagctcagtgcctgccatgaaggaggtgggtgttgaaatcatgaataaaagaataaagattaaggatgtgaataatataattgtctttaagtgggttctggatagttttttcccccatgggtgctgaagaagtcctgaataaaagaaagatcaaggctgggcgtggtggctcatgcctgtaatcccagcattctgggaggccgaggcgggtggattacttgaggtcaggagttcgagaccagcctggccaacatagtaaaaccctgtctctactaaaaattcaaaaattagccgggcatggtggcaggcacctgtaattccagctactcaggaggctgaggcaggagaatcgcttgaaccggggaggtggaggttgcagcgagcagagatcgtgccactgcactccagcctgggtgacaaagctacgctccatctcagaaaaaaaaaaaaaaaaaaaaaaaaagattgaggctttggataatataattgtctttcagtgggtttggatagctttaggtgaccgttaggtgaaaggcatcaggacgaggactgtcagtggaggggtctaagcaccatcctctggcactgtattcatccatttacatctttgcacacacatgctgtgatttgctctgagctgcagcattggggagagagaagtgttgccccatgtgtttataggagcaatttgatgtaagagaacaatccccccagccaactttttgtcagtgtattcagaagttgtaaacttacccactattatatccccaagaagcaggaactaaaaaatgacagccctaatgaagggtggaaagacctcttctgaggtggtagattctatgtagcacccatgaagtaggtttggtaagccactgagtttttgaggtgaaagcaaaatttcctcctgcgagccaaacatgggagtatcatggcagttctatgatgaatatctatgtgtggccctgaaatgggccgtaatgtgacttgtggagttaatcattagcccagcggttgtctgaacgacttgatttccctgggctgcgagcagttcacctgcagaggaggctccagaaagcggcatgtcccctttgctctttggggctgggctggtcgttctgaatctagtgacgtctgccaggagccagaagacagaacctctaagtggctctggggaccagccactcttccgtggagctgatcgatatgactttgccatcatgatacctccaggaggcacggaatgcttttggcaatttgcccaccagactggatacttctatttcagttacgaggtatgtgggtgactggccatactggggggcttttttttttctcctttactcataaagtgggtcaggttttaggccaaaacaaggtctggttgtctttattatgctgtgattccccacctgttaatgaaatggacctgcagttagagggaaactccagctgggtgaataatcaccaacaggagctaaaacatatggtttggcttcttacatcaggggccatgctcaaagccatggggcagacggggtgcctctccctgaagaggtaatcattacatgtactcggatttggggatgagaggggagagaatacatttttaatatattaaaacaaaattggataatggtgctttggagactgatccagagatttcaaagaaggctgcttcagcttatggggtgggggagtaaaggttctgctgcctttaggagcaattctggcaagtcagagattcactaggtcaagttttttgtattcggccagttaatcctattttttttttttaggacggtaagtgttttcaagttacttattcaaaggtcaagtacttttacccatactatggtcttatatcatgctgtccaaggatggtgaactcagtatgaaagttagaggctgttcatttcctttgttctttatcttagaaatcggttaactttctaatttttgtttacatagtaatagactttgttgatcttactccactgtaacaacatttattttaaataaacttatcagagacttttcttacctctgaatttctattagaacagcagccactactaagctcactgtgg

SEQ ID NO: 6917 - DNA, 6000 bp, Homo sapiens
tgatctgcctgcttcggcctcccaaagtcctgggattatgggtgtgagccaccatgcgtggcctcatctcttctataattatcaatttaaccaaccttgttgtatctatacctatacctcaaacctggattattttgaagcaaaaattgagaacaagaccctgtctcgaagaaaaaaagaaaatagacaacacaattgaaagcaggagctcaaagagatatttgtacactcatgttcatagcagtagtatttaaagtagccaagagctacaaacaacccatcattgacagatgaatgaataaagaaaacgtggtatgtacatataatagagtattatccagctttacaaaggaaggaaattctgacatatgctacaatatggatgaaccttgtggacattatgctaagtagaatatgctggtcacaagaggacaagtactgtatgattgcacatttcctattagctacttggtacattttcttttattttttgagagacaagggtcttgctctgtcatgcaggctggagtgcagtggcacaatccagctactcgggaagctgaggcaggctgtcgcacaagctggggtgcagtggtgcgatcttggctcacggcaacctctgcccccagggttgaagtgattctcctgcctcagcctcccgagtagctgggattacagacacccgccaccatgtccggctaacttatgtatttttagtagggagagggtttcaccatgttggccaggctggtctcaaactcctgaccttaagtgatctgcctgcctcagccttccaaagtgctaggattacaggcatgagcctccttgcccagtcaaaaaagacattaaaaaaaaaaaaaaaaaaaggcccagagcagtggctcatgcctgtaatcccagcattttgggaggctgaggctggcggatcacaaggtcaacagatagagaccatcctggtcaacgaggtgaaaccctgtctctactaaaaatacaaaaattagctgggcatggtggtgcgtgccagtagttccagctcgggaggctgaggtggaaggatcccttgagcccaggagttcgaggatgcagtgagccatgatcacaccactgcactccagcctgggtgagacagcaaaacctagtctctaaaaagaaaaaaaaaaggtggtaagaacagattttaatttgtaatatactattgcaatagggaagagggtccagcgtgaacttggcccaactttgatttgtacagaagtgactgggaatttaaatttattttttagagatggggtcttgttacgctgcccaggctggtctcaaactcctgtcctcatgtgatcctgccacttcggcctctagagtagctgggattacaggcacaagccagtgagtctggcaagataacttgtgttttttgtttgttttgtgacagagtcttgctctgttgcccaggctggagtgcagtggtgcgatctcagctcattgcaacctcagctcattgcaacctctgcctcccaggttcaagtgattctcctgcgtcagccgcccaagcagctggaactacaggcacccaccactgcacctggctaattttttgtattttttgcattttttttttttttgagacggagtctcgctctgtcgtccaggctggagtgcagtggtgtgatctcagctcactgcaagctccacctcccgagttcacaccattctcctgcctcagcctcctgagtagctgggactacaggtgcccgccaccaggcccgactaattttttttgtatttttagtagagacagggtttcaccgtgttagccaggatggtctcgatctcctgacctcatgatctgcccgccttggcctcccaaagtgctgggattacaggcatgagccactgcgcccggccctaattttttgtatttttagtagagatgggctttcaacatgttggccaggctggtctcgaactcctgacctcaagtgctccgcctacctcggccttccaaaatgctgggattacacgtgtgagccactgttcctggcctagttgtgttttaaagtggatgaaggagtagggaaggtggcaagcaggggttcggtagagtcagggacatgaaaaattgcaaaggattggtcaatgtacagctctgtccactagctggcaattatcaaagttaggattctgtcctcccacaaagaggccttatccttcaggatgacgacattcaaggaatggctttcaggtccttgagaaagacactcttgagttgtagaagatacttacacatctcaaaggatcagataaggaattcacaattgtgagccctttttagtaaatgctctgagaaagtgtagtcagagcctatgattgggtgtcgcctggaacagtaaattctttcggcagtggtgcgccttctcaggcaggcactttaaggtgggtttgggtcatcccaggatgtgaccttgagctgttagaaactatattactgtttaagtctctttttttttttgagacggattcttgctctgttgtccaggctggagtgcagtggtgcaatctctgctcactgcaacctccacctcctgggttcaagcaattctctgcctcagcctccccagtagctaggattacaggcgcctgccaccacgccccgctaattttttgtattttcagtagagacggagtttcaccatcttggccaggctggaagagttcaggccacccctgaactccagaccttgtgatccacccgcctcggcctcccaaagtgctgggattacaggcatgagccatggcgcccagccttcttttcttttttataaagagagacagggtttttccacgttgcctaggctggtctcaaactcctaagctcagacaatctacatgcctaggcctcctaaagtgctgcgattacaggcgtgagccactgtgacccgcctctgtagaagccttttaatgtggagggaggagggtgggtaaaatcacttgtgttgagagtctgccggtgttttgtttgtttgtttgtttgtttgtttgtttttgagacggagtcttgctctgccggccaggctggagtgcagtggcgcgacgttggctcactgaaacctccatccccccggattcaagtgattctcctgcctcagcctcctgagtagctgggattacaggcgcctgccaccatgcccggctaatttttatatttttagtagagacggagtttcaccatcttggccaggctggtcttgaactcctgacctcatgatccacctgcctcagcctcccaaagtgctgggattacaggtgtgagccaccacgcctggcccttttttgtttaagacagagtctcactctgttgcccaggctggagtgcaatggcatgatctcagctcactgtaacctccaactcccagattcaagcaattctcgtgcctcagcctcccaagtagctgggattacaggcacgcactaccacacccagctaatttttgcatttttggtagagacagggttttgccatgttggtcaggctggtcttaactcctggcctcatgtgatccacctgcctcagcctcccaaagtgctggggtcgtgatgacatcactgcactccagcctgggcgacagtgagaccttgagcaaaaacaaagagcgttcctgtgctaaaggggactagactgggaccctgcctttccgggtttggctcttcagggccattattaattatcccacacaagggccatccttgaaagaggataccggtgtgttagcagcaaacaccaacagcagaggttatcaggttatcaaggtagtaaccggcagcatgagcaacacctggagacggggtagcaatgccaattctggggcctgccctagagctaaaagaaccagaagctgagggtgggggcagcaatctgcgtttaaacaagctggccaagaggatcccatacacaccaaaaattcagaaccacttcagcctcacttcagcctgttggagggcgaaactgcagtctacctggagtttcataaaggttttgaaataggtgcggaagttagggaaaggatgggctaataaaagacatggcaaatatttaaaatgcattcactttaccctcaacagcaggaagctacgggcatctaagagagagcctgcaagggggagatgccccggtggatgaggaaccaatagacactctgcccccttttcctcttttcctaggtggggaacacaaagtccagcgaggccaaacccccgctcgcaccgctgatggggtctctctcccctcaggccagggcgcagcggccccaccgcagctcgggctttcagagcccgggcgtgaagccaagctggcctcaggtcgcggctctttgagagcgcgagtgggaacagtgccctccggccgggctcgtcagcagctggccacagcagcatctgagaggcgtcctcggctagtgtgcacctccctaggaacccacgtatccaacccggctcggggccgtctgctccagccgctggagcccggccttctgagaatgaagacttcccatccccctccgtctcccctcctgcacggcggaccccctgagccctagcgaaactacaaagcccacaatccctgggatgcgcgcgctgtcttctgggagatgtagtcctggatgcggggcgcccctagcgacccagcgcccgctggactccatatcccagcatgccggcgcgcgtgcggggggcggagggagggagagacggggaggatgtgaatggggtgggggcagtcgcccctgtcccccacccttcccttcaagccgggcaggggtggggggaggggccgggctgaggcggcggcggcggcggcgctcggggagggttgggccaggcaagggcgggactagcccacggcgggcggacgagagagctgcgagctaacgggtccggacgacggcggcggcggcggcggcggcggcgacggctttctgcgcgggcggcggcggcggccggagcggcgagcatggcccgcgcggcgccgggcgctgactgaggtgcgcgggtgggatgagggcgggcgggatgcagagcgccccgggcccccggctgcccagacctcccctgcgcgggcagctggcgcggcccagcggcccagaccggcccgttccagcccggcaacttcccccgggtcggggcgccgggctccctcgtgtgggcgggggtccgcgcgcgttggcctcattccggatccccgccttctgctttgcacgtccagccgctcccagcctcccagggctcccgctccgctcctttgccggcagcccccaaccccaaccccagccccagccccagccctcggaagagctctctgccctggtcccgacttccagtccactccctagttcgtaccgctaaccctgggtctcccggcctctgctccacctgggagaccccggccccactcttggccagagcctgtctgccccatcagctcctctttcctctctcccctgtgatctttcccctacctggcactgccccctaaccatcctcagtggcccagttctcacggctcgaccttcctactttggggaaactgaggcacggctgaagccagaaacttggccaaagcgccagtcccgtggaggctggtctgaacctcgtctctcctctctcctgttccttctctgccttggaatggaagtcatttcttacccccagtcattcccctgtgactggaccaaacttcccaccccctgctacagctctgggctgagctcacttgagtctccccttagcttcctgccgctcctgttggccttccctccttcgcataacccactccgggttccctctgcctgtagaggagtcagcaccaattgcttgcttgctcaagttagcctttcgatttatcttttgccaactgcatccatctcccgtctcccatcttccctcttgctttacagctgcgtaaaggagcggaggattgagtcaaaggtggtgttggagaaaggggctaga

SEQ ID NO: 6918 - DNA, 6000 bp, Homo sapiens
ccattgcactccatcctgggaaacgcagcaagatatcgtctctaaaaaaaaaaaaaaaaaaaaaaaaggccacgcacagtggctcacacctgttatcccagcactttgggaggctgaggcaggcagatcacttgaggtcaggagtttgaaaccagcctggccaacatggtgggatcccatctctactaaaaatacaaaaattagccaggtgtggtggcacgtgcctataatcccagctactccagaggctgacacaggagaatcgcttgaacctgggagacggagtttgcagtgagccgaggtcgcactactgtactccagcctgggcaacacagcaagactacgtctcaaaaaaaaaaaaaaaaaaaagaaaacttctccatcattttagataaaaaggaagactgaattggaaaaggaatttgaaagataaaattagtattaaaaatgtgctttcagcagggcacagtagctcatgcctgtaatcccagcactttgggaggctaaggtgggtggatcacgaggtcaggaattcgagatcagcctggccaatatggtgaaacctcatctctactaaaaatatgaaaaattagccgggcatggtggtgcacgcatgtaatcccagctactcaggaggctgaggcaggagaatcgcttgaacccaggaggcggaggtggcagtgagccaagatcacaccactgcgctccagcctgggtgacagagcaggactctgtttcaaggaaaaaacaaaaacaaaaacaaaacaaacaaaaaacaaaaacaaaacaaacaaaaaacaaaaacgtgctttcaaaaattctatccaaactccagctgagattcattgcattacatagtgaagtcagtcacaaatctccaaattcccatatacgtatttccttaatcaaatgcagcaaagaataactaaattacccaaatgaagactcaaacccgcaggaagagccataatgaggatcagagaaaataacaacatgaaatatgaatgctgtgtggtcagttaggctgcctctcagtaccacattaagtattcagtaccacattaagtattcagagttaaacctcaacaaaattatgtcttactctacacaatcatgaacctcctgcattacttggattgactcaaaaatgttaaatctgcaaatggcaagaaaaagtttttattttataaacattagtacctcactttcagtaactttgtatttcctaatccaatatttgaaatttcacacaattcaaacctagccttaatccatctttacaaaaatattccccacatggtaaacgtaagcaaattatctgtttctatgcagacagcactccctacctaaactgcattttcccttttctctcatacaaaagttctatctcttcaagcaccaaaccaaggtccaaccttccctttatttaaattactctctgataaccagacaaacaccttcagacattctttttacccaacctgatgtcaaattcaagatcaaagatcaggtcttacacatctcagtatgtcttacagcaataggcacacgacttggcactaggtaagcagccaagaaaagtgtgccctgacaagaatcattacacaatttgtgaactaggaaatgcatctgaaataggtaacagataatgcaccagaacttaacacctcatctcataatttgaattgtttacatttaccaacaactgttttgtcataaatggaaaacatttcctgcacaagagactaagcaagatatgtattaattcacttaaaatttcaaaagatggtaacgagagaacttaccagaaaagtttccatgaatggcaaagctgatgccagtggctctctgcaaggttaagttgtacagaaacatggctgcaggaaacctgagccacccagacctccaggccttggttacaccaacagtacggagtccaagaaagctaagaaaacagaaaacagaaaaatagctgggagactattacttcaacagacatttctgtatgggaaattctggatgaagacagcagaaccagcagagcaagccctattaagaaacaacatatgtgaccgggcgtggtggctcacgaggtcaggagttcgagaccagcttgggcaacacagtgaaaccccgtctctactaaaaatacaaaaattagctgggcatggtgctgtgcgcctgtagtcccagctactcgggaggctgaggcaggagaatcgcttgaacctgggaggcggaggttgtggtgagccaacatcatgccactgcactccaggctgggcgacagaatgagacctcatctcaaaaaaaaaaataaataaataaaaagcacgggaccttgagaaatccaaggtcattagtatagaattaacatacatatttgattttattgttaaacgagaagagagaattatgagtaaacgtcctcataaataactttctgggctgagcaaaagcagggtggcaagatcaatgctccaggctagaaatgggtcctgagagatataaaattttctacttgagactaaggtatatcttttttttttcctttttttttttttttttttttttgaggcgtctcaatctgtcgcccaggctggagtgcagtggcgccatcttggcttactgcaagctccgcctcctgggttcacaccattctcctgcctcaggctcccgagtagctgggacaacaggcgcccgccaccacacccggctaattttttgtatttttagtggggtttcaccatgttagccaggatggtctcgatctcctgacttcgtgatccgcccgcctccgcctcccaaagtgctaggattacaggcgttgagccaccgcgcccagcccatagactaaggtatatgtttaacgttctaggaccacagtaaaacatgaacgaaaaggaccgatgttgaaagaccagggagtggagaaacaacaaaaaaagcaaaagagaggaagctaggagctgcttctgaatccctgaacagctccccgcaagttacttttcatattttgtagctgatcaaaacagtctactttcccctttccttataactgatacaatccattacaaacctttggaattcattttttcccaaatctagttggattcaggttctccagcgacaccttaactttggatcgtggaggaaggtgcatttcggaggatcagtccagtactagaaaaactatatacgaggccaggcgcagtggtggctcacgcctgtaatcccagcactttgggaggccgaggcaaatgggtcacttgaggtcaggaattgagaccagcctggccaacacagtgaaaacccctctactaaaaatgcaaaaactagccgggcgcggtggcacacgcctttaatctcagctactcgggaagctgaggcgtgagaatagctagaaccaaggaggaggaggctgcagtaagccgagatcaagccgctgcgctccagcctgggcgacagcgagacttcgtctcaaaaacaaaacaaacaaacaaaaaatacataccagataaatttggtaagctttaaaacttcccccacgtctgggccgggcgcggtgtctcacacctgtaatcccaacactttgggaggccaaggcgggtggatcaaggtcaggagatcgagaccatcctggctaacacagtgaaaccccgtctctactaaaaatacaaaaaattagctgggcgcggtggcgggcgcctgtagttccagctactcgtgaggctgaggcaggagaatggcgtgaacccggaaagcggagcttgcagtgagcagagatcgcgccactgcactccagcctgggcgacaaagcgagacaccgtctcaaaaaaagaaaaattagccgggcgtggtggcacgcgcccgtaatcccagctagtctactcgggaggctgaggtaagagaatcgctggaacccgggaggcagagatggcagtgagccgagatcgcgccactgctctccagtctgggcgacagactgtgactccgtcacaaaaacaaaacaaaacaaaacaaaaaaaacttcccccacgtctgtttaccattattacaaaaagcttgtatgattgctcactgcatcttctccatcctccaaggaaacatcatcgcatttaaactctgtcctccattacgcaaacgagaaaatagaggttcagaggaggagacaagttgcccaactaccaaaatacaaattcaaaccggagtcttggctctaaagactgtttccgttatttacgcttttaacacgctccatctttctatcttcccctcggtgtaccatttactctacccagagggagacatccatgcctcccgctgcttgtcacacctcccccgtctcagagtccccagaagttaaaagcaatctccacgagccctattttgagatagaatatgttcccacactgtggatggaagcgagagataactgcaggaagccgttttggcgcctcaaccatccctcggtacctcctcctggtccccagcctctcgggcctagactgcccgtgacccccgccaaagtctcgggtcccccttccatatggccggtctccgcctccccgggcccggggaagtctccaggctgtttttttaccctgcagcgagaaggatggtgtggatatccaacggatgctacctcccttcaaaacttaagccaccaccaactccaacatactggcgtccgccattagacctcaagacagggacattctggtggcgcgcggcggaaaaaggcacccaatccgcgcctgaagaatatatataatttttaaaaaatgcttccgtcttgcttccacacggcattacaaattatttaaacatgctttattgctttgctttttccaggagaatagaaaattaatacgtttttagaagtagactttaaaaaaaaaaaaccattagagttcattgggcacttctgtgggcagccccaaataggcgccaacgaagagggggcctcgcgggaccggaagtgccgaatggggaccaagatggcggaccttgattcgcctccgaagctgtcaggggtgcagcagccgtctgagggggtgggaggtggccgctgctccgaaatctccgctgagctcattcgctccctgacagagctgcaggagctggaggctgtatacgaacggctctgcggcgaggaggtgcggggtcgagcctcttctttttcatggaggatctagggagagtgggagccttcagtcgggaaatccgggctgtgggaaactctccttgctgggggatacaaaaaagcgggaaaacaaagaagcggaagctagtcgggtatatgagtagtcctgtcaactcttttcacgctgtcggacgcgccgagcttgtcttccctgatacctgggcgatctgcagcctctcctccctagacccccgttgatttccctgatccatgatcaccagtttctccacgggagtaaagttagtctgagagtatttgccaaattgcttggttctcaaaataataagcgcccttttgcattggcttaatttacaaattatgaaacgctctcatcctgttatttaagagggaagcctttgcagattaacttcttgaagcgttttaagacttcctcttgtggggagtgatttgggggtgtgattttagcgttttggtcaaatgcacatctttgtagaggtttagcttttaagactcagacacaattctctaatcttggacaagtcacttcatctctggtacccttgatattttatcaaatgaggggtgtggactattctccaattcctttcagttcataacgttctatttcctgcctcctttaattttcagtggcaactcgatgctgtcaattcactttcgaatgtcagttgggttccttgctagtcaaaagagatctaagctctaagcttgtcagctgtttcccagaccaaacttctagcaaagttgagcacaaaaggcagtttcagcctgagggagaggtgatcgttgatatctttgagtattttcaagtataa

SEQ ID NO: 6919 - DNA, 6000 bp, Homo sapiens
ggagtctcgctctgtcccccaggctggagtgcagtggtgcaatctctgctcactgcaagctccgcctcctgggttcacaccattctcgtgcctcagcctcccgagtagctgggactacaggcgcccaccaccacacccggctaattttttgtatttttagtagagacggggttgcaccatgttagccaggatggtcttgatctcctgacctcatgatctgcctgccttggcctcccaaagtgctgggattacaggtgtgagccactgcgcccggcccaaaaaagccatttttaaattttagttttgtccttcaatttttttctatgcatgtaagttatcagtagtaaacaaacccataaaaataataatctttggccaatggcagtgcctcacgcctgtaattccagcactttgggagggcaaagtgggaggatcgcatgagcccatgagttccagaccagcttgggtaacatggcaaaaccgtgtctctacaaaaaatttttaaaaaaattaggcgggcatggtggtatgcacctgtagtcccagctactcaggagcctgaggtggctcaatatacactttgcaagctcattttataacattgttttataatatttccttttaaagtctgccatactataataataaggttttcattttattggtagcatagtattaccttttatagatgtgctgtaatttatttatctggaattagggattatgtttgagaagatggggagtaagcctttctaaacttaaatcactagccatggaaaccaaagattccaagataatgtgactatgctacatattggggcaattgcttttatttatttattttattcatttatttaaaagatgaggaggccgggcatggtggctcatgcctgtaatctcagccctttgggaggccgaggcaggtggatcacctgaagccaggagttcgagaccagcctggccaacatggagaaaccctgtctctactaaaatatacaaaattagctgggcgtggtggcgcatgcctgtaatcccagctactcaggaggctgaggcaggagaattgcttgaacccgggaggtggaggctgcagtgagccgagattgtgccattgcactccagcctgggcaacaagagtgaaactccgtgaaagaaagaaagaaagaaagaggggcggggaggggggaggaagggaggaaggaaggaaggaagaaagatagggtctcactatgttacctgggctgttctcaaactccttggatcaagtgatcctcccaccttggccccccgaagtgctaggattacaggtgtgagccactgtgcccagctggggcaactgcttttaattttagttgcatggaagaagggtttggtaattataaataaagataaatggcctgggcgcggtggctcacgtctgtaatcccagcactttgggaggctgaggcgggcagatcataaggtcaagagatcaagaccagcctggccaacatgatgaaaccccgtctgtactaaaaatacaaaaattagccggatgtagtggcacgtgcctgtagtcccagctactcgggaggctgaggcaggagaaccacttgaactcgggaggtggaggttgcagcaagctgagatcatgccactgcactccggcctggcgacagagactctgtctcaaaaacaaaaacaaaataaagagaaatgtaagttaaaaagtactgagaaagggtttagtttttaatgtttaaaactctttaacgctctgcactcgatatggtaggaaaaaagatctttccggggccgggagcggtggctcacgcctgtaatcccagtactttgggaggccaaggcgggcggatcacgaggtcaggagatcaagaccatcctggctaacatgtgaaacctcgtctctactaaaaacacaaaaaactagccaggtgtggtggcgggcgcctgtagtcccagctgctctggaggctgaggcagcagaatggcgtgaactcaggaggcggagtttgcagtgagttgagatcgtgccactgcactccagcctggggacagagtgagactccgtctcaaaaaaaaaaaaagctctctcctccttaggtagctggcttaatttttcttttgtggttcacaatgatacacatttaaatttgacctctaagcatttttttgtggtgttccaaacggaatactttagctaactctgctttgcaacctgcaaacttcttacttatgtggaaaccccaaactaagtttggcctgtgttccctgcatagctatacctcagaggaaattgtgttttggcttcattccactatttactagccttgtagtccatggttgcactgtacagtagcagcatggcagaggatctgaattctgtaaacattctgttctctaaaccacttgttgggggttgactccatccaccctgagagtgtaggtatgtgtgtaggtaggtaggtaggtaggtgggtgggtaggtaggggtggtggaagattgtggtaccctatgctaatttataaaatggcactctggcctggcatggtggctcatgcctgtaatcccagcactttgggaggccgaggtgggtgaatcacctgaggtcaggagttcgagaccagcttgggtaacatggtgaaaccccgtttctactaaaaatacaaaaaattagctgggcgtggtggcatgcgcctgtagtcccagctacttgggagactgaggcaggacaatcacttgaacctgggaggcggaggctgcagtgagccaagatcacgccattgcactccagctcgggcaacaagagtgaaactctgtctcaaaaaaaaaggcactctatagctctgtagcagaaccccagtggaggaggggagaggatgtgtcttttagccaagttagtttcttggagcctctttttccttatttgtaaaactaagttacttatgcttgcctagcctgactcaggaggttgtccagagggtcagattagattatacacatgaaagtgccttatgaacaatgtgatatcaatatttaataatacaaatgataattattatcgcacccatggcctcctttctttccagccacttggcatgccccagtagttcagggacaaaattgtacagatgggcctacttggttcaatttttttttgtttttgtgagacagggtctcactctgtcgcccagactcggctatctgcaacctctgcctcccaggttcaagcgattctcctgtctcagccttccgagtagctgggattacaggtgcccaccaccatgcccggctaattttgtatttttagtggagatggagtttcaccatgttggccagtctggtctcgaactcctgacctcaggtgatccgcccaccccggcctcctaaagtactgggattacatgcgtcagccactgtgcccggcctacttagagcaatttttgttaagtgttttgaaatccctgcatgaaaatgactaaggaaaaaagtgcaaccttctctctatgacacccaaatcctaaactcaagatttgtggttagttctggccaggccggtggctcacacctgtcatctccacactttgggaggccgacgcaggcagatcacctgaggtcaggagttcaagaccagcctggccaacatggcgaaaccctctctctactaaaaatgcaaatattagacggccgtggtggcgggagcctgtaatcccagctacttgcgaggctgaagcacgagaaattgcttgaccccgggaggcaaggttgtagtgagccgggatcccgccactgcactccagcctgggcaacagagcgagactttgtctcaaaaaaaaaaaaaaaattttttttgtgtggttggttctgttctctttggcacccagcctgctgctgtgttgtattgtactttgttgccaatctagcagaaggattttagtctaggtaggtcacctttcctttaaacaggccaagatatcaggccctctttacattcacatggaaaagactcacgtcatatgttagtaattatttatcaggttaggaactgtctggttagactttctttggccctggttattaattcatggagtcatagaccgaaagcccattctgtaagggtttcagctaacatgagtccaagtcttctttctacatatgaggaaattgaatccctggagagtttaagtgacttgagcagtgcaagcaccgcggtaccgggcgtggaatccattcttttcagtcatcctcttaactcttcataaaatatgttgcaaagacaccataaaaccatagaataccacctggagcatgctccttaagttataaagaaagcaaaaatcttaaaggagacagcaaagagttcgggattcccgtggacgaagaccttttcagccctgctgtcttctccgcccccacctgtctcgcttgctctcacttcctgggctacctgacttagctccgccccctccaggtggctccaccgcttcctggtagcccagctccaccccccctacccccccacccccctaccccccacccccctaccccctcaccaagcggaaccaatgtccgtccgctacggggtaggccggatctttctcgctcagactcatcgcagcggtgactcggcagcagcgtctcgcgtcatcagtgacagccccgatccttgctacgtttgcgtcgctctgccaggagcagtcgcctcctccttggcaaatagtcctcggcagggtccgagttcttggataattcgagagaaaaggcacgataagttgcagtacgaggacacggaaacgaccaggagaggaggacagggagcgaagtttcctcaatagtgtgtgaagttagttaaaaactccctccttcctcaggatccctccgcctgcggtagcggtggtgaggccgagggagccgccattttggatgttcggttcctgctgccactgctgccgccgcccccggagctgctggtttcattcgaggtttcgggccggtgagtgtcactcccggcgctgagagcatattgctgcttttgccccgccgctgccgcgggcgctcgaccggaagcttcctttcagtttcaggggtccagtcccaggctgtgggtgttgagaagagaagacagagaagctgggccaggagaggccgggagccccaggggctgctccgacttctggagggccgaccccgaggcctcggaccgggaggttccgcgcgccgcggcgttccgtgttgtggcgttgccccgccggtacgggcctccttgaacccttgactttctcaggctgcgatctttgagggctcattcagggagcctggggtttagcggggcgggccccacccccgcgtgtcttctctgagccacgtatcagcgttcttgtgtcttgtacccgtgtcaggtctgtcagataactcccagcatatccaaatgcccagttaatcgctgcctgcccctgcagtgccgtcctctcggaaccggacatcggcctcgcctctctctaaccttccgaccaacttctttcccaatttttcgtgtgtgtgtgtatatgttgttgttttgtttttttcaacctacctgcgagtatactgtttacccttttctcagctcctggccctgcggacgtcagcgtctaataattctcccggtcttcctgattgcctgaaagagtcgggacggttcggttgattgtgtttcccggttaggactcggtgtaggagatccatcgaaccactcgctcagggtaatgtttatgaagcagattatgtttatgaagcagattaaatggcttttgggaggcaagagctgtcaaatgttttctcatatgtggattccctccctgtgctgaatacttagctttttggtgcttactgacacttgtgtggtatttttttttctcccctattatatatccctgagcacggaaatctgtccatggagaaaaatattaatctgaggtaggtagaaaggagagttgggctgctttacagtgattagttaacag

SEQ ID NO: 6920 - DNA, 6000 bp, Homo sapiens
aatcacaaaaaaaaaatgttccattgggaggatggggattggtgaagattagagccaccattacagacctaaagaatgcaaatgtggttctgaaagatggtggagagtgaaaacttttccaaactagtggaaatgctggctgtgctcttagtcattccactttgtatgtaagatgagaatatatacagattcctggacaaagtccaatggcctggcctggagtagaggcatgtggatgaacgtgtgggggtgagtacaatatataaagatttttgtatctcttaataatgccctccagaaagcctccaccatagaagaggcactgagcaaccaagtaagcaaaatgacacagccaattcacatgagctagcctctagctcctcctgacccgacattctgggcacgtgaacagagcagccatagcagcagacatgcaggttccatgtgagctcagtagcatggactcccactcaccaaggtacatccagctactgctgcccctgaatgtccaacttgtcagcaacagagagcaacactgagtcttttttttttggagacagagtcttgctctgtcgccagactggagtgccctggcgcaatctcggctcactgcaacctctgcctcctgggttcaagcgattctcctgcctcagcctcctgagtagctgggattacaggcgcacgccaccacgcccagctaatttttgtatttttagtagagacggggtttcaccgtgttggccaggatggtctcgatctcttgaccttgtcatctgcccgccttggcctcccaaagggctgggattacaggcgtgagccactgcgcccaccctgcaacactgagtctttgataggcactgtttttttttttttttttagaccgagtctcgctctgttgcccaggctggagtgcagcggcgtgatctctgctcggagctgcaacctccacctcctgggttcaagaagttctcctgcctcagcctccgagtagctgggattacatccatgagccactgcgcctgaccccctttttttttaaattttttaatttttttatttttctgagacaggatctcactctgtcacccaggctggagtgcagtggcataatctcagctcactgcaacctccacttgccgctttcaagtgatcttcccgcgtaagcctcctgagtaactgggactataggttgcaccattatgcccagccaatttttgtatttttagtaaaggcctgacctcaggtgatccacccgcctcggcctcccaaagtgctgggattacaggtaggtgtgagccaccatgcctagcaggccttcattttgaatgcttattcccacctccttagaatcttgaactagttattaatgtctgattttggaacacttagagtcctcttttcatggttgcacttgggaggccgaggcaggcaatcacctgaagtcaggagttcgagactagcctggtcaacatggtgaaatctctctctactaaaaatacaaaaactagctgggcgtggtggcaggcgcctgtaatcctagttacttggggaggctgaggcaggagaatcacttgaacccgggaggcagaggttgcagagctgagatcatgccattgcacagcagcctgggcaacaagagtgaaacactccatctcaaataataataataataataataataataataataataataataataaaagaacaaattctcaacagcccaggtgcagggctgacacctgtaatcccagcactttgggaagctgaggtggaaggatcacttgagcttgggaggctgaggatgcagtgaacatgatcatgccattatattgtagtctgggtgacagaacaagaccctgtctcaaaaacaaaaaaaaatactaaaattacaaaaaaaaaataattagctgggcgtggtggcacacaccggtagtcccagctacttaggaggctgaggcgggaagactgcttgagcccaggaggttggggctgcagtgagccacaattatcatgccactgcactctagcctgggtgacagagggagaccccgtctgaaaacaaacaaggaaaatgctcatggctgggcccggtggcttatccctgtaatcccaacactttgggaggccaaggtaggtggatcccttgaggtcaggaattcaagatcagcatggccaacatggtgaaaccccgtctctactaaaagtacaaaaactagccggttgtggtggtgcacgcctgtaataccagctacttgggaggctacagcaggagaatcgcttggacccaggaggcggaggttgcagtgagctgagatcacaacactgcactccagcctgggtggcagagcaagactccgtctcaaaaaaaaaaaaaaagaaaatgttcaacagatacctgcttgatgaataaattaagaaagtgaggatcaggaaacaaaggatacaataaagggtaaaaagaactccccgtttcttggctgggcacagtggctcatgcctgtaatcctagcactttgggaggccgaggaggatggatcataaggtcaagagattgagactctcctggccaacatggtgaaatcccgtctctaaaaatacaaaaattagctgggcatggtggcgcacacttgtagtcccatctacttgggaggctgaggcaagagaattgcttgaatccgggaggcagaggttgcagtgagccgagatcgcgccactgcacttcagcctggcgacagtgtgactcctctcaaaaaaaaaagaaaaaagaattccccgtttctgatagagatagtatatgttatattgaaaaggcaatgagaccagaagacctgagttaaggcaactgtctttccgtgggtttgggggctcgtggcttccgtaaggtctacgcttgcctgacagcctgagctggccaggttcccagatttatctgtttcttgcttcttggtgactgagatttcaagatagccatgtgtactcctccctatctctggaggcaatctgtggctgtggtttcctcagttcaggctgaaagataagtaactgatggcttatctaggattgtcaatttctagttaaactggcttaaaataatctcccacttgtctgaacacatgcagactcagcattgaaaattaatggaggccaggcgcagtacctcacgcctgtaatcctagcactttgggaggctgaggtgggcagatcgcctgaggtttggggttcgagaccagcctggccaacatggcaaaaccccgtcgctactaaaaatacaaaaattagctgggtgtggtggcacatgcctgtaatcccagccactcggaggctgaggcaggagaactgcttgaacccaggaggtggaggtggcagctccgagcagagatcacgccactgcactccagcctgggcaacagagtgagattccgtctcaaaaaaaaaaaaaaaaaattaacatacgctagtgacatctcaaggacttctggtgatgtgtccagcctgcctgactgaaacttacctatgccatgtgtttgctaataaacatggggctgccttagtcagtgctcaaggttagcagcagcctcatgatcattttatgacagtagcaaaggtgaccgttggtggagatgccaacaagctctcattccccatgatagaggcctggggtcagccacagtgggtaatttgtactcacagaatatcttcagtctcaggagctccttttgggttccctgagctcctgacttttcaggttctagttatgtctaacttggtcttgactgctcatttgcgggtcaggacagcagaagctgtctgtttactacagtagatgtaattcgcatttttggacacaatgaccagtggagattacacaacccaaactgccctcattccccaacatgtgcatggacagagtgggatgaaagtgcgccagggtggtgggaagccccagggattctggtggctagcctagctgtctacaggatggcagagttcctcttgggcagctcatttaatccctccacgcagaactgttaacatctctgtgccattcttcagttaaatgagaacctaacgcaggcctgatgcatggctcagattacacagcggatgtgaagaggctttgggaacatatcctctctcctaaggacagggaggggatgctagtgtggggtgcctgcggtgttgcatgcaggtcaatgagaacagttaccgacacacagacttaacccgagtcctcaaagatgtgttttattattattttttcatcctttaaacatgaatctaaatgctggcttaaaatcaggattcatgcataaacggcttcccagtttattaacaatactggctgtgactttttgagttcagtgttgtgggccaggcacttaaattattatttcgaatcttgccaatggtactttacatttgagctcttgcgtaccctgccagagcaaggattataaccttaattttttttcttaccccagaacttatgctcttaaccctattcaatgctgtctctctctttggctaagaaagacttctgaggcagatggaaggaaggaaggaaggagggagcgatacaaggagaggctttccgattccgtaatacacctggttgtgcaaagttcacctctacatataaagtttttgttttccaagtcattgaaccggcgacatattctaccggccattttggttgtggcaaccccaattcccttgatttttttttttgtgacagcaaatggaattagagtaggccgccctgcccgggctttttaagaaaccccagcaacccccccgggtaaggagcgccgctctcccgcccgccggtccagggtgtgtgcggtttccagcacggcctcctccttcgccccactctgggttcgcgggtcggcgccggcggggcggggctcggcagggccacgctgccacgcccagcgtctccaccccctcatttaaatacgcggcgccggcgagtgcgtcgagctcgccgcggactcaagatggcggcgtgtggacgtgtacggaggatgttccgcttgtcggcggcgctgcatctgctgctgctattcgcggccggggccgagaaactccccggccagggcgtccacagccagggccagggtcccggggccaactttgtgtccttcgtagggcaggccggaggcggcggcccggcgggtcagcagctgccccagctgcctcagtcatcgcagcttcagcagcaacagcagcagcagcaacagcaacagcagcctcagccgccgcagccgcctttcccggcgggtgggcctccggcccggcggggaggagcgggggctggtgggggctggaagctggcggaggaagagtcctgcagggaggacgtgacccgcgtgtgccctaagcacacctggagcaacaacctggcggtgctcgagtgcctgcaggatgtgagggaggtgaggaggtgggacgaagccgggagggccaggcctggtgcgggcccgagggtgttgccggccttggaagccgctgacgccggtcggctgctttccttgcttcctctgtgctgcactcgctccttccctctttgctcctcactcccaggcgctttcagggaaaaggataccactcccactccttctttcccccgcccttatttccctccctgttgccggggtctgggacgaaaacctgggctcctggccgcaatccgccgaggcccagagcgtgtctgttcgctcctgtcttttgtgtgatgctctatgcagagtgtctcctcgccgaagatcagtttaggattttgccatcagtttcgactaggacaatttgtggcaagccatttaaacataaaaaaatgcctggcgtacttaggctgtaaagaatgatctgtttattagcagtagatgtaattcgcaaatccatatttttggtgctgaaattaatgtatgctttgttttcttcacttcctttggtcagttgtattgaaccccatgtttaagctgttaactcccagtg

SEQ ID NO: 6921 - DNA, 6000 bp, Homo sapiens
ccatgaaactccatttgtgattaatgttgtcatccagtaccctgtggaaaccatatcatatcctttctgttacagaggcagtggtaactcaacttccaaaaaggaaagattccaaagttgtccccagcagaaacacatgtgggagcctttgattggaaattgctacagcactgtatctccacataaatgactatgtctgctctttatacaggggggaagatcatttcctgttcgtatttctttctgagccattcttctaagtcagaatcatccatatttattttttaataatcttttattattcctttcatcttaagagtatttgaaatattcttgccatatcctgtctggcctaaaccttagtttactttgacttataccatgtggtccccaactctttaactgtctgtccttatcagccaggattctgggcgatggtaaagttcgcctgggtgcagtatgtcagcatcctgcttatcttcctctgggtgtttgaaagaatcaagatcttcgtgtttcagaatcaggtggtgaccaccatccctgtgacagtgatgccccagggagaagtgtgtaaggagcacttatcctagaaaggccgtttctgaagactcagcaggaccatggctgcctcattgtcatcttctgggaacgtcttaggaccttttgaaagagcccagcggacacctgcgggcttgtgtgcttttccctcagagacaacggttctttccagttttgctctacacagttccgtatcttcagagctcctgcagaattgtcagggactagtttgtggaaaggtctgagagttcctggaggctataattagctttttgggtttttcttctttgccttagcgttgaatttcaggagaaaattgcagtcagttcagacatcttggaaagagtcccatctctggtcaagcagagacttttcctctgttgaactgaggaacacactgtgcatttcttccttctgttgtgagccactcttactcttttcagggctctcttgtgacaaacatgccaatcactagcactttgcacccctgggcttctccatttcccattcacagctttgatttccagagctgaggcctttaactggagacctggaggggcagggcccaagggcaagggccgcattagcacaggcaatcagggagggccgctgaaggacacttggaccgtccacctgccccagcccaacagtcagtcatctgtcatcagctcagctgagcagccctggatccctgcccgactgtggctggctctttgcccggtttttccctctgtctgtgcccctggatggcaggctgaagtcagaggggctgtttcattctcagccccctcagcagcactgggggaagaaagcattgtcacaacaggttctttctggccctcacccaacagcctgggcacttggccctcctcctccttgacagccctcccccttcctgcaaaggacaggggcgacaggggttggtgttgggattggctcccgctgcctgacaaccacaagtttatttggaaggctagcgggaagcccagcggctggcgtttcccttgactaaggaaaagggtgcccatcagagtggggcgggcagctttgggaaggacacaagaagcagtgagggtgtaaagaggatgctggcctgggcaggccagtccagcctggccactagcagaataccaagcagtccagtggattatcctcgtggctaagcaagtgtctgcaggagcagagatggctggaaggggcctctgcacacggaagatggcttgttcagccgattcacctcctgaggatgcgtgcagtctcctccaagaacacatggagctgcttcctgatcccaagcaggtcgttgcccctggaaggacatggctccggtgatccatgcttcatgcccacccagaaacacacccctcagtgtgtgcctcagtttaccttggagatcatttttcatctccagcatccgtttcctttaggctgactaaaaacagttttggaaacaaagctattttgaagtattcaagcagaggaattctctaacactgtcccccttgtctttttttaatattctggctattttagatgcctaaatttttttcttgagatttatttatttttatagatggggttttcactatgttgcccaggctggtcttgaactcccaacctcaggaaatcctcctgtctcagccccacaaagtgccaggaatataggcatgggccagtgtgccccgtctcttgagactgaaatgaaaaattgcttgtggtttaaatccccagaatttaatgaaacatgggaagatggctaaagatacgtataaactttggtttgcattttattaaattatttgaatgcaaaacttgtataaagaatccattatgttctgtagctttctaattaaaatgttcaacatggaaggttgtattagctatttttgaagcaaggctttggagggaggaagaatagggagggctgaagttgagcacacttctccgagttactcaccagtagccttgctttgccacggctctgcccaaagaccttggagcttttgttagctctttggcaaaagtttcctggtccaaccccaagtatattagtttttagtggaatccacatggcatatgggagctgcgggttggaaaattacaactgtgtctggtgaatatcaaattatttacggatcatttattggtagtttctgaaactgaaccacacagcatagttgcaggaggaagaaaggtaagaaatacacaggattttatcaactgagctgaagccatagataagtcatatttgagataattattgaatttgttttgtgggagagaaatctctaattcttccaaatgattagtccagtttctgccaaagcaggtgaggtgtctaatgccccactgagtgcccatcttgaagcttattaaagcaattctctctctttgcgtccctcttaccttatcctccacatccttgccccctctccttattcatgctttgtaaagaggttttggagctttctggccagataacttctaaatactgattaaggaaatgtaaattacatgatcctaaggaaaataatgattgccggccaatcccctacccagagttatggttggccttctggcacacatctttctatcccatacactatttctaactttttaaaaatcatgaacaggccgggcacggtggctcatgcctgtaatccgagcactttgggagacagaggcgggcagatcacatctgagctcaggagttcgagaccagcctggacaacatggtgaaaccctgtctctactaaaagtacaaaaattagcctggcgtggtggtgggcacctgtaatcccagctattcaggaggctgaggcaagagaatcacttgaactcgagaggcggaggttgcagtgagcctagatcctgccattgcactccagcctgggctacaaaagtgagactccatctgaaaaaaaaatcagtatcaaaatcatgaacaacacttatatgaaccctgtacataaatccttgtttctggtttatttccttaagatagctcctagaaaggaattaccaatccgaaaagcttacgaccattgtcaagaatcttaattcatcttgccaaaccacaaccaggaaggactgcttatttcttctcccagcagcagggagttcttgattaagatcccatcactaatttgacaagacctagaaatgcttcatccttttcaggtgcctgggctctgccctgttatttgtaaaggggattttttttttttttttttttgaaacagtttcgctctgtcgcccaggctggagtgcagtggtgcaatctcagctcactgcaacctccgcttcctgggctcaagcagttctcctgccttagcctcctgagtagctaggattacaggtgcctgccaccacgcccggctaatttttgtatttttagtagagacggggtttcaccctgttggccaggctggtctcgaactcctgacctcgtgatccacccactacggccccccaaagtgctgggattacaggcgtgagacaccgcgcctggccggattttttttttttttttttgcgagggagtctcgctttgtcgcccaggctggagtgcagtggtgcgatctcggctcactgcaagctccgcctcccgggttcacgccattctcctgcctcagcctcccgagtagctgggactacaggtgcccgccaccaggcctggctaatttttttgtatttttagtagagacggggtttcactgtgttagccaggatgatttcgatctcctgacctcgtgatccgcccgcctcggcctcccaaagtgctgggattacaggcgtgagccaccgcgcccagccctggccggaaatatcttatttattgaaacgtatcatgtctttatctggacctgctatgaacctgcgcctctgggcctaggctagggcagggaatgcgcaggaggaggggaaaagctgcggacccagctcctaaggccacctggtctctccgctcttcccagttgggacactgcaccgggtccatgtgtcatccaggtgccgtggccttgggaagggtttggattccaagtcacctcgccgcaaggatgcccccgagagtgaggagggtcaagattaagattcgacttccttcactagggcctttgtcctcccaggagccccccttctctggggatttggggtggggtggggtacaacgttcctctgtagtcagatgagaggtgactctgccagcgccctttgacattctgggctaaaagttgagcctctcagagccccagcccacctgggccctcctgccccgccctcggccggcgcccctcccccgaggcgtggcccctcggtcgggggtgggccaaccggctccttccttcccccacggcgctagctcccgctggccacctcgggaccgcagccacgtctgaaagcgcctcattgtgtgcgctcgggcgggctgcaccgggcagcgccgagggttgccggccggcgcgcggggagtagagggcgcgggccgcagtgccgggttccagagggagctctgcgccgggtccttccctgtggtagccccaggacacccccagcctcaacatcccattctgggactcctgccctgttcccacattcgttctacctcgagtctccaggagcttccagtggcttggtcaccgccaactctcgtccatgcctcttagagcccctttcccggcctcaccgggtgtcgcttaatagtcttgggaccttaaggagcaagtcagcccctgcggaccctcccagtgaagagaaagagctggctgtgcggtggaatttggaagagacgacgtttgggagcctttgctgagtccagggagagaggcgtcccccaccgtgccgctgcagctcgggcagagccgccaagctttggggtacgttggttcttcattctccgcgggggatgtccccacactcgggtcggctgggggccgggctggtggcacagctggggacgctcctctgtcctgcaccggggacctggggtggcgggaagagctgggagtggcttttccatcagcaacgtggaaagggcatcgccgctgttggcgccggtttggaagtgtcttgctggggcttcggctgcgcaggagaatcctcactgcgaggggagaaccccttttgtctcgatacttgagtttcaaaggacatgactttcaaaagctctccaagggctttttccatagaattattgagagacggtagcttggcgggttgatttggaaccagacccaggggaattggagtcctgcgtcactgcttctgacggcttcatcttgggcttcaggacaggccctctgggcctcaggacaggtgcctagcaaatgttgactttcctttctcctccctttttcacagaggcaaggcagtcaagtttcccatttttgaggatgggaaaactgaggcctgaagagcagaaaggagttggctgactta

SEQ ID NO: 6922 - DNA, 6000 bp, Homo sapiens
ggtggcaggtgcctgtaatccgagctactcaggaggctgagagaggagaatcgcttgaacctgggaggctgaggttgcagtgagccgagatcacaccattgcactccagcctgggcaacaacagtgaaactctctctctcaaaaaaagaaagtcatccacttaaagcatagatatagtgtgtcagaatcaaaccatagatttaaccttaacaattgctatatttaagaactatgttgaggctcagtgtggtggtcccagcacttcaggaggccgaggcaggtggatctcttaagccccagaatatgagatcaacctgctagcctgggcaacatggcgaaatcccatctccaccaaaaaaacaaaaacgaacaaaaacctatgttgaggccagatacagtggctcacacccgtaatcccagcactttgggattactcaagaaggatacttgagcccaggagttggagaccagcctgggcaacatgacaagactttgtcacttaaaaacaaaatttttttttagatggaagcgcctaggctggagtgcagtggcacgatctcagctcgctgcaacctctacctcccgggttcaagtgattgtcctgcctcagccaaaaatttttttaaaaattagccgggaatagtggcctcagctattcaggaggctgaggcaggacaagtacttgagcccaggaggtagacagagggagaccctgtataaaaacaacaacaacaacaaactacattgccaccccagaaaagcttttaatcaagaacaagtagtattgaacctgatatttcaaaagcattttgtggctgatgacgttgtcgtcttggactgtagtaaggaccctaggatggttttcccaaatgggcagtcttgacctctctattaagtctgtgatgttaggatgtcagctgttctcttcatctaaaagccacttcgaggttgctttcaaagtagtgggagtaactactggactccacccagcacaaacctcacgccatctcctgacactgcaatgtgatccttcagggcttttttttttttttccctttcttcagacagtctcgctctcgctctgtcacccaggctagagtgcagtagtgcagtcactgcttactgcaacctctaactcttgggctcaagcaatcctcctttcttagcatcccaaagtgttactggaaaggggtcccaatccagatcccaagaaagggttcctggctctcaacacaggaaagaatttggggcaagtccacagagtaaaaaaaaatggctactccatagacagagcagcagtatgggctactcgactgagtaaatttatagttatttcttgatccatatggtaaacaaagggtagattattcctgacttttccaggaaaggggcagagatttccccagaactgagggtccctcccctttttagactatatagggtaacttccggacattgccgtggcatttgtaaattgtcatggcaccagtgggagtatcgtttagcatgccaatgcattacaatgagcagatcatgagcagtgaggacgaccagaggtcacactcaaggccatcttggttttggtggcttttgactggctttttttcttttttctttcttttttttttttttctctgagacagagtttcgttcttatcacccaggctggagtgcaatggcgtgatctcggctcactacaacctccgcctcccgggttcaactgattctccctcctcagcctccagagtagctgagactacaggtgcccgccaccatgcccagctaatttttgtatttttagtagagacagggttccaggcatgagccaccatgcccggccttggctggcttctttttaactgcatcctgttttatccacagggtctctgtaacctgtatcttgtgccatccttctagctcatactgtgactaagaatgccttacctcctgggaagacagctcagtaggtcccagccttattttacttagcccctattcgagatggagttgctttggttcaaacacctctgacaaaagtgctaagatgagccacttcacccagcctcaacagcctcttgactggtctccctgacttctgtttttcctcacccctcactcaatgaccccatcctggtatactgtaaacctaaaataaaattctaagctcccaaccatctgaatggaacccttgtctcagccaagggcattccaaagttaacctgaaaaactagtctggccatcatgggaagtggggagtcagacgtaactcattataccctcctctttttggaattcagacccagctgaccagtattagcatcaacacatagatcttaagactgatattaatagaacagactcttaaagtctgataagaaacatttacaatctgttctctctgaagcctggaggcttcatctgcatgataaaacattagactccacaaccccttattgttttttgtttttgttttttttttgaaatggagtctcactttgtcacccaggctgaagtgcagtggtatgatctcggctcactgcagctgctgcctcccgggttaaagcaattctcctgcctcagcctcccaagtagctgggattacaggtggacaccgccagatgcagctaatgtttttttttttaatacatatttttggtagagacagggtttcaccatgttggccaggctggtcttgaactcctgacctcaagtgatctgcctgccttggcctcccaaagtgttgggattacaggcgtgagccactgtgccccgcccacaaacccacacattcctttctattgattccaggtctttagataataaccagttgacaattggaaaaatctctgaatctgccaattctgtggtctggaagccccaccccacctccacttgtctcatctttcagtactgaaccaatgtacatcttacacgtattgattgatgtcttatgtctccctaaatgtataaactcaagttataccctatccaccttgggcgtatgtcatcaggacctcctgaggctgtgtcacaggcatgtccttaaccttggcaaaataaatttctacgttgattgagacttgtctcagatacattttggtttacactactgacatgctgtcattagagtgacttttccaaatcacaaagcttatcatgtctttccacttaaatgtcattttactgaccctttaacaaatttacttatatttaaatattttgtatttatttttttagagacaaggtctccttctgtctcccagcctggagtgcagtagtgcattcatggctcactgcagcctcctgggctcaagccttcctcctgcccaggcctcccgagtagctggacctacaggcatgagccactgtgctcagccactcaggacctttttgttgttgttgttgttgtttgagatggagtctcgctgccacccaggctggagtccaatgtgtgatctccgctcactgtaatctgtgcctcccgggttcaagcgattctcctgcctcagcctccagagtagctgggattacaggtgcccatcaccatgcctggctaatttttgtatttttagtagagatgagggttcaccatgttggccaggctggtcttgaacccctgacctcaggtgatccgcccaccttggcctcccaaagtgttgggattacaggcgtgagccaccgtgcccagccattcagggccatttgatgaagaaattggctgtggaccatagatttttttaaaaagtccttctaccatgttagaaatattggttgggggtggtggcgggggggtgtaggcattcaattaagcaataagccagtgatctttggggaggaccatatattcctgtaaaactcgcggctgagctgtacccaacacagggttaacgaagtgcatcagagctttgtagtaattccactctatccgtggaagagccaggggatttgtgtttccgtgtctgtcttgcatgggagcatagtggaagcaacagaaaatctgggggcaaaagcacctggctttgatctcagcccaggaccaggtccaggaccacggccaggcttgtgactgactggacttcagtaggaaccacactgggggttaacagatgacacaaaagcaggtgttcgttctgtgcgggagacgcgctaggggagaagaaaaggcacacacacagtacctttaagggtaagcaagctttatcccacgtaaatggcaatgcagatattataataagcaaattaatataataagcagattgatataataagcaaattgcaatgggaagaggagaaggaaaaagacatatatatatatatatttacactcaccagactatggaggattcacctccagactgggaagcaacgacctgggctccagagccggccactcgtcagtgcacagacgaggagaggtctcatgaagctttttggcgtggtctgggaccctagatctttttgtaacatgttgtctagcatgaggcccagtcacgagggccctttgcgactgggctcaaggaacacaaaaaggtcaacttgtttttgcgattgttgtttttcaataactgacgtataggagtagactgaaatagagatttctccgaaacagcgctggatgaacgcctcaaggggctcccacaacctgtttagggacttggtgaccattgtttgtgtccatgtcagttgaaatttaaatatttagttcttcctcctcagtgttcaagtcaacttttatgggcatcttattttacacaaatgttaacacagacaacagccacgactctggtccacggaaacgttctatcgccgcccagcctttacgcaaacgtacacagctcgaaaagctaggccgaccgtccccggcagcgccacgcccgctaaccccgcccccgccactggctcctttcggtgcggccttgctattggctcctttctgtgagccgtcggttgccgtggagaccgaggcgatggcaaccaggagaagccaaacttggtcccccggctcgcggagtgcctgcgagcggtgctcatggcgctctatgagctcttctctcacccggtcgagcgcagttaccgcgcggggctctgctccaaagccgcgctgttcctgctgctggccgctgcgctcacgtacatcccgccgctgctggtggccttccggagccacggtgagcctgccccggccgctgtgccacgaggctccccgggcgcgctcggccagggccggcctccctaaccgcctccctaccgccctctttaactcagggttttggctgaagcggagcagctacgaggagcagccgaccgtgcgcttccaacaccaggtgctgctcgtggccctgctcggacccgaaagcgacgggttcctcgcctggagcacgttccccgccttcaaccggctgcaaggggatcgcctgcgcgtcccgctcgtttcggtgcgtggttcccgcctgggcctggggcagagtcggggatagggtggggatggggactggaatgaggatgtggggcgagcggccccggccctggggagcccagctttgatcctaaggactcgcgaacccgcaaaggtggcgtttcatctcctaggacctagggaatcgatcttctgtttcattctgcttctcccagatgtccccggcccccagaaagttagccatgctgtcagcgtgtgcgccctgacacagagtccagaagtgtgggggcagcctgtgtctgcccgggtcacacccgcgggcctggcctgatggagggtgtttgtgaaagtccatttaggagcctggaaggccgcgcgctgttaatgtagataaccccattctgtcgcggcgtttctgcatcacaccactataggaacggaaagggcagcatttttatgcagacctgacccctggaaaccaaggcgctgattggttaagcggccttcccagaacgcgctgtggccgagtcacgcctccctgggtttgtcccattggagactgcgccatcctgaagctgtcggga

SEQ ID NO: 6923 - DNA, 6000 bp, Homo sapiens
agcaactgaaactcagtctggctggggatctcctggagccggtgggaacacgcctcagagttatcttcaggagtcagggcattgattcaccaattctgctcagtcaaggttgagagtttctcctgagaggtgctaacttccaggcacttccatcctgtcgcacatatgcagagggaggcagagccacagatgtctgcatggcaggtgtgtgggttagggtgagcactgatagtgtctgctacaatcctcaagagataactcagcccaggctaaagcatgcatgcaagaagatgttcaaagttgtgttgagaaatgagaaacagatgactaaaatccacatgacctgtccagcaatatgggactgatttagcaatgtccatttagtaaaaggaggctctgccaccaccatgtcaatttcaaagcccattagcaacatggaaaagccttcctgtctaatgctaagcaggaaatgcttatgaactaatcacagacactacagtagtgcctgggaaaacacctgtcttcaagggaacaaggtgtatgaaggaaccctgaagaaatgaaaatgtgttagggtaatgggaccatgggaattcttctgctgtgttctctttacgatctaaaggagaaccaagattaaatatgactgataaagccgccaattcctatagagaaatatactcctcttccccggccagggcttcctagattcccccccaaatagactccttgaggccaggtgcaatggctcacacctgtaatcccagcactttgggagaccgaggagggcggatcatttgagcccaggagttcaagaccagcctggctaacatggtgaaactccatctctgctaaaaatacaaaaattagccggatgtgatggcgtgtgcctgtaattccagctactcaggaggatgaggtaggataactgcttgaacccgggagacggaggctgtaatgagccgagacggcgacactgcaatccagcctgggtgacaaagtgagactgtctcaaaaaaaaaaaacaaaacccgaaaacaaaaagcaaatagactccttgctcttaatcttggtctcagttggcttctgggggactcaaagtaagatgggaatattccccagactggaataactggaataacagggcataactatctttatggttctttttatggactcaatgccttattttcattttttatcttttgagatggagtttcgctcttgttgcccaggctggagtgcaatggtgcgatcttggctcaccccaacctctgcttccctggttcaagcaattctgcctcagcgtccccagtagctgggatttcaggcatctgccaccatgcctggctaattttgtatttttagcagagttggggtttctttacgttggtcaggctgagtctcgaactcctgacctcaggtgatccacctgtctcagcctcccaaagtgctgggattacaggcgtgagcctctgtgcctggcctcaatgccttatttaaaccaaacttgctgtctttctgttttcatattgctgatcccacttggaggctcagacagctggatcagatcactggaaataatgctcacagggtccagccatgtcctgactactttcagtggagcttcatgcacacagaggttaagggacattgggagctgatgtcaacaagaagaacactgtgcccaggagtctgcaatttatcagaatgtaaagaatgtgaacatggaatttagcctgcagatttgcatttgttatcaaatgtccccaagcaacttccattagggacataaattaagcctttaccctttctattatcactgcgtgtgactttccacagagttttcgaaggaaagttattagaaggttgacctctagagataacaggcctgttctgctcagcctgtgtcctagcctgagtcagcaacgatcctgcatcctatcctgggctctagccctttcccattctctgtctggcagggtcactccagaaggattgcagtggtttctaggaaaatgacagaggcaacagggtaatctccagggaactgggagatggggccaggctggcaaatattccttgagtcttattatgagccagacatggggtagacagagattaagagatgtcccttccctaagaaattcacacagtaaaacaacccaaatgtctatcaaccgataatagataaaatgtggtttatccataggatgggatataattcagccataaaaaggagtgaagtacatgctacaacgtggatgaaccttgaaaacatgatgctaagtgaaagtagccaaacacaaaagtccacgtattgtatgactccatttaggtgaaacatccagaataggcaaatccatagagtcagaaaatagattagagatacaaaaatcagctgggcgtggtggcacgcgcctgtaatctcagctactcgggaggctgaggctcgagaatcacttgaacccaggaggtggaggttgcagtgaaccaagatcgagccactgcactccagcctgcatgacagagcacgactccgcctcaaaaaaaaaaaaaaaaaaaaaaaaaaaaaaagattagaggttgccacgtgatagaggaggggcaatggggaaagagaaagagtgacttatgtcagagcaagttaacggtctaaagccaaatattagacaactgcattctctaatgtctctggctggaggaattatataccttacaccttttctgaacactccagggtctcaccacattgcaagtctccctctgtaacctcagattactaatttcttatgcagaccacatcatccaactatgggcttttatttttatttttttgagacagagtctcattctgtcgcccaggttggagtgcagtggtgtgatctcggctcactgcaacctccgcctcccaggttcaagtgattctcctgcctcagcctcctgagtagctgggatcacaggcacatgcaaccacgcctggttaattttttgtatttttagtagagatggggttttgccacgttggccaagctggtctccaactcctgacctcagggtgatccgcccgcctcggcctcccaacgttttgggattataggtgtgagtcatctcgtccagctcttgtatgtgttttgttgttgttgttttgtttttgtttttgtttttgtttttttgagactgagtttcactcttgttgcccaggctggagtgcaatggcgtgatctcagctcactgcaacctctgcctcccaggctcaaacaattctcctgcctcagcttcccaagtagctggcattacaggcatgcacaaccatgcctggctaatttttttctgttttgagtagagaccaggtttcaccatgttggccaagctggttttgaattcctgagctcaagcgatccacccacctcggcctcccaaagtgctgggatcacaggcgtgagccaacgcgcccggcctcttgtatgtttcttatgagctatattatacacatacaaataaatatttagatatgtttttatgcaaatgggactgaattatatacaatatctcatacttagcttttaatattaacaaaaatctcaccaggtacattggctcacatctgtaatcctagcactttgggaggctgaggtgggtggattgccttagttcaggagttcgaggccatcctgggcaacttggtgaaagcccatctctactaaaatacaaaaaattagcagggcgtggtggtgcctgcctgtagtcccagctacccgggaggctgagacgcgagaattgcttgaacccaggaggtggaggctgcagtgagctgagattgcgccactgtactccagcctgggcgacagagcgagactctgtgtctcaaaacaaacaaataaaaaacaaaaaccttagggatccttccaaatttgcagaggaagaatttgttcattttaaaagtggttatatatgatagaccatgttttgtgaacccgtttcctatcaatggacatttaggttgtttccaatttttccttcttaacaaattctgccaagaataatcttattcatatggcatttcacacatgtatgaatttacctgttggtgtaattcctagatgtgtaattgctacattatagagtttgtgcttttaaaatttttatggatattatcacattgcccacaatagaggttgtaccaatttaccaccagcaagcagagagacagcttgtttctccacatttgggaggatgtgtttggaaatactctcggaggccagaccatacaaagccttgtatacaaagctaggaaatttgaacttgatccatggaccatggaaacccacgggaaggtgtaagtagtggataaggatggtcagttctgagcttatgacatccaataaattttttaggggatttttattctccagcaggtatgggtgatgaataatgtggtgaatcagagaggggaccaaatatctattaggatttcagccacgctggggagagaatgggtatcatttgggcacagctgccgctcggcacaatgggcttggatataaaagcaacttggtttctttaccgtcttcctgccttcctgccattctccaaccttcctcccatttttcttttatcacacacttcccacatgctgatggctttgcacgaaacatacagccctcagggtaatgacataaaaccaatagcaaggactttttatccaccgctaacagttgactgaaagataagcagacaggtgatatagcaactttatctttcccgagaagaccatctgacaaattaataggctttggagcaggcgtggaacaaagagctgggtgacgcaaaaacgcagacactgtcaagctgagccttttgtttcttcaacaaaaggtagctgccattatgtgatgcaaagacagaagggaagatggatgacgggtggatgtgagggcacccgcatatgaaagtcccaagagcgagctccatccagaggccccagcagtggttcaagcatgagtgcagtgggcttggtactcctggtgcttgctctgaggcttagggccaccactgttaagccagaggaaggcagcttttgctctaacagccaggtggccttcagagatgcttgctatgaatttgtgccactcggacgcaccttccgtgatgcccagagctggtgcgaggggcaaggaggccatttggtcttcattcaggacgaaggcacccagtggtttctgcagaagcacatctcccaggacagggaatggtggattggactcacgtggaacttggcacggaatggaaccacggagggtaggtgccgtgatcgctgttttatgagaaacttgtgtttgcaattcttgccatcacttctcacccaaagaaacatggaacaaattaatacgacctaattctcatggtatggatacccttccctttggttgtgttgtggattaaataattcatgtctaatgcctagcacagaatctggcacatcaaattctgaccctctagaaatgttcgcttctttgcctgttcctaatagtaatactctgactgctttgattcttgctaggatagtgccaggcactatcctgagtgcttcgttgtcactatcatgttgaattcttacaataacaatgagaaaaatcatgtccccattttttatttatttatttatttatttatttatttatttttgagacagagtctctctctgttgcccaggctggagtgcagtggcacgatcgcggctcactgcaacctctgcctccctggttcaagtgattcttctgcctcagcctcccaagtagctgggattacaggcagatgccactatgctcggctaattttttgtattttgaatagagacggggtttcaccgtgttagccaagatggtctcgatctcctgaccttgtgatccgcctgccttggcctcccaaagtgctgggattacaggtggtagccactgcgcccggccttatgtccccattttacagatgagaaaactg

SEQ ID NO: 6924 - DNA, 6000 bp, Homo sapiens
ttttaaaaattcatatatgtttaatgagtataaagccaagcacaggacagtcgtgaattcagtagaaatattctctgttattcctggccgcgtgcagtggctcacgcctgtaataccagcactttgtgaagccgaggcgggcggatcatgaggtcaggagtttgagaccagcctgaccaacgtagtgaaaccccgtctctactaaaaatactaaaattagccgggcgtggtggcgcgcccctgtaatgcccgttgctcaggaggctgaggcaggaaaatcacttgaacccgggaggcggaagttgcagtgagctgagatcgcaccacgacactccagcctgggagacagagcaaaactttgtcacaaaagaaaaaaaaaaaaatattctgtgtaattcctatggtgagactgaaagggaagggaggcagctctagaacccactctggaacgtgcacaaatagaacttccacttccacagcaagcccccctgcgagggcgatgtgctctggccagccccgcacagcgccactgttgagggcgggatgatggtgctgcaggcatggagacaggtgctcccgggggagggggtgggcaggctcatggccttcccgtggcgtgacgttgacacccttcttcagtaagtgtttgctcaggtggttgtggaaatacttaggggggtgacctccatcagtgagttggatgggaacacacagtggggcaggacttgtgtcatcatgctttgtggacagtagtttccgcttatccacagttttgttttctgaggtttcagttacctatgatcaatcgaggtccgaaaatattcaatggaaaattccataaataaacagttaataagttttaaattgcacacagttctgaggagtgtgatgacatctcgcaccatcccactccctcctgcctgggattggaattctccccatgtccacagcttctgttcaggtaacccttattttacttcgtaatgtccccaaagcccaagagtagtgatgctggcactatggatataccaagaagctgtaaagtgctcttttaagtgaaaaggtaaaacttctccacttaataaggaaagaaaaacattgtatgctgaagttgctgagatctgcagtaaaacaaatctctccatgacattggaaagaaggaaaaagaaattcatgctagttttgctgtcacacctcaaactgccaaagttccagccacggtgagtcccaagaccatccaccggaggtcttggaacatgtcccctcggataagggagcactaccgtaggcactgcaggctgtcacggtgttgtcgaggataaggcatgtgtgacactgttgtcacacagctgataccctaggctgtgcttgttggaacagtttacctgctcactgacccagaagctggggatgcaggtggcatcctcagcctcctcttgcctcaccagcccgtgctgtgtagctgctgcagcatgtcaccacagtggcattgaccgtctgtcccattccctaagccactggttcctctttttcctggggctgctcaggcaggggttctccatgccttgaggatcacaagaagcttgcagttgccagggtccaggctgttggcagggattgagaacctcagtgcgatgggaggcagatgatggggagatgggaggggctggagccagatgtgaaaaacccgttattcagcagcttctcaggggtttgggagtgctgtcggatttgaagtatcttctggatgagggaggtggccattgggtagctgtgcttgggaacagtgtgtgtgttcttgaccagaggtaggtctcttagacaagaggtttcagaaggtggtttgcccactaacaaggtatatgtgatgtacccaagggaccacacatccaccttgaaacggtgccctttctttcccagcaccctgggagttacataatcaggagtcccacccagggtcttcctctgccttccatcatgttcgactttggttgccagtccagatcttcccgttttcacctccaggtcatcattcaggaagagggggtacagcttgaggtcccggtgactaatccagtttcaggcaggtgccggcagccaaggatgatctactgcgggcagtagtgccctcaggcttagcgctctccccgtgtgcaactccatgagaggtctcaggtggcagagctccagcaccaggagcatgaagttgtccttgaaaaagccactgacacctgagatgtgctggtgggcgaggctgcagtgagtatagcgagaggctggagacgtctccagggacgtctcctctgggtgcggattgagcagcagtgactcaggtgcgatcttgcccgagaacacctccttggtgtttgcctccaagattttgatgctctcagcaaagccacccttgccaaaaaagcagcctgcctgtagtgccaccggcaggtttactaggacctccaagatctctgcagagtggctgctgggactccaggagccacaactccagggaggctttcccagggttggctagtgcctgtgccatcagctattactctttaaaataacatttcatttgaataaagatttaccttcccatggaattacagatgctttattctgtatgtgaagcacaagtttaggaagttattttagaaccagagtggtgggaatccaccagtggtagaccaggatcctgtagctcaggctgtcttggtagctctccaagtaacttctctcccacacaccagtcccctcagtgtataggcattctctgaaactggtggtggtggcattctctccccttctttggggcctcgctgtcacatgatggatgcctgcaatcactgttctaccccagtttccagctgtagggccatgtattcaatggcatagtgactaaagggctgttcagagaaccctgaccaagattaatttacctaaagttggaacagaaggacatagtcaagtttaaaatcaaatgctttgtgtggtggcagaagggagtgcctttgacggtttgcaaatgcagagaggcaaggattctccaaaagttcagaaaatcgtatgagatctgagtcaggaaaggattcaagaatccaccaccacatattgaatcatataggagccgagcactttatgagtatgctttttgtttgtttttgagacaaggtcttgctgtgttgcccaggctggagtgcagtggcacaatcatggctcactgcagcctcgacctcctgggctcaggcagtcctcccacctcagcctccctagtagctgggactgcaggtgcacaccaccacacctggtaaaaacaaaaccaaacacaactatagagacatgtctctgttgcccagactagtctcaaactcctgggctcaagtgatcctcccgccacagactcccaaagtgttgagattacaggcataagccactgcgctagggcttatgtgtgtacttaatttaaccctcatcctttaaggtagatattagtacccctattttttaaaaaaattatttatttatttttaaggcagagtctcgctctgtcgcccaagctggagtgcagtggtacgatctcagctcactgcaacctccgcctcccaggttcaagcgattctctgcctcagcctcctgagttgctgggattacagtcatgcgctaccacactcagctaagtttttatatttttggtagagccggcgtttcacccatgttgaccaggctggtctgaaacttctgacctcaagtgatccggctgcctcggcctccccaagtgctgggattacaggcgcgagccaccccgcctggctagtacccctatttttgtaatgaagaagctgaggtacaaagaggttaaacaacctgctcaaaattacgaagtagaagcctgaggtggggtatggtaatttgtgattctacatttatccaccatattaagtcaactgtgttaaatcatgttgaaggaagatgatgcgctgtgatctgtaatattggtgcagttcagcattaccgtggtgcagtgtcaagttccaaaagacacaaaactgtctgatcggcctgtagcgcatcaccgcccaccagcagtacctgaagacgctttcagtcccctgctagtgccgtacggagtccgggctggtccatttacattgaaaacaaactgatcctagcatctaagtcacccagacatcttttaggcggcaagcttttcagacagtttaacacatttattcttgttttttcaaaaagagcaaacacgtggcgttacaaaggtcctccgtttcgcacgcaccggtgtcccggcagcgcgctgcgcgtcgggaggcccagtctgtcgtcccgtggggccgggggtcaggaggtcgggcaggcgggatttggggtttcgcgtgttccggaccggacacttcgccatcttaacgagctaccgcccgggttaaggggcacccagggcaggtgcccggccgggggtggggtgtccgagccgccggtgcctggacgtggacccctgcaggaagggtccgcgcgggaagcgagctctccacgagtccatgacagcaggcccgcgggggcagggagcctgcgccaggcagtctttctagatcctggcccagcctggccgctttcgcgcccgtgctccttttcggggatcctagagcgacgcgcagagcggaccaagggttcccccagcgcgttctcgccgcctggcagctcgctggccacgcccctccgcttccaccctgccaccggcccccgccgccgcaaatgtcgcgagaccttcgtccatcctcccggcgtggtcccgctgcccacggcgtccagagcgcgcacgcaagccccgggagcgcgggacagacagggcacgctgggtcggcggagctgaggctcccagctgtgggcctcgctggcccggtcgcccagtctcgcgagagttgggagtaaacagccccgaatggagtgcccaggcgtgttcgccgcggaggcgccgttatcccgggcccgccggccctgagctcccggcggcgcaggtacgtcagccgcccgcgcgcggcctccccgacccgctccgcctagcggcggcggcccgctcgctcaggtgtgccggttgcgtccgaggccccgaggcgagggctgcgggggccgggccgggtcgggggaggtgggcgcggggcctccggcgcttgtttggacacagcgtgcctgtaccgcggccctgcgggggtctgcgcgctccggcagcttgttccgttgcctggttttctttacgtgaaatgagcattcaccgagtgaaacaatacgccctgctctggcccggagcctccagacagactcaattctaggtgcgcttccggggcagtgctggcgtcaggtttaaaagacgtcgattctttgccttatctcggtctgtgcatattgcgctgctggtttttggaaatgcggggattctgttcggcgaactctcagaaccagattgccttttaaacctgtagcttcttaaaaatcttgcctcgccttggcatggttgcgctacctaagaccgttgtggatcgtcagtatttttattaagatgtttacctttcatattgggttgagcccctgagaatcttggcctatttgtctacacaaattaagttattagattctgattgacacttcgaaattacgtggagtggaatacgacctgcgttgaattctggagactcatcctttagtctgaactgtgtaggtaagccctcctaacgtcaaggtctccaattgtatgtctacgaaaaggagggcttgcagaagagaagtaattcctctcatttttttttttttcaatctggagaatccgcttttattatttatacttattttttaatgtaagagcttcattgaagtagaatttacataccataaaatccacctgttttaagtgtactattcagtggtttttagtaaatttacagcagcacagccactaccaaatccacttttagaacatttccgttaccccaagacctc

SEQ ID NO: 6925 - DNA, 6000 bp, Homo sapiens
ctcattgcccctttctccatcttcaaagccagcagtgtctgattgagtgcttcctcacatcactctctcacactctcttttctgcctccctcttccacatttaaggacccatgacgacattgggcccacctgctgaattcaggatactctcactacttaagatcagctgatgagcacccttaattccatctgcaaccttaattcccctttgccatgtcaagtaacacacgtgcagcttcaggaactgggacatagacatcttctgaggctgatattctgcctctcacagggctcccccttttcttgctccattttgtgggacaaagacaactccctcttctgaaggacacttcaagaaagagccaggccttggtgacatctgactaagaaggtaagagctagatgtgatcacatccaccaatttggggacttggggtcctcctaccaaaacagtacagagagatatgctcagtctaattttgatgatgatgatggttgaggtattaggtacagcagggcgagttctatgggctttacagaagttaactctgggtcaatgggaactcttcttcttcctgtggcttcctctgctactcctcctcacccatagcccaatgcagccaccagccccacttctacatgatgttacaaggccagcacccactaccatgccaaagtctccatgtctttgggtccaaattctcaggagagagagagagcaaatttgattggttcatctcagcctatgggtgaagccctcttagggtaggtgtccttcctttgtctgattggacaaaaaaatcttggttctatctgattggctggggccaggaggcggtgtactggctataaatacatctgtgataggcagaataatgcccccccaaccctgcaaaatgcccatgcaacctgtaaatatggaaataagttcctttgcatggcaaaagggactttgcagttgtgattaagaatcttaagactggaagacaatcccaaattatccagggggctcaatgtaatcacaagtgtccttacaagggaaagaggaggaggagaatcagagatggagataagagcacagaagcagaggtcggagcgatgtaactgcaggctttgaagatggagaaggggccacaagtcaggggatgcaggaggcctctaggagctggagagggtacggaaacggagtctgccctagagcctccggaaaaatcccagtcctgccaacaccttgactttatccctgtaagaccccttttagacttctggcctccagaactgtaagagaatacatttgcttttttttttttttttttttttctgagaaggagtctagctctgtcaccaggctggagtgcagtggcgtgatctcggctcactgcaacctccgcctcctgggttcaagtgattctcctgcctcagcctcccaagtagctgggattacaggcacgcaccgccacacccagctaatttttgtatttttagtagagacgaggtttcaccatgttgtccaggatagtctcgatctcctgacctcgtgatccacccaccttggcctcccaaagtgctgagattacaggcagaaaccaccgcacccaaccaaatttgcattatttaaagcttctacattggtgttatttattactgcagccataagaagctcacacgtagtcactatggctcatcccttgatcagaaaaatgtggcagaagacatctgggtggggcatttctacgtatgcctcgagttccaggcttccaggacgccaggaggatgggagatgggttactggccctgattagctgaggtcaagtgtccatacccgggagggacactgggtacaagaagacagtagcactaagccaaaaggtggctgggacttcacaaagacctgaagaagggcttagtggatgccctggggaaagggctgacgggactgaacaccaggctgagggaaaagtcctacaacctgggcaaagtgtattgacagaaggcactgagctgtggaaagagcactggactgtgagtccacactgagcctggcagtgccatccactggctgggagggctcaggcagggctctccccttcactgggtctgagttcctctataggtaaaatgagggacctgcactaggtcagtaaatcaagccttcttttagaaaagtttttgaacagcagactcctgtatttacctaaatctttcttgggtaatttggggaaaaaaaattgctaagatggtaatcatagccgggcacggtagctcacacctgtaatcccagcactttgggaggcagaggcaggtggatcacttgaagccaggagatcaagaccagcctggccaacatggggaaaccctgtctttactaaaaaaacaaaaattagctgggtatggtggcaggtgcctgtaatcccagctactcaggaggctgaggatcaagaattgctcgaacccggagacggaggctccagtgaaccaagatcttgccacttcactccagcctgggcaacagagcgagactccatctcaaaaaaaaaaaaaaaaaaaaaaaagataatcataataatagcaagcatttgaatagataggactcacttttgtgacaggcagtcttctaagagccttatcaatgtaaattgatttgttcaaaactcacaacaaatcgatagatgctgtcatcttcaggtcacagacaaaaaaatttaaggcacagagaggttaagaaatttgctcaaggtcacccagcagggaattggtaaattcttgatttgaacccatatactcaggatccagagagaactgagaggaatggggataagttaggggagatttaaccagaaaggctaaatccagacaaataagaaacagctgagagaggtggggagacagctggggtaggaggaggaatcatgagctggaaagacaattctgaagactcttctaagagcaccattggagcagctgtggggtctgaggaacacgggagtcagtggaaggagggaaggaaacttctccattactggcaggtgctctgggatctctttgagtggctctgtgtggacactggaccatgctgggccacagcctttattggggttacacttacagtcttatggagacagatcagagtgcagctgccatggctgaggtagcaggtccaggggttcatcctccccgttgtcactgccccaggccaggcccctcaatcatttctgcagagccctaaggcttcaagcaataccatttgaaaaccgcaataccagatggacctccattcagtcagttctcttctctgcttggattcgttcccattgccaaggccacagagagcccacctaggtcagcagcacctgtcatccccttgcaggcagctgtggaaggctcaccctctaatctccctcactcctggatcctcccatcaaaactcaagcgtctgttaagtgatggttctttttttttttttttttttttgagacagagtctcactttgtcacccaggctggagtgtagtggcgcgacctcagctcactgcaacctccgcctcccggattcaagcaattctcctgcctcagcctcccgagtagctgggattacaggcacccgccaccatgcccagctaatttttgtatttttagtagagacagggtttcagtacgttggccaggctggtctcaaactcctgaccttgtgatctgcccgcctccgcctccaaagttctgggatgacagctgtgagccaccacacccggcctaagtgatggttctaaccagcaagatgaccttgagcaagcctcttctcagggcctcaactatcaaatgcagtgaagataacacattcagaagccaagagcctgggctgcaaaacctcttaagaaagtgaagaacagtcaacgtgtagtgagcaactacaagatgctggttttacaattgcagccatcgctggtttcactgtcctcatttgactgagaaacccaaggcccagagaggggaagtgactgaccaagaacacacagccaggcagtgcagagtccaagttcacacccaggccctggactgatgcctcttccttttcacccacccaaccatccaaccagcacaggagcttgcacttatggttctgaccttccctgaaccctctctcattcccatgttttagagacaagacaattgaggctcagaagcactaactcacctggccaaggtcacccagcctttcacataggagccaggatccaggcatgtgtgtgaattccaagctcggagctcttcctattgctgttctgtaacacagcccccctgactcccacccagcgctcagagcctgggcttctgtctgaacctgtcccaggcctgggctgcttaaaagcagcaaaaagttcctcctgcagcttcaacttgagcctgtcaccatcatcagcataccccgagagactctggggtgcctgggacaggtagctgcagatgcctccggccccaagttgccctctgctcctcccgagttgtgctcctccatgccagaggagggaggacagctccccttgcctcctaggcggttggcagagtggcagcggctgctgcttcttcctgctgctggctgatggagagattatttctaagcccttcccattccacacccccccacactggctgtccccgtgggacttgaagtgcagagtccgctgctcaaccaggacagctgccctggctccctcccagcaagaacccccagaccctcatctctcataaggaaagggacttctgggtcctttaaaaaaaaaaaaaaatcccacctcaatcccccagggctctcctgcagctgctggagagagagatgcagaatgaatgaacttctggtttctggaggaggcacgggaagaaagattggaaactgactctgctagaaactgctgttttggggatttttttcttccccttcatctccaccagaaacctgtcccttccctgggcaccaagagatgggctccccttgcctggcagagaaacagctggaaactggctccctgagacaagaaggtgagttaaactggaggggaagagttactgcttgctgtagggtgggcgggggccagggggaagttgacgctgttagacatccttggcaaaagtgctggtttgagtgaattcctttcccgtgctccagaaggagctgtttgccagctgtttggagagccgtagatggcaaaattgggtttattcagtgaatgcagaaagggcagttttcaggttctggaaggagccccaggctgggggacagagtgctgggttggattcggatttgctgtgtgaccttggacaagttacttccgctcgctgggtcttggtttttgcactgggaaaatgaggaagcttgcaaagggctccccagatttcaaaatactcttctctctgcaggctcctcatcctcctctggccattccctgtgagcaaagtaatgcattcagagcaacagaatgttgtgtagggagcaagagtgtgaaataggttacgattcactctccactatccaccggaatccaaccggctctgaaattgagaggaactttgatttccgttccactgccgagtttttctcttgattggagtggagtgcatctgaaaatgtaagcttatagatgctttggaaatggctttggctagaatgaatagcataagaaatggttgcaggatctgaaggtgagaaatattatgaaaaggactttttaaatatgtgaagtggctaaatctaaaacactcacactaagtcaagcacctcatataggtctgaaatggagacagcattagaggccccgtcatttttttttgtttttttctttttgagatggagtctcgctctgttgtccaggctggagtgcaatggcgcaatctcggcttactgcagcctccgcctcccgggttcaagcgattctcctgcctcagcctcccgagtagctgggactacaggtacatgccaccttgcctagctaatttttgtatttttagt

SEQ ID NO: 6926 - DNA, 6000 bp, Homo sapiens
caaagattttaataaatgatttgattttttaatttcttttagcaagggtacaattttacgcaagctataccagtaactaaaagcacaggcaatgcaaatataaaagaacatttcaggactgtaagccaaaaataaaatttttggccaggtgtgctggcgcatgcctataatcctaacagtttgggaggctgaggtggaaggatcacgtgagctcaggagtttgagaccagcctgggcaacatagtgagacctcatctgtataaatttaaataataataataaaatttaaaaagttaaaaaaataaaattctaagccccccaaccaactgaatgggcccttcctcttggccaagggcattacaaagctcacctgaaaaactagtttaggccatgacgtggttgggggggtggaaatgcctcactatatataatccctcctcctgttggaatttaggcacagctgaccagaactaacattgaaacagagatcttaagactgatgaagaaacagactttttgtcatatgacaccaaattccagcctgactctattatagcatcacatgacagatagcaggccctgagagaaatcaaagtatatttctttttctttttcttttttttttttgagataggatcttgttctgtctccctagctggagtgcagtggtgggatgatcagcctcaacttcctgggctcaagcagtcctcccacttcaacccccttgaggagctgggactacagggatacgccaccacgcccagccaatttttaaatttttgtagacagggtgtcattacatttctcaggctggtctcaaactggcctcaagctatcctcctgccttggccccccagtatgctgggattgcaagcgtgagcaaccgtgcctggcccaaagtatatttatttgacatatttggaaatggccctgcaaagctgtctcctgtggggaaagtctacattctgttgagaatccccttttctattcaggtgtttttcttgatccaggagataatttactaagaatctggcacctttcttaggtctgttaagagctgtgaggccgtgcgtggtggctcacatctgtaatcccagcactttgggaagacgaggtgggtggatcgcctgaggtcaggagttcgagaccagcctggccaacatgatgaaacctcgtctctactaaaaatacaaaaaattagctgggcatggtggtgggcgcctgtaatcccagctacttgggaggctgaggcaggagaatcgcttgaacctgggacgcggaggttgcactgagctgagattgcgacattgcactccagcctgggtgacaagcgtgaaactccatctcagaaaaaaaaaaaaaacaacaaaactcctaagcctgctacttggaggcttcacattgatgaaaccaaagtctccacaaccccttaactgacacattcctttctattggctccaggtctttagataataactctgccaactaattgccaatgagaaaatctttgaatctgcctgtgacctggaagcacccctcccccaacctcacgacattatttcagttgtcccacctttccagactgaaccaatgtacatcttacacgtattcattgatgttttgtctccctaaaatgtcaaaaaccaaactgtgacccaaccaccttgggaatgttctcagaatcccctggggctgtgtcctaggccattggtcactcatatgtggatcagaataaatctcttcaaatatttcacagagtttgtctctttggctctttttgtcaacagtaccctctaaatttgtcaaggggtaagttaagccctggagactggatcatgtagcatgtttgcaacttccacttcttacactgtaggttaactcccttcctcgctgttcttgttctgtagttgactaggagagacctcctccccttccaatcactaatctttgttacagattaactgccttctttattgtcctgtacctaactcaacaccagatgccacaaagactctatggctgtcacaccttcactgtggaatgttaaataaaccttttctaaaaaaaagagcaccttgacgaatcagattgttgtaactgtgcattaagcctgctatagaaagatgttgaaattctgttaagcttccctaaactatttctctataaacgatccccaaacttctacactccatacagtgacttccatgctttgaaatctatacttctcaggtggccatcctgaaactttgagcttgaataaactctctttagattccaatccttttgattattttgggttgacaaaagtgtggggactaagaattatgtggtgaggatccctccactcctcattttttgagaaaactttaaaatgggcgcaaagattattgggtgtgtaggggaggaaaagaaaactccttatctctatctacccttttacattcttggttggggtccctgtaacaaagacaaattaggctgagtgcagtggctcacacctgtaatcccagcactttgggaggccaaggtgggtggattacctgaggtcaggagttgcagaccagcctggccaacatagtgaaaccccgtctctactaaaaatacaaaaattagccaggtgtgatggtgggtgcctgtaatcccagctacttgggaggctgaggcaggagaattgcttgaacccaggagatgaggttgcagcgagctgagatcacaccactgcactccagcctgggaaacagtgcgagagtctatctcaaaaacaaaacaaaacaaaaaaacacaaattaataagagaaaaacagaagtttattaacatgtacatctcatatattcataagagaaacttgggaaagagtaactcgaagaggtagcttggaatgtggtttcacatagtaccttcgacaaagaataatacctttggccgggcgtggtggctcatgcctacaatcccagcactttgggaggccaaggtgggtggatcacttgcagtcaggagttcaagaccagcctggccaacatggcaaaaccctatctttactaaaaatacaaaaattagccggacgtggtggcgggcccctgtaattccagctactcaggaggttgaggcaggagaattgcttaaaccccggaagtggaggttacagtgagctgagattgcaccactgcactccagcctgggagacagagcgagactccatctcaaagtaaaataataataataataataaaagaacaatacttttgtagagaaatgacaggacaaaggagttttgagcttccaaaagtggcaaactatggaaaggtttatatatgggaagaaacttaatagagtaaggtttgtttgcagattcctttggtgccctctctgggctaagaagagtctagaatgtccagtaaaggtgaatttacacctgccctttaggcagaaaagggaggataaagagaacttttcctgcatttgtcgcttcttaattgccttcagctgaaaataatttttctgtcgaagaggcatattttgcggtgatatattctggttttttctttttcttttttcattgagatggagtctcgctgtcacccaggttggagtgcaatggcgcgatctcggcccactgcaacctctgcctcccggttctcaagcggtttctcctgcctcagcctcccgagtagctgagattacaggcgcccaaaactgcacccggctaatttttgtatttttagtagagatggggtttcgccacgttgaccaggatagtttcgaactcctgacctcaggtgatctgcctgcctcggcctcctacaagtgctgggattacagatgtgagccaccacacctggccttattctggttttctttaggtgtcttcattgaacaagtaggtattgtctggcatacccttctgggttatctcgtcttatggggtcttacttttgtctttaagctatctagagctctagtggagcattgtatatataccatcattaatgagttaaatggtatctttgacatatgttcattttatatttgtgtgagagtcataattttattttaaaaaaaagatatgctttttttttttttttgagactgttcactctgtcgcccaggctggagtgcagtggcttgatctcagctcactgcaaccttcgcctcctgggttcatgattctcctgcctcagcctctcgagtagctgctgggattacaggcgtgcaccactacatccggctaatttatgtgtttttaatagaaacggaatttcaccattgttgttcaggctggtctcgaactcctgacctcaagtgatcagcctgccttggcttcccaaagtgctggagttacaggcgtgagccaccgcgcccggccttaaaatacatgttcctactttcaaacacttagggcttcctatatggaagggacagtggcggtgctctagtgtccaagtccctcaaggaggaggccgggggctccgcggacctcaggagtcaggcctccaatccccagttcagggcgctttcctcttttcccaagtgctttctggctcagccatttccactcccgctcccttactttcccatttccttcggtcacatccccgcatatagtacaggccactggagctgcctctgagacaccgccgcgggcgcgggtacacactccgctaagggcattcccaacccggttccgcagcctaacggcgtggcttggaccctgctgcagcccgtagcccctatcctttctcctccggacttcagtttggcggcatctctgtcttagcgagaggggctgtgactaaaagctgccttttctcaatgaactgccagtttgtaagagcctccgggtcccctcaaaccgcctcgagcgcccctctccgcgagagctgcgcggccggaactgcgccggcgtgacgtcactgacctcgtcgggttcacttccggcgctcgcaccgccccgctctccagccaaggctccgggctgaggcatttgcttggctgcagcctccttccgacctgcccggcgggacccaggggaccaagccgagccgagccgcggggcccgctccagcccggccatgagcgcggccgcatgatgcgtccctgcctcggccgctgcagtcgccgccgccgccgccgcaggccgggaggagccgcagcgccgggcgaccccgcccgggcctcgggtgagtgcggcgggctgggccgggcgggctgctcactcccgggtctcccggccacttctggcccccggcgtgccctgtccttccgtcggttccgccgctctgtctccaccccgccgcacacctgcgaccttctggagttcctaggggcacctccgtgcccgcacctgacttcccttccaggtgcccccttgtcattccttagttgctctctcgggatagggcccggattgcagccccagctttttgcctgaccttgggcgtgacactcagctctccgagccctggttttctgtgtggctaatgacggggtggtggttacagagcagctataaaccctgtgtaagctgtaaagagttttttaataggcaggtattacaatgagcagtctcgcacttcgcgttgtggcttctcttcctcttaagctgtaaacttttctcttttattctctgcccatcttcctagttatcttccctcctgctccacgtcagtcatctttgggtgttagttgcctgaaagggcatctgggacagtaaagctttcagggcagtaaggctcacctctcctggtgtggttccttctacaactttgtcacactcagttagatagacacactttattagcttatgaagaaccagtttattgtggccgttaaattggagtgtaagagacagtgttgatgcggctacctgccttgtagcttcttttactgtctgggctgtatacagtgctgggcaaatcgctgctacagtgttgcattttcagtctgcttagtgtatgcacttaagcgcacgtatttatctattttactgttactatcccaag

SEQ ID NO: 6927 - DNA, 6000 bp, Homo sapiens
actgcaacctctgccttctggtttcaagcgattctcttgcctcagcctcccattacaggcggtgcaccaacacgcccagctgatgtttatatatatatatgtgtgtgtatatatatgtgtgtgtgtgtatatatatgtgtatatatgtgtatatatacgtatatatgtatatatgtgtatatacatatatgtatatatatgtgtgtatatatgtgtatatatatgtgtgtatatatgtgtatatatgtgtgtatatatatgtgtgtatatatatatatatatatatatatattttttttttgagacggagtctcgctttgtcacccaggctggagtgcagtggtgcgatctcccgtcactgcaacctccgcctcccacgttcatgccattctcctgcctcagcctcccgagtagctgggactacaggcgcccaccaccacgcccagctaatttttttgtatttttggtagagacggggtttcaccatgttggccaggctggtcttaaactcctgacctcaagtgatctgcctgcttcggcctcccaaagtgctgggattacaggcatgagccaccgcactcggccaatgtttatatttttagtagagatggggtttcaccatgttggccaggctggtctttaactcatgacctcgagatccccccgcctcggcctcccaaagttcccaaatcgctgggattacaagtgtgagccaccgcgcccaaccaatttaaacattttctggttgacaattgtttgagtttgttgtctaaagacctgggattgttgccgagcatggtggctcacgcctgtaatcccagcactttgggaggccgaggtgggcagatcaccaggagttcgagaccagcgtggtcaacctggtggaacccagcctctactaaaaatacaaaaattagccaggtgtggtggcaggtgcctgtaatcccagctactcgggaggctgaggcaggagaatcacttgatcccgggaggcagaggttgcagtgagccaagatcgtgccattgcactccagccagggcgacagtgagactctgtctcaaaaaaaaaaagaaaaacacaaaagacctgggatcagtagaaagcaatgtttggaggccgggcacagtggctcacacctgtaatcccagcactctgggaggccaaggcgggcggatcacgaggtcaggagatggagaccatcctgactaacacggtgaaaccccgtttgtactaaaaatacaaaaaaattagccgggcgtggtggcaggcgcctgtagtcccagctactctggaggctgaggcaggagaatcacttgaacccaggaggcggagcttgcagtgagccgagatcgcgccaccacactctagcctgggcgataagtgagacaagaaagaaagaaagagagaaagagagaaagagagagagagagagagagagagagaaagaaaggaaggaaggaaggaaggaaggaaggaaggaaggaaggaaggaaggaagaaagaaagaaagaaagaaagaaagaaagaaagaaagaaagaaagaaagaaaggaaggaaggaatgtttgggttgtggtgaggctgtggagatgaaagctgtatcatgcagatgaagcttttagctaggaggcttcaaagagaacaggctgtaaaatgttaatctttaagtctgatagacttcaagtatgtgttggtgttagtgctggagaggtctaaagaggccgtccaacccccgattctcttcctggcccaaaccagtctttcaggttaaatgttaagagccctggctgaggaggaagtctgtttagatgtctggggtggcccttagaattttatttttggtttacagggtttaccaggtaagtcgttttcctgggaaaaagaacgagttgaaaggaagagcaaggatccgctccggacctcactcctatattttgctgagatgaaaaccacaatccctgcactgcgagactcatctcataattagaaaacaaaggattatccaccgggttctctcccctcgccctgtggccttgctgctcccctgcagttgctccaaatgacaaaataatgacgggttcgccttgtgagagagggtggcctgctcaactccacgctggcgctctgaggggggcagaagatgcctcgtctcatttatgttgcaaacagccttaaaaaggacctgcagggcgctgggcgtggtggctcacgcctgtaatcccagcactttgggaggctgaggcgggcggatcacgagatcaggagattgggaccatcctggctaaccccaattctactaaaaatacaaaaaataaaaaattagccgagcatggtggcgggtgcctgtaatcccagctactccggaggctgaggcaggagaattgcttgaacccgggaggcggaggttgcagtgagttgagactgtgccactgcactccagcctgggtgacagagtgagactccgtttcaaaaaaaaaaaaaagaaaagaaagtattctcccaaccagctcaagcgagagtgccacaacttttttttcttttctttctttcttttttttaacctctgaaaatacacaacatgtgataaattactgactggagctgaaaagaccattgtcctgcctctgtaaaaatcaaaacgctgccgaatctttccaacagatggcactctttgctaagattctagagtcatagctttcaggcgaaggcgtttcagggccggcatcagggacgtctgagaggagtagatttgctggataaatctagaatgttgtcatatgaaaacccagtaaaaaccgacagaggtggcgtaatagctgtgtgacttgaacacgctcatggctgttgtcacccttcctgcttaagggctccagcacttgccaggagcctggctctgggggcaccaaccatgacttgcaccaactgtgcagggccccctctgtgccggtggggacccctgcacctcccttattaattctcactcaccctgggctctcagctccaggtaccacctcagaaaagtctatctggacctgcctggtccctgtcgctgtcgctggctcaccctgtcatgtccttggcttatcatggttgtaattttatgctttggggtatgactgttggttgcctttcttgttactcaaagaagaatggtggaatgattaaaagtaccatataagttcagagtcaaaaggacagctcccaggctacttgctggccggacaagcgaggtaaccctaccaagcctcagcttccttatttgcaaaatggctctaactggcacctaccctattgcataagaagctgtctaggggaggactcagtgagcactcggtgagtttgcccagccatggtggtactgtctccttccctctgcaggcacagcgggaagaatagggcagatggaggggtctctgcaccttccacagccagcaatgtggacggcagattacaagttagtatctgtgtgacctccgcactcccccgcctgtggctgcctgggctgctgagatttcgctcggttttatcaccgcagaggaatgcccgacataccggggggcgagcaaggtccagaatgacaagccctggcattcctcagccgccccctccctggggtggggcctggacattcctggctgcagctagaggtcccagcacgacagggattctgacccccctccaccacggctattgttcagaattctgtggattccagaggcatctgcccagcagactgtcttgctgtgaacacccagctctgcaaccggtgtttgcgtgtttgccctgggaggctgaacgctcacccagaacaaaggcctccccacatgcctgctgtgagcttccaaggactcgtttgcacacacgccaaggaaccccggggtggggtgatactgaggagcttcctccctgacccacacacaccctttgaacaggtctttggccgctcaccagtctggtcaatctcggggcagtatttatattccttcccatttccaggcctaggagccttggcatcctgctctcgcctctaactgaaattacctctcaaccctttttagctaagatgcctctcgcattccctaggaataacaagctttaaagccccttcacactgaagcctgcctttgaattccccaggtagatttgggggtgggggtcttatggctcccagcgaacccccggttctgttgattaaattgagctcaggcagattgctggcttcccaaagcctgtgttattactgcttctcaaagctacgggcaccggatcgccgtctttggcaagattcttttgggatacaatgggaattactgggtggcctcggttcggttcttccctcgtcccagttcgcggctcaccagccccactgatgcagcccccaggctggaaggaggctgcaggagcttcccctcaggtcatcctctcatccctcccccgtgccccaggagctggttgtgggggcggttccatcccctcggcccatccgggacaggagcctaggttcccttcggggggtaccccaaactccatccttggcctcaggccagccctggtgcactgcccgctcccaggcttgacgagaggctgcgggccagtgggtgaaggggcgcgccctgactgccaggccccgcccaggcgcatccgggaggacgggctgggatgacgcgggcgccgggaggggggaggtcgcgaggccggggtctccatggcgcaggaggactggggccttcgaggaccacgcgggcctgggaatagcccgccaggctgggccggacgacgcacgtgctccgagctgggccgagggggcggggctgagggacggggccgggccacggggcggggaggagccgcggacggtgggcggggccggcgggccggggcctaaaaggcggcgcgggcggggttcctgacgcagctgcgggcggcgggcggcgcgcacactgctcgctgggccgcggctcccgggtgtcccaggcccggccggtgcgcagagcatggcgggtgcgggcccgaagcggcgcgcgctagcggcgccggcggccgaggagaaggaagaggcgcgggagaagatgctggccgccaagagcgcggacggctcggcgccggcaggcgagggcgagggcgtgaccctgcagcggaacatcacgctgctcaacggcgtggccatcatcgtggggaccattatcggctcgggcatcttcgtgacgcccacgggcgtgctcaaggaggcaggctcgccggggctggcgctggtggtgtgggccgcgtgcggcgtcttctccatcgtgggcgcgctctgctacgcggagctcggcaccaccatctccaaatcgggcggcgactacgcctacatgctggaggtctacggctcgctgcccgccttcctcaagctctggatcgagctgctcatcatccggccttcatcgcagtacatcgtggccctggtcttcgccacctacctgctcaagccgctcttccccacctgcccggtgcccgaggaggcagccaagctcgtggcctgcctctgcgtgcgtgagtacggggcgcgggccgggggttgggaggtcgtagtctctgggtccctgcatccttgcatcactacgcccctggctcccacatctctacatctttacgttcctggaccatcccggcagttctaggctaaggtcattggtcccagaaaccacgtgcgtttctttcattcattcttttacacttctccccacaggctgggaatatcttcagtgacgggacagcagggtccctgccctgcccttcggtgggcattccattcccccacttaagcggtttaggcaagtgccaccctcccgttggccccgctgagcaatactcccagcctcttgcgtggcacccacgtggagtaactgagcaatcggtttactgttagagctccgattgctgactggttggtgagaaggaaattgcagttaaaaaaaaaatcattcatttctgctctccacaccagctcgtcaggaatca

SEQ ID NO: 6928 - DNA, 6000 bp, Homo sapiens
cagcgggggctgaaggaacagaagcgtggttgagtgctcaggaaccgctcccatgcggcgggcgccaccacccgctgggatctggaagttgcccctgcgtcacccctgctgtggccgggaggcctctgtggtcaggcaggtggcactgactcccacccccgctgcctgcattggctgagggagggccgagtgtttgaggctgaggtccttggggctggccccctgcagggtgtggcccaggctgtctctccctcgtgcaggtgagcgctgagaagaagctgacaggcagtaccgtgggcatgcgggccagtgtggagaccagccccctgcttcgggtaaggccaggagcgggtggtcccggggccctgggagtcacgcttgtgcccggctctgccctcagcctctgtctgggcccgagtgttctcacacctgcggcagccccgccaagaccacgtgcaggagccaaatgcagagatggggctcgagccgggcctccaaccccggagtctctcctcgaaccctctgctgtcgagacccccagcggctccatgggaaacaccctgtgccttgcagttccgggccgagtccgtggtgcccgcgcgcatggcggagatggcccgctgcatccgggagcgagacttccccagcttcgcccagctgaccatgaaggacagcaaccagttccacgccacctgcctcgacaccttcccgcccatctcttacctcaatgccatctcctggcgcatcatccacctggtgcaccgcttcaacgcccaccacggggacaccaaggtgacgcgggccgggagggcagaggctgcgctcgcgctgtagcgcgtgtctaggcttgtgctgccgtggagacggccccggggctcgcgtgcagggcaatctgtgtctgaaagctccaccctgctgtgtgcgaagctcactgaccatctgggttcttctgtttcattttgtttcttgacttgcccgggtcacggccccaccaccttcttcctgggttcacaggcagacgtgtcaagtaccaggcacttggggtcacagctccactccagtgtggccctgagggcctagactgagctcttggagagcccaaggccgcctggcagaccagagggttggggagacaagggtcaggcaccacgtgaatagccagggtgactgctgtgggttccaggtggcgtacacctttgacgcgggccccaatgccgtgatcttcaccctggacgacactgtggctgagtttgtggctgctgtgtggcacggctttcccccaggctcgaatggagacacgtgagtgtggaccccgcccctcctcctttttgggagatggtgccaggaactctggtcggaagagacggaggcacctgaaggctgtggcgctgagacagggagtcccagggcaggcagcagtcccccgagtgtgggagccacgggcagggtgtccccatagagccatcccacagcccacgtccacagggaagaaagagaggccgctcacgcgtgtgtgagcaacgcccagggtctcccacctcctgagtgacagcgtcccctgcagctcgggaccccgcaggctcttattctatagaacagtggcttaggaaacacgcctgcactcccagatgtgtgcgtaagtgtccgacattttgaaggaaaggagtcaaagcccctgatttccttcttactgaagcgagttagagccagtcaaggcggccgggtgttgaccccgccccggcagttgggtgtcttttcttgggtggggtccggcagctgcatcttggcgccacagagcccccatgtacgccctcctcggtgcacagcttggccctgaaccgcctcttcccctgcgctgctctgtgggggtgccacagagcccccatgtacgccctcctcggtgcacagcttggcccagcctccttacgccccggggctgttgatttcttccctcccgtgttttcatggtgtcttattctcaatgtgagaggcgcctcccatttaagggtgtctggaagcgtgtggggatgtgcgtctgtcccgggtgggagcaataacaccttctaatggtcaggggcctgccctgtggggtggactcagacccacaccccaggactgcccgcctgggaagcaccaggctcgtggctgctgctccgggtggggcttgcaggcttccgctgttctgcagaacacggtgacgaacgcaccagcttgaattgggcgcttccctgagctgttaccccatggggcttggcagcacccttggccagatgtgggtccagcctgggcatagctgtttaccacataacctaaaatttcctgtctcagccattcgagagcatataatcctgcggtgttgaggacattcacagggtcatgtgagcaccacctcaagccacctccttaactttttcatcacccctaaaagaaacctgtccccacagcagccacctgccgtctccccctccctgagccctgacggccaggaatgcacttcccatctctggacttgcctgttgtagactgttgtagacgcttagagaaacggatgcattcaccgtgcccctgccctgcttttccaggtttctgaaggggctgcaggtgaggccggcccctctctcagctgagcttcaggctgcgctggccatggagccgacccccggtggggtcaaatacatcattgtcactcaggtgaggcctggggctcacccagtaccccggggtttcctttcctgccaggggggcccgcccagcccccagggcccttaaaggctaagcgcggctccctgtccctaccgtgtctcaggcaggaagccagaacgcctttgtccattcatttgctctcaaagtggacattacaggccactggtgatgctcagagcagcagggctgcgctgagggtgggagggtgagtctgacacaggctcccagggagacaggtggggagtatcagacccttgaatagggagcgcctggggtgggggctgctggggtccctgggacccccccaccccaaccaccccagcagaccggagttcctgccctctgacctgctccgagggccaagcttgcatccagtgatcacggccgcccaagccattgccgccaccttcctctcaggggctgcctgttcccaggctctgtggttctctgtcccccctgtgacagaagcagtgcccagggcagggggctcgcagctggcaggggcggctgtgcctgcaggagctgcgtgtgggtgtcaccactcaggcgctttaccttctgaccaggacccacaggaagggcgggggcacaccgctaccctcctgtgtccggccctacagatgctgggcacaggatgaggcgctgccattcctggtgacctgacatggatttctatccccaggtggggccagggcctcaaatcctggatgacccctgcgcccacctcctgggtcctgacggcctgccgaagccagctgcctgactgcctcagcagggaccgcatgccgcttggagaaggggtggcctcgccggagctagggagcggatgtggtgggctggccggactcctgggacatgtgggtggtggcttgaccccgggcccatgggcagcttgctgtggggcagtgcagggagtcctgcggccgcccaggtgtcaggagaggtccccgccgagtgcttcagctgccctaagctgcaccagcgctttgccaagatgggatggggagggggtatgagaactggcagagcctcggtgcagcagggctgaagggctttctcaccccagctctggctatgcccagttctctgagaaaggagctcagtggggaggtggtccctccagcggaccagggaaggggtcaccgtgctgggagcagcctccttgggcctcaggaaaccaccaagtgcctcggatggtggctgcccacggcgcttctgctgagaccctgcccccggcccaggtgtctcggagggtggctgcccacggcctgggtgtggctggaatggtggcaggagtgggcaccagtgcggccccggtggccatggggaataaaccagcattgctgcctccggcctccgccgtttttctgtttcgtaaaccagcatcccggggttcctgctctgagtgaccctggcacctgtcagggagtccaggtgtgccccatgagggcctgggggaggggcaggctgggcagagccacagaggggctcccctcaaaccccacattggctcaggtgggaccctcaggagcaaccccaggtctaaagtcttcccatgggcgctgggctcaccacccccacgccagcccctgcctcccgtacccaggccggacgtgacggggccgtccctgcattctgtgctttcccagttgtacacatcctgtcccctccctcgagtctcagtcacagttcagtgacctggtgacgggaggccccctgcagtgtctgacccaggccacgcctgtgccagcccagagccagggggaggaaatgggggctgggcctctggtccccatggggaggccacccttgtccttggtagcatcagggtgcagaggtgttcccgggctgtaggggtgactcccccaccccccaaggctctggagaggccgatttgctcaggaagccgaccttcacaccttgtcctgctattaatagacgcctggttgacacgggaccctcggttgggtccggagcattgggcaggggcacttgtcagtgtttgagagctgaagtttgggaagccctggggaagcgcaggaactccccgcctgggctggggctgccgggcagggcccctcctatgcctcggcgtggctagagagggcgggggcagaaggctccgggacagccctgcaccctacagatgcgggtctccgcccagccgcggtcacctggggggctgggggcggggcctgggcggggcggggttcggccgggagcgcaggggcggcagtgcgcgcctagcagtgtcccagccgggttcgtgtcgccatggggcagatcgagtgggccatgtgggccaacgaacaggcgctggcgtccggcctgagtgagtgcacgtcagggacggtggaggctgcagcctggaggggtgtcccaagaccccagccgggacctcgggctacttacagggtggggaagtggggcgccaggcgggccaggccgggccggggtcaggccaggagggtgcggggaacgggggcgggaccctcaggccgcgggctggaaggaggagttctgagacccccagtaattcccttgcagaccctgcggagcgcggcgcccctcccccattcccttctctcggtcccccgactccgcgaaggaggaagttgcagcgcaggggaagaggcggttcagccccggtggtttccggggtcaccgccccgaagcccccgagtgggggctccggcctgggcatcgggagaagctcccctgcccctcggtagccagctggcctggaggtcgctctccctgggcttggggtggggaatgggctcatgccctggggctcagcccttctcatctggagtctgcgctggaggcggtctgagatttcacaaggcgccgaaaccacccagtgacggccctgcccagcccagctgcacaggcactttgctcttggggtgggatggcacagcccccagtcaccctcctgtgcatttgctcagaggttctggtgagggcagcggactccatttggaaatggaccctctcgggaccagggccagggagtgtctggcccagcacgggtgaggctgggctcaggcgaggtctgagggcagaggcaccactgcagcagctccaggaaggacctgcaccgggggaggagtgcctgggaagggcctgggggctgagggtgaggaggaggggcccgctgccaccactcccctggggctctgagcgccctccctgttgtctggagggtgcgtggcagctggagtgggagcagagacctcagggtgggagggctggaggacggggccctgcagcctgtcctgtgcccaggaaagt

SEQ ID NO: 6929 - DNA, 6000 bp, Homo sapiens
cgccccgacatggcatctgtgcccttaggaactcttcacaggggaattatttggggccacgcggtggtggaaacctgcagtgctgggcagtgggtctggctggagagccactgcagaagggctgagaaggggcggccccagcaggccccatgcacttacaggcaaacaggctgtcggcccagagccccagcaggggcctggaccccaggagcgacgggcctgaagcagggcctctgtcctcggagtgggaggcagagtgaactttagctgctacaagacttggaggtccggccccgggaatctctgagctatggccccctcacacggacagggcatgagctggggcctgcgacacccaacgttgactgctcagaccctctcgtccctgcctgggcccacacttgccatccccaggctcagccaggatttatggccacctgggtgtcctggcccacgaactccctgccccgggcacccagcctcctcccacctcaccctcccagtgcccactcgtcagatagctgatgctcgccacgcacatgggcctcaacttctagaggagtcccgagagggaaaggggttccccaagccacacggtaggtcgagtacacctgctcagcctgcagaggcggcctgccctcctgcctgtcctgtcgccaccccatggggcaaggctggtgcccgcatttcagaagtgggaacggggacctggaggtcaagtggcttttccgggcatttgagggggtccagcgctcatgaggactgtgctgctgcctgtcctccaagagacccgcccctccctcgtcagcccctccatgctgatgggggcatggggcatgagcttcctagagtttggctgctgggaaggggctgggtggctggactctggtcatcttcatcttggtgtgatgggagcctgagtgtgcagctgcgccctgggcggccagcgtggacagacttcagagtgagctgggggcaccaggcacctgcaggataccgttccgaaagatctagaagccccatgacccggcctggcagggcccccgggcgaccctcactcccacatatgggcaacacacacacgtgtttgcaggcatgcgacggagtgtgccagccagcccgaggggtgctggccgctagaggagggtgaggggcgtctgcagcatggctgcggcacgtggggcccaagtcagggccgggcctgcccctcggtggcctcacaccccaagtcagggccgggcctgcccctcggtggcctcataccccaagtcagggccgggcctgcccctcggtggcctcacacctgttctctcacagcagctgcctctgttctttccactcccagaaatgctcatttttcacggctctgctcagaagatttcccagggccagggccagggccaggctgtgggtggggtgagcgatggcgccctgcgttctgatccagcctcgcccccagctgctgtgtggtctctgagaggggtgggctcagggcctgggcctctcctgccctgatctccctgttaccctggcctcggagcctcccagcagcccctgcagccctggaggcctgtgaggacaggactggtctggttcatctgtcccgtcaagcccccatcccatttgacagaaggggaataggctccgagaggctgtgacttgcctcggcctgcagagcacggagactgtcagagctggggtggggcctatcgtccagccccacagcctgcggtctcagcccgggcacctggcgcctcagccaccaggagagcccccgagtcacagatggggacactgggccggtggcagccaggccagagccagggcatctgacgacagccgtgttctttccaccacacctggctttccctggtgtttgggaaatggctgtgttctgggaaatctttagtcaggtccagggaaaacaggcccggcaggtctctctccccagccccaggccggcctgtcacttcttctaggcagctggccacctctgtccccccagaggcttggggagggcaggagtaccacccctatcttccaggcagagccacccagaaggctggcaggggtacacaggagaccctggagcctggccatgtccctcaggcccccttggtctctagagaccccccggggtatagacagggccccgctgctccctgggtgcgtggttcggggagatgaggtggtataggacagtctgtggtctgtctgtacctggcaaggtcatcacgtgcctgggcttggcaggacagaccctgggtcttcggccagggtgggagctgctaccaggaaggcctgcaggaactgtgagcttgagtgaggaagtaggaaggtgtcaggcagacctcagggacggctggggcctgtgcccggggaggctgtcctgtggccctcagaggagcagctgtggatgtggccgcctcccacgctcctggctgggcaggtgtgggctggagaggtggcgtcagtgcgatacacctgaccttgcccctgtccgtgaccttggcaggatgatgatgagagggatgtggatgccagcccgacggcagggctgcaggaagcagcaacgctggcccctacacggaggtcacggctggccgctcgtttccgagtcacggcccactggctgctggtggcggctgggcgggtcctggccgtaacactgcttgcactggcaggtacgcaccgaggcagggggcactggcagtcacactgggaggggtcttgggagttccctgatgactgtggagacagcgggacacatggcactggccaggtaccaccctgtgtgcccctgccccgcaggcatcgcccacccctcggccctctccagtgtctacctgctgctcttcctggccctctgcacctggtgggcctgccactttcccatcagcactcggggcttcagcagactctgcgtcgcggtggggtgcttcggcgccggccatctcatctgcctctactgctaccagatgcccttggcacaggctctgctcccgcctgccggcatctgggctaggtaacggcttgccacacagcccctttttcctgccaccctggtcccgcccacctggctcgtctagcccctgtggccccactgcctctggggtggtaggctgtgacgggtcttctctggacagggtgctgggtctcaaggacttcgtgggtcccaccaactgctccagcccccacgcgctggtcctcaacaccggcctggactggcctgtgtatgccagccccggcgtcctcctgctgctgtgctacgccacggcctctctgcgcaagctccgcgcgtaccgcccctccggccaggtgagcacctgccacccatggtgggtgggctgaggccaggccatggggctggtctcaggacctcctgcctctgggtggggtgtggagctggtttgggctcaagacgctggtctctgcagaggaaggaggcggcaaaggggtatgaggctcgggagctggagctagcagagctggaccagtggccccaggaacgggagtctgaccaggtgagcagccaggcaggtggagacgccagcgtggggggcgcccggccagcccgtgcatggctcagcgctgcttgcccacagcacgtggtgcccacagcacccgacaccgaggctgataactgcatcgtgcacgagctgaccggccagagctccgtcctgcggcggcctggtgagtaccgcacactgcaaggtatggctgggtgcggggggcggggcggaggccggtgctgccccctggtggccgcctggcgctctcgcatgctcgcgccgcacctctgcctgccgccccctcgggggcccaggacatccacgggtcggtgtcagtgacccccgagacccccagggcagccgagtggccatgtcactgaccaacccccaagacccccagggcagctgagtggccgcgtcgttgatccccaagaccccatggggggcctccaggtcccccaacccctccccagagaatgtggctatgctgtcttgtgctgttagctctgggagctgctccaggtggcccagtggccccaggaggccgctcgtccagggcaggggctggcctgggaactctgtgttggccacgtcgccttgggagggcctgggggctctttctggctactttctttctttaccctaacccttgattttccattttgcaatgtgtttctgaatgaagcaaatgaagccacggccctggggtgggggtcctgagagtcttcaggtgcgcagagctggaaagggggtcagggccacctttcccaccctttcaaggaaagtgaggcccagagaacggcaggtgctggcagggccatccctgacgctcagggacggtgtcagcccaattgccggagccctcgtgttctgcccatagcccaccgggggcctgtctctcctgctgtgtgcttgcccagggcccagattttagggcatagtcagggtggggaggcctgcagatcaacctgccgaagctgaccgctgtccccacctgcagtgcggcccaagcgggctgagcccagggaggcgtctccgctccacagcctgggccacctcatcatggaccagagctatgtgtgcgcgctcattgccatgatggtaggcggctgtgggggttggggtgggcggccccctctgccgcgcaggtgtggggcatcgcctgggtggggtgcgctgggcagctgtgcagccccctctgccgcgcaggtgtggggcatcgcctgggtggggtgcgctgggcagctgtgcagccccctctgccgcgcaggtgtggggcatcgcctgggtggggtgcgctgggcagctgtgcagccctctctgccgcgcaggtatggagcatcacctaccacagctggctgaccttcgtactgctgctctgggcctgcctcatctggacggtgcgcagccgccaccaactggccatgctgtgctcgccctgcatcctgctgtatgggatgacgctgtgctgcctacgctacgtgtgggccatggacctgcgccctgagctgcccaccaccctgggccccgtcagcctgcgccagctggggctggagcacacccgctacccctgtctggaccttggtgccatggtgagtgtgcaccaccacatccgggggtgcctgggtgcgcagacccatcagggttgtcgtcctgttcaatgtccacttgcccgggggagtggcagcgccaagaaggcagatgtgtctgtctgtccccttctgcccacccagagccagcccagagtagcttctcagtgagcgtttgttgactgaataaacagacaaccttgtgttggcacgggcaccacccctgtgccctgacactgtgtgagcgtgggctctgttggcacgggcaccacccctgtgccccgacactgtgtgtgagcatgggctatgcccattggcacaggcaccacccctgcgcccctgacagtgtgtgtgagcgtgggctctgcccattggcaccatgcacagccctgggtctcagtgacaagctgtgcaggccatgtgttcacagggtgcctgcgtgtccatgtgaaacgggtgccagcatcgtgtctggacacctgtttgcaggccagtgggtctcatcttgtgaaacttgtgagcctgtgtgccaacatatgcacctgtgagcttgtgtgcatatgtgagcacgcatgtgggcaaacatgcactccagcatgtggacatgtgtgcaggtgcgtgcatggatctgtgcccacgtgaactagtgaacccgtgtgtgactctgcgtgtgagcgcaagtgaacccatgcactcatccatggatgtgagagtgtgtgctcgtgtgcctctgagtgggtgtgagcgagagggtgttcggtgcctgtggggaggctgcggtggatgggctggtgccagccgcctgagagctcttgccccctgctataggagggtgctgggtcccccggctgtgggaggggtgctgggccccccggctgactgtgacaccctgcgcttgt

SEQ ID NO: 6930 - DNA, 6000 bp, Homo sapiens; identical to SEQ ID NO: 1896

SEQ ID NO: 6931 - DNA, 6000 bp, Homo sapiens
cggcccgagctgggtcccgtgttgaccgggggcacccccgagccacccggcatgctgggccctgcagcgccccaacccttctctggccacaccaccaagtgtgaggccgactccagcgtcccacccccagggctccccctcgcagccccagatgaccctgtcattcctggcagtggctggggcacctgtgttgcgacgaggagttcccagacccctgaggctgtctgtggcctgcagagcccccagggcgccgaggtctgacctgcagcgcctgaggtctgactgtctctgcctgcagcatgccggcccctctcctgcagcccctgcccctcacctgcctgggacctgccccgcctccgcatgcatgtggatagacccccacgggccgtggccaacgcttgtccctggggccacacagggacactggaggtcacagttatttattgatcacaattgtggacattaaaacagaaactgttcacacacgccgtctgtgcctccttcctttggggccctagtgtagccacctggacacccccctaaggaagtgtcctggcctgggaggcctgggtgggcagcagtcctgctgggcctctgtcttcagactcggccctctcctgtgggctgggccctccccgcggggctggggtctgggggtggggcgggacatcggcgacgggagctgagccaggagagccgtgtggactgggctgctcggcctgtgtcttggtgtgtcgggggtggagaggcgtgtggactgggctgctcggcctgtgtcttggtgtgtcgggggtgggcacggacccctgaacatcctctagcctctgaatccagcaaggccgcgctcatatcagctctcctgcggttaaacggtggccccggggctctgtggctggaggctgctcacccagcgtgggctctgctggcccctgccagcccctgcagccgtgataggtatcagccttcacagctcactgcctccctcccagcagggcctggcttggccctcccacgggcaggggatgggcagacagggaggggcacccgggacccccacagcaaatcacttctctcctgggagagctggccacaccctccacgcccaccctggaatgggctctggagcccacatcgcccccccaggaggagaagcagttcctgcctgcgtccagccgggctggggccagtccaagcaggctggcagcggccccattaactaccagggagatagcatcagccccgaccctgcctcggggcagctagagctggggtgctgcctggccaggcgcggagtgctgtggggacaggtcccagccgggcccctctacccagaggcttcctggaggggctgcagggggctctgggcagccaggaactgttcccaagtcccgagtctgagggagactccctgtcctcagcccccgccccccatatgtccactgcaccccatatgtccactgcacctcagtttctcacccccactgagcagacaggtgagcatggccttgctgggggcaacagcacccgtctcccaggtgtggagacacgacctccttcgctgtcacccgtggggagcaggacaggcctcatggagggtgcctcagccagcaggtcacccgcctgtggtccagacccaaggaccctgcttgggggtggcagcctggggctgccttgccacttggagtaatgaacttgctggttgtggggggaccatgggggacccctggaggggggtgggctgcatggcatctggccgtgtaggggacgtgggaatagtgtccgggcagagggcgcagcctgcaacaaggcgcggaggcaggaacaccacagcatggggagtcctcaggggacctggtttttctttcatagaagcttcaggggccaaggccggagactgcactctccctcctccacccggcccagctgcgtccctgccagtggctcctcccacttcctccagttctagtttccaacaacagaggctgcagccacccagccccgaagcagggcccagcgagacagggcccaggtaagagacccctccccccggcctctctcggtggggcaggtggaggccctcggaataggctgcctcgcccctaaggggtcagaagtctccctgacctaggggctcgggtagaagggctgtgtgtgggtgaccgcccccccgccgtagaaaggggttccacaggcagatggatttgagaaatgttgcttatctgtctgaggcccatgagctcatctggggctcaggggaaaacccacagcgagctccacgggtcatgtgtctcccagactcaagtcccaggcacctagacactagggtggccgctgggcttggtggccaggtagaccctcaggaccaggaggacccggcctcataggaagaaactggaggagtgactttgccattcccacacacagtggggccttattctctctcttgcagccccaagcgtgacccagctgcagagaagctgagacggtgattcggactgactggactctggcctccaggtgtctgcacctcacactggacccacctggagactccacgggctcccggcagctccggctgcttgggtggatccgggtgcccgcaggggctgtgggagggccccggggcctgcactgctcccccgatggcctgctcttcctcacggccggggctgcaccctgtgtccacgtgctagatctggagggacgccccatctgcctcctgccctgccgcactccggggagcggggccttcgttccagaggacgtggctgtgacagcgtcagggcttgtggtggtcagcgatcccatccatggggctgtccatgcactccagcacacagcccgggaccccgggggccactgggtgacagtgggcaccttcctgtctccccgagggctggctgtggatgccctcaaccgcctcctggtgacggactacttgcctggggctgtgcacagcttctcgttgggtcctgcttgggagcccctggccccagcctccatgctgggtctggagggcccctgctgggtgggcccagggcctgatgggggccttgctgtgagtgaggagtttggggatgtgaggctgtttggcagtgcccgccaacccctgggctccctggggggctggacggggcacactttcggctgcccagcgggcatctgctccaactcagagggcaatgttattgtggcagacgagcagaggcgccaggtgaccctgtttccccgggctgggccacccatctgcctggtgtcagaggggcttgggcagcccttgggagtggcctgtgcaccccagggccagctcctggtggctgatgccaaggacaactccatcaaggtgtaccagggcctcaaggagctggcctgacctgaggctgggttggagcagccctcctgtgcctgaggccagctcccaggcccttggatcaccgcgggaggaaccctcaggatgggtggagcctccaggctatgggcattgcctgcctgatgccagcaccacctgggctgggccctgggcttggctcgagttctcctgctggtgaggctccggatctcaggagcagccctgagtctgcttcccaggctgcccctgccaggcctgcagcctccccagccagggctgctctctgctgtccccattcagtgccctggcccctgcattcatgccccccacaccccctcaggccctgtgcctggactttggggctggcagctgaagccttgagatcctgggccagctgccggcacacagctaggcagactctcccaccaggtgcccctgcccaggcctcctaatcgggggcagacaggcagggagggtgtggctgggctgggctgggcggggcggcctggggcaggggtgtggcccctaaatgtccccaacctcagagggacctagagtcctgagcctccagtagcttctctgggcctggcagaggtaagggggaggcaaccctggagtgtctggaggcccatggctggctgaaccctggatgccttttcttccgcgtccccatgaatgaaagctgtctgggccttcattctgcagacagggacaaacagctccatgctgtttgtcctcccagtgcagccgtgctgggagggtctgggggagcttcctacaaggagagactcctgctgctttggaaaactgagaaaaaataggggtctaaccctctcctcccattttacaagtggggaaatgaggcgtgaaaggagaggcgtctgggttactccgtgggtctggggtccagggaagggcctgtatgggggagggagctgggaggggacggtgtctggctctacccctgtggggtggggaggtggggctcccctgtatcacaggacatcccccctgagaggtccctcatatgtctgggtcctgtgggtgggggactaactgcgcaatgtagttaggtgctcaataaacggagttgccgctgaggtctgggctggggtcttgttcctgggatcgggaggggctggacgcctgtgtgttctctcctgacgatcgctggcggcagcctctgggctggtcctaccagggctcaaaattcccggcaccactggccttggggatctgggggcggcccctctgcagacaacagagtgacgggggcgggaccgggctggggctggggccttcctggaatcccgcagggcctggggacctgttcacttggggaggctgggagccaggcggggtccgggttccacgaaggccaggtccagtcagtttctcaggtgaggaaaccgagctgacgcggggctggcggcccggaggcaggctcgggaggtccgggcctggggactgggcgggcacgctgcgccgcggaacgctcgggtcgggcgggcgggcgggcagcccgggcgcctttgggggccggaccgtcgcgcggcaacgcgcggagccggcggaagtggggctcgggtcccgcggcggggctggaggcagcgagcgccgtcgtctgcccgggcccgcccatcggggtccccaaccccatccggaccccgccgcccgagcgcgcggccccggaagcacccggtgagcagggggggtgggcggcgcgcggcgggacctcgggcagcgcccctgcggctccgggcctgggctgggggctccgcactcccgcccgcggcgccgctgctttctcctcccagaagtggggccgcccccgggcccgcgccgacctgggcccctgtggaccctgtgcaagggcggtcggcggcccgggcctggctgtgggcccttcgcagttgtcccggtttgcaggaaagggcaaaaaacggaatcgtaggctcttcccaaatgagaggggaaggccctgcttgaggaaggcaagcaagtttgtttgtttgtttgttttgagacggggtctcaccatgttgcccaggctgaactcgtgtttgtttttcattatttatttattttgagagggagtctcgctctgtcgcccaggctggagtgcaatggcgcgatctcgggtcactgcaaccgctgcctcccgggttccagcgattctcctgcctcagcctccccagtagctgggattacaggtgcccaccaccacgcccggctaatttctgtatttttagtagagacttggtttcacccccatcgaggctggtcttaagctcctgacctcaagtgatccgcccgcctcggcctcccaaagtgctgggattacaggcgtgagccaccgcgccaggttggtgtttatttttcaaacaaggcgctgggaaacgcaaattctccagagctcttgtggagcggtggcagggaggggcggctcagccagagatggccctggcccgtcctaactgggctggggtgcccccattccctcattcacggggaggagagggaagtcttagtcttactactttatatggtcgacctccctacctgcctggtctgggaatggcttctcaagagcactcgggctcattcttagcagaggaagctcttctggctagcctggcgcccgtgtgtgt

SEQ ID NO: 6932 - DNA, 6000 bp, Homo sapiens
catcttcaggctctcagatcaggacctggaccaggcgctcagtgacgaagagctcaacgctttccaggtgtgcccctgccccaccctcggtgcccagcccccttgaacctccgctgccgttagtgactggaacgggtcgtctccgggtggctggctgactcccaacaacgttctctcggaagcagaaatcctgctttgggcaccccctggccccgcaggccctggaggacgtgaagacggtggtgtgcaggaacgtggcgggcggcgtgcgggaggaccggctgaccctggatggtgaggccgggtgcccgcctgtgcctggggagtgtggggagggggctgtgcctggtgctccccctgctttgtctcggtgcaggtttcctcttcctgaacacgctcttcatccagcgcggccggcacgagaccacctggaccatcctgcggcgcttcggctacagcgatgccctggagctgactgcggactatctctcccctctgtgagtgatgccggggcttgaggcctgccctccccgagggtcaggagctgactgccgactatctctcccctccatgagtgacgctggggtttgaggcctgccctccctgagggtcagtgaaggtctcgctcagcaggccatctggggtcgtgcccttgcctggctgtgccctgaacccctcagcatccacagagctctgagtcggggggtgggggggctggccctttgccaaccccgctcgcgtggcttgtttaccctgctggggtcggcagcttggggtgtggcctgtgggcctcagccaggcctcccacgtgctggagccaggtgggcaccctcctcccctatcgcagctgcaaggtcgggggcgtacaggagcctctgggtcctgtagggagggtccggctgcaccgatggggctggcagggtgacagatgggctgagcgtggtgctgcagagtctcctgggagctagacgggctgtggcctccctgcaggatccacgtgccccccggctgcagcacggagctcaaccaccttggctaccagtttgtgcagagagtgtttgagaagcacgaccaggtgagagcatggcgagtcccctgcccctgcccccgccccctccccggcacacacatcaccacatccctccttctgcaggaccgcgacggcgccctctcgcccgtggagctgcaaagccttttcagtgtgttcccagcagcgccctggggccccgagctcccacgcacagtccgcacagaggccggccggttgcccctgcacggatacctctgccagtggacgtaagtgcggcccacaccatgcccgcctgccgcaccaccctccccaccataacactgtgcctgcctcccgcccacccccagcctggtgacctacctggacgtccggagctgccttggacacctaggctacctgggctaccccaccctctgtgagcaggaccaggcccatgccatcacaggtaggcacccaccctccctgggcctgggcccagtatcctggcagctgccctaacccgtgtctatcctcacagtcactcgtgagaagaggctggaccaggagaagggacagacgcagcggagcgtcctcctgtgcaaggtggtaggggcccgtggagtgggcaagtctgccttcctgcaggcctttctcggccgcggcctgggggtaagcaccctagactcccccaccaccccaggggctccaggggcagggcagggcaatctggggggcactgcagccagcgagtgtcaggacttcacctccctcagcaccaggacacgagggagcagcctcccggctacgccatcgacacggtgcaggtcaatggacaggagaagtacttgatcgtgagtgctggggcggcgcggcctgtgcccgagggtggacccggggacacccaggcctgcctggcagatctggcccagcatggccctagggggaccgagccccagggacccttcctaaggccgctgtctgtcccagctctgtgaggtgggcacagatggtctgctggccacatcgctggacgccacctgtgacgttgcctgcttgatgtttgatggcagtgacccaaagtcctttgcacattgtgccagcgtctacaaggtggggccctgcaggggccacgtggccatggggcagggtctgtccctccagctgtgcctcggccaccccaggactgtacctcataccactctctgcccacagcaccattacatggacgggcagaccccctgcctctttgtctcctccaaggccgacctgcccgaaggtgtcgcggtgtctggcccatcaccggccgagttttgccgcaagcaccggctacccgctcccgtgccgttctcctgtgctggcccagccgagcccagcaccaccatcttcacccagctcgccaccatggccgccttcccgtgggtacccagtagcgcagccctggggactagcagtgtctgtcatccgagcagtgggcagcggtggtgtcaggcctggaactggggactagcagtgtctgtcatccgagcagtgggcagcagtggcgtcaggcctggaactggggccagagtggcggggtggagctttgtgtggcagagggaggcagtgcccaggcatgtccctccagggcctggcctccaccggctgtgcctctggtctgggatccccgcctgtggggccctgtgagtccaggacatgggagggtgcccagcagcaagctgggggcatgtgcctgaggtatctgcagatgattcttctctcttgcagacatttggtccacgcagagctgcatccctcttccttctggctccgggggctgctgggggttgtcggggccgccgtggccgcagtcctcagcttctcactctacagggtcctggtgaagagccagtgaggcccctggtacccaagccccctcccctgacctgggtgtgcctcgctgctggggctctgcaggggcagcacagctggggtgcaggccaggctgccactccgggaacgcctttgcgccgggactttttgtttctgaaggcagtcgatctgcagcggggccttatgctgccatgcactgccctggctcctgccggacccccagggtgggccgtggcaggtggctgagcaggagctcccaagtgccggccaccgctgtcagggattgcccacccctgggcatcatgtgtgtggggccggggagcacaggtgtgggagctggtgaccccagacccagaattctcagggctctacccccctttcctggtcctaggtggccagtgggtatgaggagggctggaaggcagagctttgggccaaaagcaggcgttggggggtcccccctcaagtttggagccgtttccgtggttgtagcagaggaccggaggttgggttcctgattaaacttcactgtgtgttttctatctcggatcccagtctctgaagacaacttgctttgattcaacctagaatgtgttgtttgtctttatgtgggctggaaacgccacccctcctttcattcctgggtcactgttctgaggtctcaggcgtgtgcatatggcctctggaaggtccactctgggctgctgtggcctgggagcccagtgtccttggaggtcctgcggtctgggagtgggagcccactgcgggaggacggtgcgcgcccggcatggactggggggcgccggtgcctgagatgtttccccggtgactgaccccttctcagggtccagtgtgccctggcactgcccactcactccccagagcgtcctgccagcctggctgagctgcgccgagaacctgggcttgtgtgaccagatgtggtcactgcctgccacagaacggggtgaccctggggccctgacctgagggaagcaggatgggccagagggagggacgggctgggagttgagcccagatgcctgcttctcgggacccagggcgtggccttcccaaggtcacccggacaagtatcagaaggcctggtcccccccctcccatgtctgcctttagggagtggcaggtggggccccttcccaagtcctggcccacacgggccctgccttggagcttgtggcattggcccctgaggtccctcccgactgatggtatttgagcccgctgtacccccacggcctgtcttctgggactactgcaaccctaggagaagccctctgagtggcccttgcaggggctgccatagtcacacgtgtcttatctgtcacctccattgtggaggggttggcccgccttcccaggagcaggtcccctcatcccaactgcagccctgccccctgggggttctgctctgtgttggaatgccccttgtgcccagccctggcgccgccttagggcgggaggttttgctgtcctgcatggagttgcaagagtggtcaggggcctccagcccagggtgtggacgagtgggctgggcttggtcgtcagagccaaggcggctgcagcagcgtcttcctcctcctaagaggcggctgtagtggccatgcgggacgagggacttccttgctgctgcgctcggtggggggttgcggggggagggggtgtgtctgctgcaagcagggagctccagccggtggcaacatgaaccgcagggagtactgggtcagcctggagggggagcaagcagtggtcagggaaggcttcctggaagaggtggcatcctcacaggcctgagcccgggaaggctgtgagagggcgaacggtcttgcatggggggttttaggtgccccccatccccgtgactccatttaccagcggctgccgtggaggtagtccagtgtgctggagctgcgccagagcgggggtgggggccggcgctgagacgcggtgctagctggaggcggttcctgtccggggtgtgcgtccgcgtgcagggtgcgcgcgtgtcttggccgcgcgtggcggcgtgtgcggcaggggcgggcaggcgggcgactcggtgacgcggcccaagcgcggcgccgagcggagcgggcggagcgggccggctggggcggagcggagtcgtccgcagagcagcccctcccggccgcggccgccgaccccggaccccggcccccggccaggctctatggacaggagctcgctgctgcagctcatccaggagcaggtgcgtcggggggtggtctggggagctggcaccgcccccaatgcggccctcctgccgctgagctgagcttgtgcgggaccgagctccccgaaagccccgctcggtacctacctcatccctccacgaccttggtccgtgtgtctgggaccccaggagaggactgactggaccagagctcctggctggagaagggagagtcggggggagggagggagggagggagggagggcgggcagctggctggtcttggaccttggccctcgctttccaggatgggtagggtggaagacgggggaacaactgaggagctggaggactgggacccaggcaccagtgccctgccagctcctgggatcaagcagggtcccagggaacagacaggcacggggcccctgtcccaaaagtgctgggagcctgagcctgatgctcccagccagcctggcccagccctttggtccaggggtcgggcccgcactcaggccttggctggcggctcctcactgcagcagctggaccccgagaacacaggcttcatcggtgcggacaccttcactggcctggtgcacagccatgagctgcccctggacccggccaagctggacatgctggtggccctggctcagagcaacgagcagggccaggtctgctaccaggagctggtggacctggtcagtgccacggtgggcaggcggcaggggcacggtgtcctggccagaggaggcgggcaggcagctcctcacggcggtgggtggggggcttgtggatgcggggagctgggtgagcctcacaggcaggggtgccatggggaggtccgtggcccacactcaggcccctgcccccagatcagcagcaagcgctccagcagtttcaagcgggc

SEQ ID NO: 6933 - DNA, 6000 bp, Homo sapiens
tgagcataatgattttgaaattcatttatttttttcgtatatgagatggtattgccctttttatcattgggcagtacaccatagtgttaatatgccatactttgttcatctattgatggaagtgtgtgtgtatatatatatatattttttttttttaaaccatttttggctattgtgaatggagctgctgtagatattcatgcataagtctttgtgtgaacacgttttcatttctctcgggacattccttaggagtggaatagctaagtggcatggttgggtataagtttaacttcttaataaagtgccaaacaaaactgcctgtatccatttgcactcccaccagcagcctctgagagttccagttgctccacttccttgccaacacttgtcattgttggtccttaatttagtcattttagtgggtgtgtaatgcgcagtgttgcactgtggatttctcactgcggatggaatttgcatttccttaatgagtaatgtctagtgggtgtgtagtgagtggtatctccttgtggatttcatttgcatttagtgagcggtgatgacgatgagcctcttttcacattcagattgatcgtgtgttgtgtattttttgagacagggttttcacccagggtgtggttatagctcactgcagcctcaaactggcctcaagctatcctcccacctcctcctcccaagtagatgggacttcaggcctgcgtcaccatgcctggctagtttttaaattttttgcagagatggggtcccattatgtcacccaggttggcgtgcagtggcgtggtcatagctcgctgcagcctcaaactcctgggtcaagtgatcctcccacctcagcctaaagtgctgggactacaggcatgcaccatcacacctggcttttgtatctttttgtgtgtgtgtgcagtgtctgtttaaatcttttgcccatttttaaataacagctttactgagagataatccacactatacagctcacccatttacccattggaagtaccgttcgggcccagtgtggtggctgcagcctgaaatcctagcattgggaggtcaaggtgggcggatcgcctgaggtcaggagttcaagaccagtctgatcaacatggtgaaaccccgtctctactaaaaatacaaaaattagctgggcgtggtggcacacgcctgtaatcccagcactttgggaggccaaggcgggctgatcacttgaggtcaggagtttgagaccagcctggccaacatggtgaaaccccgtctctactaaaaatacaaaaattagccgggcgtggtggcgggcgcctgtaatcccagctactccggtggctgaggcagaagaatcgcttgaacctgggaggcggagcttgcagtgagccgagatcgagccactgcactccatcctgagcgacagagggagactcatctcaaaaaagaaaaggaaagaaactccataccccttagaagtcagtcctcctgactggtctccctcccgcgggtcttacgaaaccactcatctacttcctgtctctctaaattgacccactctggacgtttcatctaaagggactcgtacgacgtgtccgtgtttccaggctcagccgcgttgcagcacatatggcctgggttttacgggattgtctgtcttatcattgaactgcaaatgttccttgtcaattctgggtatatgtcatgcaaatatttctcttattctgtggcttggctctttattttcttcacggcatcattcaaagagcagcagtgtcagtcatggtttctgccttctttcttccatctaacaggtctttgcctgttccaagcccacaaacacttcctcttgaatttccttctaatggttttatagtttcagcctttatactcaggcctatggttggctttgagtaaattttgcatataatatgaggtaggaatctacgttctttcaatcacatagacacatagatatggccgggcatggtggctcatgcctgtaatcccagcactttgggaggccgaggtgggcggatcacgaggtcaggagatcgagaccatcccagctaacacggtgaaactccatctctacttaaaaaaaaaagccaggcatggtggcgggcgcttgtagttccagctactcaggaggccgaggcaggagaatggcatgaacctgggaggcggaggttgcagtgagcggagatcgcgccactgcactccagcctgggcgacagagcaagactccgtctcagaaaaaaaaaaaatcacacagatattcttatttttcttctttctttctttcttttttttttcagtagagacggggtttcatcatgttggccaggatggtcttgatctcttgacctcatgatccacctcggcctcccaaagtgctgggattacaggcgtgagccaccacgcctgggcttttttttttttttttttttttttgagatggagtctcgctctgttgcccaggctggagtgcagtggtgccatctcggctcactgtaagctctgcctcccgggttcacgccattctcctgcctcagcctcccgagtagctgggactacaggcgcccgccaccacgcccggctaattttttgtatttttagtagagacggggtttcaccgtgttagccaagatggtctcgatctcctgacctcatgatctgcctgcctcggcctccaaaagtgctgggattacaggcgtgagtcactgcgcccggcattttttttttttttttttttttttttgagacagggtcttgctctgttgcccaggctggagtgcagtggcgtgatctcgactcactgcaacccctacctcctgggttcaagtgattcttctgcctcagcctcctgagtaactaggattacaggcatgtgccaccacgcccagttaattttcatatttttagtagaaacggggttcctccatgttggccaggctggtctcgaactcctgacctcaggtgatccgcccacctcggcctaccaaagtgctgggatgacaggcgtgcgccaccacacagggcctcatttaaagattctttatagagatgaggtgtcactacgttgcccaggctggtcttgaacttctggcctcaacggaccctcccgcatcggcctcccacggtgctggctgaagggtgagcccaggctggccacagcgcgttttcatcattgtccgcagcttgcagtcggctggttcagagcttagccgggcacatgggcccctctgaggctcctgttcagggctcagccgtgtctacggggccctccgagctcttcctggaccctcctcggctccttcagttcagggctcagctgggcacgtgggcgcctccttggctcctccggctcaggcctctcctcgagctctgggccctgagtattctgggctccttccttggtttcctttggcctttggccgggaaagttgtgggtgtccgtggcagcctgggccacttcacagccccgcagccaacctgcggctccttcagagcaaagctgtgtggacacaaagggaacgccactcggagctggcctctccctttacctgtgagttcccgcccaagccggctgccttctgtcccctccccagagcccttgggtaactggtttgctacaagagtgtctggaatttttcagttgttctctgcggaagggagtttttaaaaggcccttaatcccttcttgacatttgtaagttgacgcttacacctggcagccttgctgaattctgtgtgcgtgaaggtccgattccaccgcgagtcacgatagaaaacccactctgtggagagaccagagatgaccgccgcgcacacctccgttcagcacacaaacctttgcaggtgttcatagcggaggcagattccgtactggggataagagctcacgacatgctgggaggggtttcaggggcagggagggggcttctgtggccccaggtcaggaggagcagctcttccatcagcagcaggcagccagcccagatgcgtagggaagacagctcccacttcgccaggccagagagcgcccgggggcagctctgttccagtcgaccctgcgagaaaggggtgtgcgtgtgcctggagctgggccccgtcctgcctccctgacctgtgtgctcccacagccctgagacggacggctcacagccttgcgaggcccacactgcactgggggtcaggcttgtgctcccgggagtcctgtctgggctgcgtggccaccatccagagcctgctgacctgcgactgggggggccagtgctccctgggtttcagcacctgagaatcagagtgggatcccgtgaaacctgggcccaggctcccacccacgccccacacccacccagggaagccatgaaacctgggcccgggctcctacacatgccccacacccacccagggcagccgtgaaacctgggcccgggctcccaccctcgcccaccgagggcagctttgccttcctgggcatccctcctcccccaggcctggcccgctgcctgtccaaggctcctgtgcggggtctccacccacacattcctggggcgtgaggcgccaccactccctgctgccccgggcaaagccgtcatttgttccctttgacggcccgggaggctgccaggctctccacccccacttcccaattgaggaaaccgaggcagaggaggctcaggtgtggccaatcaccctgcacatcagagttaccctgggcagggcccactgagacctgggaggggccactcgggacctggagggctgggggctgcccgggcgttaggggtaaagctccctacccaactgcgcagaaggcctcagaggcctgggggctgggcttcccctttcacatcgccctttagaggcccacgtgtgggcattggcccgcgatctgaaaggggctgtcctgttcctcatgggcgctgccagcgccacgcactcctctttctgcctggccggccactcccgtctgctgtgacgcgcggacagagagctaccggtggacccacggtgcctccctccctgggatctgtaagtaacaacctttgagctcttcctgttgtggtgtggatggaatctgcaccttccatctggagaactggggccgccccaggccgggcttccagcaccagagcgatggtcaggcttcagctggacgcagatttcaccccgcagggcacacgcagacccatttgtttggaagcggcagtcctaaggcagtgcaggtgcctccacggccccagcccagctctcctgcaggtgtaaaggatgcagattccagggccccccatggcctgcagaggcccctcagagcaggaagggccgggctctcggggagcccccatcccaggtgctgaggtccttgggtcacatggagctggggtggggagtgcccaggtcccctgtgatccgatggccacgtttccctcctggcttcacgcaccccaagggctgggggtcccactcactgcccattttctggctgtggggggggtctgttttcttccaccttctcaaggtgttcagagcctcaggggcctccccacttcctctggggcctgggggagtagagtctgtcacccggaggctgtgtgcctccccgcgacattccccagtggccgggccgaccaggcaggctctgcctgtggatggggctgctgagcatgagcgtgtgacccccatttctgagctgtgggtggacccaccgggcctgggccaaggttttcaggaggcagctctattctactccgccatggtggcctccctgaaaggggtgagtgtagaagccagttccctcttctgcgagccccacccctaccccaggaggacaattcttgttcagggagggtctccccacccacttccccaccccacagtggcccacaggccccaccctagagagtacaaggggctccccaggctgctcactggcccagccccgccccacctggactgcacctgaaaatgggctcagagaggccaagtggcccaaaa

SEQ ID NO: 6934 - DNA, 6000 bp, Homo sapiens
gggaggacagccagggagcccagtcccacggtggtacctccatctccgggaggtgtgggctgcccacatctcagcttccctggctcccacagaatcacagggcaatggctccgagatggtagccccgggcaggctcggtgcacttgtgtctgagtctaggggctggacgcaggttcctgggatgggccctgcggtggtgtctgtggctgcaacgcggcatacccaggtgcccgctcccgaaagccagcaggtactttgtgcctggttttacatgtactcgggtgaattccacggacgcattccaccacccagggacgcagggcgggcaggtgcatgtgtcttagcagcaaccaacctggcagcccctgccatgtggcacagtcatgcctggagccaggagagggtgtgtccaaacccacgggccaggccctcgtgggggtgccaagcgtctggggggccgggaagtgagcctgcctccctgccactgccattgcatgcgtgtcctctgatggcctcacatggggctcctcacagcacctgggtgcacccactggcagcttcctggacgctcagtcggcgctgcggtgaaggtgacaccgggtgcatgggaccccagggaggtgccccaggcgcagcgtcctgatctccgattcgcgctcctcagtcttttgggttcggaactcttgccaccaactcagcacagggagaggcctgagcacccggcccaccagcccctcaggctgtgctgccctcggtcctctagagctccaggcaggaagtcacatctttacaatgaaacttctttctaacagcagaaaaccaaggcttgtctttctcctttatgctgaggtcctgggtaaaaatccacgtggaaggacccatgcgtgtaaaactagtttataaacggctcagacacagctgccccgtgctgagacacgcctcaagactgggggtccagggctccccagaacgctgctgggcctcatccgtcagcaaatgatgcacgtggagtgcagtgcaggggtcacatctgaatctcaaaagaaacactgtgtcctcactgcacagcttccagtcagttctacagatcggatggaagggatgccacggctcctcacagacgtctcacttctctaacatctgggtggtggcagcactggggcctcagtgcgtgaggcgtgatggccgcttcgtaaacaccacgttgtaagacatgcagtcttttttactctcctgtcccaaaagacttcacgacgggaatcttttttttttttttttttttttttgagacagagtctcactctgtcaccaggctggagtgtggtggcacgatcttggctcactgcaacctctgcctcccgagtgattctcctgcctcagcctcccgagtagttgggactacaggcatgcgccaccacacccagctaatttttgtatttgtagtagagatggggtttcatcatgttggccaggatggtctcgatctcttgaccttgtgatctgctcgcctcggtctcccaaagtgcttggattacaggtgtgagccactgcgcccggcccacaactggaatctttaaaaaatctcccgattgtgcacaccctctcccgaggcccaggtgtggggctggacagggctgggacctgcctctacctgccccgcgtggctcctttcctctcccttgtcctgaaaacaactggttccttccgtccacatccaattgcggtggaaaatcacaaacaagcacaggaatgtggcagctgacttgggtcccagacgggctcccctgtgctctgaacgccccgtctctcccacgcggaggccacccgtggggagcgggagagagcccgcccgtggggagcgggagagagcccgcaggccggccctggttttgctctggttcctggggcccatgtgtgaccgaggacccagccagcacaccgtcagatgcccgcacttccatgtgccctgtcctgggcattaagtctgcaccatgcgggccttggagaagcatgtgctgtatgtgcggccaccagtggaggctggacacgccctcctacaggcccctgcctgccaggccgaggctgctgggagaacccacgggaagggcggtcacagacccgccagaagcgtccagacccaggcgctctctgcaagctccttccacagccagcctcctgctcgagggcaccagccccgcgtgattcccacatcctctccgcgacggccggccagggctctcgggacagcctccactccggtgtggggttctggggtttgtgcatctgacataaattccaagaagtaaacaccctcttagttcccatccaagtcttgagaatttcctgttgtcccggccagtctgtggagtcacccacatctgcacttcatcagccccgaggcactggaacaagaagcagatgggcggcaggggacgcagccttcaaaggtcctgcagaagctctgccgagaccactctgtgtcaggatgagggtggctggcgaacagcggcttgacgatcatgcttgccgaggccgccccctccctccgtgtccctgttctgtgctagggctcccgctctgctgggtatatgggagccgcaggcacatatgtgggagggggcagtgggactccaccgtgaccaagaccccaagcaacagggagagcaggagggtgtgatgcactgtgggggaagcccaccgcccagctgcgagtccccttactgggagtcaccccccgagagccacagatcctcccaggagggtcgctcttaacttacatgctgctcccaggccttccgccctcccgcgcccagcctgccatagcgcgcagggttagaagcggcgtgacagctgagggcacagggacctggagcaccccagaagtgccaggagagtggaggccgatgctggcctctgcgaaccaggacttctgggggtgctgccgctgtgtaggagtctggccgtggcctcctccccactcaacctgaggaaaggaccagagcgggccgctgagacaatcaaacgtgtcctctgggctctgaaacccagcattggctttttgttggaagttagccatttgaagactcccgaaagattaatggtttagttaattaaggaggaaataaattcttcccccatggaaacttttgggagacttccctttcaaggcccccttctgcaccgtgtgcttaggaacactgagtgtttgagacactgcacccccgtccacctccgaggagcagggcacaggcaggaagggctggggacatccccccagggccttccgagccacccgggagagtgggggccggcagcaccactgtgccccgcacgccccgtcaggttccgggggctgagaacagaaatagaaacagcagcttttccctgggcacaagccaaggaagaggggaaaggagaaacctgacggacacgtctgcgacaaatccccggggaaaatcccccccaggcacgtccctcaggaagccagtggagaaacgcttctcaggacccagcacgcaccacgggctggtgaggacggagctgctgcctttctggaacagacacagggcgtgtgtggggaaccttgcttcacctgtggatatacagagccacatgccaacgtgtgaatggagactggtcccaggaagtggcagctctcgggaccgccctgagccagggcccaagcacgggcagtgcaaggacaggaaacggtcaaagctctgctgttaccacaggctgggaacaggactctctgtcccagcactgtcttgggcgtgtgcccatgaacagtttgcacggatgtgggacacctgcattcacgaagctttggagcctgggtaggctgggaatcccatgctgggtttcgggtctctggagatgggacagagtaggagaccctctcgtggtgtctgcccagctgggcagaataattctgagcagaatagacgaagatgcttctgagctccctggcagcataagctctgcccgagagcctgaccactcacaaggtgacctgcctagtcctgtccccagctgtggggggtgaccgttcccatcaatagcagaggtggcccaggccccacgtgacattcgctctgtcccaggccccgctgagagccccacccagcacatccagaatcttacccttcttgccacctaagaatgacctggcctcgaggtcctccaagtacaggtccctggccccgaggtcctccaagtacaggtccctggccccaaggccctccaagtacaggtccctggccccgaggtcctccaagtacaggtccctggccctgcaggtctgggtgaacttgctccctccaggcacacgggtctctccccttcccagcaatcctgtgatatctgccccccttttgagggcagcattcccgtggcgggggcaggcctggaacacacgggcggggggaggcttgtggttcctatggtcctgggggtacctatggtcctgggggcaactggatggctggggggtgtgaagtccccagggcaggcaatagtcgctcagtaccagcctccaggccccgggggccaccaggcttaaaagcaacaggcgagacgagggatctgtcccgcacccggcatccctggcctctcctctgggacaggaagatggggaggggcggcaggaggtgggcctggagcagggcctcagaagtctcctggcctttcccatcaggaagcacatcctgttggtgtctggctgccgcggcagggccgctatttgttgcggttggctacgccttccagctcaccaaaaacagtctcaaaaacaaccatttcctctctgctgagagccagggaaggcgagctctgcgcacacgggcgtccctgcagcagccactctgctttccaggaccggccaactgccctggaggcatccacacaggggcccaggcagcacagaggagctgtgaacccgctccacaccggccaccctgcccggagcctggcactcacagcaggccggtgctaaggagtgtggcgcgggctcgactcccactgctgccggcctcccgagtgactctgttttccactgctgcaggcgagaagaggcacgcgcggcacaggccggcctccgcttcccgggaagacggcgcactcctggccctgggttcttgctgctgcccaccctctgctccctgggatgggccccgaggcgagcagcttcagcacaggcctggccctgctccaggtgcaggaaggaggataaggccgggccgagaggcggcacacctggaccatcccatgggcctccgcccgcgccgccccgaggatgagtggtgatgtcctctagccacccctagcagcgtcggctctccctggacgtgcggccgcggactgggacttggctttctccggataagcggcggcaccggcgtcagcgatgaccgtgcagagactcgtggccgcggccgtgctggtggccctggtctcactcatcctcaacaacgtggcggccttcacctccaactgggtgtgccagacgctggaggatgggcgcaggcgcagcgtggggctgtggaggtcctgctggctggtggacaggacccggggagggccgagccctggggccagagccggccaggtggacgcacatgactgtgaggcgctgggctggggctccgaggcagccggcttccaggagtcccgaggcaccgtcaaacgtaagtccaattgttttcctgatgccttcagcgtggccgaggctcgagggcacatgggagatgttaggcgcggacctggtgagcgggtggggaggcctggcccctgctctgccctgagcgtggcctctgggcaggcaggagggggcactgtgtctcccagggaaccaggccccaaggccccctctccctggtgagtggtggccccacacactcctcctgctcagcacagaatctgcctccagctcttttacacaggaattcatctcaggcatttggggggcctctctgccgttacacatagttaagagatgggtac

SEQ ID NO: 6935 - DNA, 6000 bp, Homo sapiens
agtttgctgaggagcagggacctccaacaggtgaggactggggctatctgagcctcctcctctcgtctcagaagccaagctgtcgggatctgctgctgggtactgctcctgccacagccacagggcttccaggaagggattccctgccttgtctggcactgaaggcggtttcccgcaagttagggaagactccactttgcctgacttctagagtaggacttctggttttaaaatcttggaaatccactgcttttgctcccaagagccatctcttcctcactgagggatccaagagccagcactggcccttgcaggtgtttctaggccagatgtatagggtagagccgccattgttgctataaggctggtcagttagaatgaagtctcttgctgaactgacgcaccagggcctgccctcagatgctaagaaacaagtccagttttcagttacaaggctgtgcccagccccacccaggccacactctgcctgaggccagggacactggatgccgcttcctgggtgttaggagcttataaaattgccaggtctgtgctgtaatgtgttgccttgaggcctcgttggagtttgccaagctgtccaggtgggtgtttgcgcagccctgggagttcatcacacccggggagctgcagggtcagccctgttctgggagtgcctgtaccttggagcataagggcactcccaggtgtagttcacagcagtgccccagctctccttccttgacagcagacagggaactggcaggggcagtggagccgctgcgtcctctcattctttacctgctctccctacacaggctgtgcaggaaccacccagacacccgcacccgggcatgcttcacacagtggctgtgccacctgcacaatgaagtgaaccgcaagctgggcaagcctgacttcgactgctcaaaagtggatgagcgctggcgcgacggctggaaggatggctcctgtgactagagggtggtcagccagagctcatgggacagctagccaggcatggttggataggggcagggcactcattaaagtgcatcacagccagagcctgttgtgtctcagttgggtggtccccaggacactgcctgtggggacctgccctgcccctcttaggtttggagcagaagtggaggtgcccacagcaggtacccactggccccctcctcagtggagaccccaaggagctgcagctgaactgcaggggagggaaggaggagcagcctgggctgccccttgacattcaggatgtagcttcctgcccaccgcataccctggcgcctcactcctcacacgggaagacagcgggcctggctgggcatccctgtgcctgtccctggcggccaggccattgccttcccactatgcagccagggatgcccctgccccccatggctctgtgctgctcactttagggggctcaattctccactctgctcagtccctacagggaaagctcaggtcgggtctttctgagggtccaccagccatcctaccctctccctgcctggcacatgcctgccagcgttgtgtcatgcctgtccacaggggattcgtggggctcacttcatcagagtttgaagcccaaatgaaacgctgaagtgactgagaacctggcttcagtatattttctgctggggcttaataaagcagtagacagggcttgttccatccctctgtgctcagctgcatttcctgctggggtcctggttcctcaggagagagagaccacagggtgagagtgagccaggaacagcaaggacgttgattggttggggcaggggggccagagtagctgatgtaggagtactgggaggccagacggcacgaggtctccaaggccccagcaaagccatggcttctacccctagttcccctgacaggaagttcttggcgggtttggagccaggggatggcatggagtgatgtggctttgaagggtcctctggctgctgagctgggatgaggcaggtaagggtggaacaggaggggtggggaggaagccggggcagtcaccgagtgaccaccaagaggaagacccaccccacggcggggacagatgcggggtacgttaaagggagagccagagaactcatggggtgaggatggagtccgaggagactgctgggagccgccgtgtgggtcagagatggagaaggctgagtgcagcaaggtggggggtgactgggacccagcctttgggcctccccagccagagcagcccagcaacagtgtgtcctgtggtcataaaactccagggacctctatcctccaggagtctcagcctttccctgggcgcaggcccaccttggcatggccgcctcaggcctccatggagggagctgctatgtccccaccagattggccccgtgcggctgctggcttctgtagaggctgcccagaggggccaggtggcacaaataagagaggggagatggggggcagccaggagaggaggtgtcccttcctcgcccagacacagcgcgcttctctctggcctttcccgaggcctgtgagtgcctcaggaagcagctgggccctctgggaaggctgtgttcagcttaggaacataccgcctgtatctgctgtccctcccctgcccccctgccccccccaccgccttccctttttccctgtcttccttaaagtttcactcctgaataaaacttcactttgccttagaatctgtttttctttttgttgttgttttgtttttctgagacagagtctagctctgtcgcccaggctggagtgcagtggagcagtctcggctcactgcaacctccatctcccgggttcaagcaatttctcctgcctcagcctcccgagcagctgggatcacaggcgcccaccaccaccccctgctaatttttgtatttttagtagagacagggtttcactgtgttggccaggctggtcttgaactcctgacctcatgaaccacccacctcagcttcccaaggtgctgagattacaagcgtgagccactgcgccaggccagagtctgtttttgaaggcatccaggccagtggaactctagtgcaaggaaaagttctggcttgagctggtgttccagagctgttgacacgcagaccaaaggagttagcacagagggagagacctccccaggatcgcgccctgggctcctaaggctcacaggtcacagaggaaggacccatgagggaggaggacctccaggaggggcatagtggctcacgcctgtaatcccagcactttgggaaaccaaggtgggcagatcacttgaagtcaggagttcgagaccagcctggtcaacatggcgaaaccccgtctctactaaaaatacaaaaaaaaaaaaaaaaaaaattagctgggtgcggtggcacacctggaatcccagctactccagtggctgaggtaggagaatcacttgagcccctgaggcaaagcttgcagtgagccaagattgcgccactgcactccagcctgggtaacagagtgcgactgtaactcaaaaaataaataaataactaaagaaataaatgagtcgacagcagcatcagacttgcccttgggattggcacggagaggtcagtggcaaccttgagtttaggtggcggtgggagctgattctgccgggtcagagggagagagaggagggtgttgcaggcagagtttgctgctaaaggaagcagtaacgtaaggcagctggaggggaggtggggtcaacagtgtttggcttttaggagaaagtgcagcatgtctgggtgctgatgttagtgatgaagtagagaatgaatgacacagaggggaggtctgtggccaacaggtgagaggggttgtgatcggacgcacagtgtgatggacttggaacacagtgagtagcgcctctggcaacacctgctctgcccacctgtgcccagcaaggctgaagaatgagctccaggggggctgggccacgcagcaccatctgtgcacccggctcgtgtagcagggacctgggttgcttattatctgaagtacagggtggtaacagtctccgccactacacaggtcaagcgcttggcgctgtaaatgtcagtgcagacatctcagtgctctagacagaaacctaggagtcatctgaacttccagcctgctaggaacatgaggagagggaccttgttgcacccaaggctggggtctgtggaggggactcagcgggacacagggcagccaggcaccacccccacccgactcctagtctctgatgccgctccctgccctccattccagactaggcgccgcaagtacgctggggagacccaggagtagggagggcattgggagcaccaccacctggccacgggcaaggagcggagacaccgaaaccaacactcccagcggcgctggccacggtggctctgtcccctccctcaacaggtgctcctggggccaacgcctttcttcccaccagatcctccccgccagaggctagaagctgtgatagcagctagagcacagtggggggccatgagaaagaccccagttatccatctggtcttcttgggaccagggccagggagccggtcccctctcccgtgggttgggggaagatgctgcagcccgtggacctcctacccctttactccctcacccaagtgcccttcccagaggagcggactcctcctgtctgtcctcccggctctagcaaagtctgcgcccagcacccgagccccaccctgcccccggggacctggctggtgggttcctgaggatggtctccatctcgggaccggggcaggcaggtgagggtgggggatgggaggtgggcgcggcggagggagaggagggacccggccccgcgcgcatggacccagtggggggcgcgggcgcggccccgccccgtcccgcgcgtccccgccgcggccggcgcgcgctcccgggaggcggcagcggctgcagcgttggtagcatcagcatcagcatcagcggcagcggcagcggcctcgggcggggccggccggacggacaggcggacagaaggcgccaggggcgcgcgtcccgcccgggccggccatggagggcgcctccttcggcgcgggccgcgcaggggccgccctggaccccgtgagctttgcgcggcggccccagaccctgctccgggtcgcgtcctgggtgagtggtccctgcccgggcccccgctcccgcccctgcctcgcgaccttcaggcccctaccagccccctgccccctaccccctgccccctgcttctcgccccccgacctcactcactctcatcctcgccggcccctcccccgccggcctcaggttggggtgacgtcaccgggcagggcgcgcccacctgcgggcggaggaggggccggcggcgccggagagggaccttgagaggtcaccgccggtcgcctctacccctacctcctccccgggtctaatttcagtccctttccgcagcccttactccgtttttcctgttctcgtgacctggaagcagggacggggtggggacggaattctccgaggggcaggagggggctacgggaaccgagaagcgcctccccttcccccgcacacacaccctcgggtctccttggcagggagcctgtcccctggcccccagttccagctgtgagttgagggaggagaggctctgggctgggagggcttcctggcggcggtgtggaaggcaggtttgggagcagcctagcccactggggcgtccctgggagggccctgctgctccttccctccggcaggggaggtggcagttgggtgccgagctctgggttttgtccaggtggcaacctctgggccagccgcacctcggcgcctgtcttggaggagggcggtgcccacggtggggcaggggctttggcctcccctgcggagtggctctgaccagaccgggaggcaggacgctgcgttttggtccgagcgcacgtcccgacttgtggcccactcttggggacaagtgcatgtcccggcttcccccttggctccactctc

SEQ ID NO: 6936 - DNA, 6000 bp, Homo sapiens
ccagcaagcattgggggagaggtggtcctgggcctggctccaggatgcctctgtggaaccagctccccacccccacttctagaagcccccctcccctcactggtaggtcctttccatctccaaggtgtgtctgtctcccaaatgtgggtgctttttatctccaccccttcaattctttttcttttcttttttttttttttttttttgagacggagtctccagcccatgctgaagaggcactatctcggctcactgcaacctccgcctctctgcctccccggctcagatgattctcccacctcagcctccccagtagctgggattacaggtgcccactaccacgcccagctaatttttgttttttttttttttgagacagagtcttgcactgttgcccaggctggagtgcagtggcatgatctccgctcactgcaagctccgcctcccgggttcacaccattctcctgcctcagcctcccgagtagctgggactacaggcgcccaccaccacgcccagctaatttttgtatttttagtagagacggggtttcaccatgttggccaagatggtctcgatctcctgacctcgtgatccgcccgccttggcctcccaaagtactgggattacaggcgtgagccaccgcgcccggccaacagccaattcttatggagcccttggttccatctagccctccctccggctctgtgctgggtgaagaggtggtcacacacctcacagggcaactcattctcctgcgagctcattccttcccactcctgcccctgttcctcactgaacctgacctctaagaacatggatgtcctgacctcgtcaccaccacaccacgcctcaagggctccccactgcctatgggacgatacccgtgctctggcagggctggctctgtctgctctcaccgcccctcccactgcctcctcccccttccccaccgcctgctccagactgcagattccaggacagcccgggacctcccccgccgaaggaggactccagggccccaggctgggttaaatgttcttcctggggctgcttcagctctggcctccccttgcgcaggccaaggtgctcaaagctctgttctcgcggggctggcgggggggcgttcagtgatgttccctggtgcttgcctggtccaagatggggagacagagcccatgagaggcttctctgcctcccccactccacacccttattcccctgcagcgcaaccaggcctagggcgccagcctcaccccagtccccaccccacaggactggatcgagtggaaggaagccagatgggcaggatcctggggcaactcctcgcacgatgcaatgccaccagttccggccaggtggcgctgcgcggctactgttccgggcggtagcgtccgactcgcgcctccagcaacgggcggggctagagccgcagtgggcggggccacgacgggtgggcggggtcgccccgtcggcggcagcggtttcctgcctctccccactcttgggtcgtcgcagtcccccggccttctctctctgtctggtctgtgggtctctgttggtcacctccttctgtcgcgctggctccgcctgctccagtttcagaatgtaaagagaggcatggtgcagcctgagggaagaggccctaggcgcggtctggttatgcttgaagggccattaatgtccattaggaagccccgcctgcctgagcagctctggaccattaccgggagtcggaatagtggccccacccccagacagggccccaggccacggccacaccccggagccccggtccaggtccaggctcgggctccctgagatcgctgggaccttgctggagggatgcgggttcaaggcccgaaggaaaggtcctgccaaaacaggagtgcacgggcggcccccaccccggtggaccccccaccgacagcccaggggaacggctgagacctgctctccctctgctggataggacccacgcctgggtagcatgctggcaggcgtgggttaagggggttgggtggagagttgggggatctcccaagcctctgattgcctctgccttgactttcttccctcctgctggggcccggggagcccacgtcacccacaccccatctgcaccccacagaaccaggaaaataaagtccaccctcctctcgatgctgaccctactccctcccgcccacctccctagccctttcttcgagacaccaagcactttgcggcccctgaacacctttgcccaggtgcttcccttcgcctttctctgcctccagcgcagcacccatacgggccaaggtcagcctcggaccagggctgagagcttccggaggctggctggagaagaggcctgggagggtttgcccccgagagcttctaggtcacccttcctcgcctgttcctccaggcccctggactcactgtcccctctcactgactctgcacctcctctgaaatcgtgacctctggttcctctctggctgcctcattcctcctgctccctgctttgctaggcccacttcctttgttgcccggccctttgctactctgttaccctcctcagctccttcatggctttggggactcttttgttaactctgtagcagcagtgtgtccggtgatatttccttggttcctggccctggttgtgacctcatgtcccttgtggcccctccctctgccatgctgttctccatcccatctttttttttttatttgtttttaaattatttatttattgtttttgagatggtgtctagctctgttgcccaggctggagtgcagtgacgcaatctcagctcactgcaacctccgcctcctgggttcaagcgattctcctgcctcaacctccccagtagctgggattacagatgcccaccaccacgcctggctaattttttttgtattttcagtagagacggggtttcgccacattggccaggctggtctcgaactcctgacctcaggtgatccacccacctcggcctcccagagtgttgggattacaggcgtgagccactgctccggcccctcagcccatcttcagtcactgggagtaggaatcagctgagtcctgggccagggaaggatggtgtatgcccaaggctgatcaggcgtctgccccacccagggcgggtaaggtctgcaagcccccttacccaggggacctggggctgctggagtctcccatccagccacctccctcgactctagtgtggccaggaagctacagcctgccaggttttgggtggacctggttggtgtgggatgaccccctaagcccaaacaggtgtggtatgtggggtgcgtggtggtgggtcacactgcccacagccatcttcacagactccaagggtggcagcaccaggctgtgtccagggaggccagccacaggccagacaggcagcctctggacatgcagacagagagatggaagcggccggccgggcgggagcctgaagcagccttacccaggaattgcaggggttggggtggcgagcagtcgcggcgcctcagcctaagtggcttttaggggcagctgccgggatatgggcacccagggggccatggcccaggaggctgcccagaggcgagccctgtgcttgggtgggggcaggggagcccagcccagggccccggagagacgagagggagaggaggactgcgccaagcctgcttctacggctcacatggggaattgcctgggctggctgtgcctgacccctgggaaccaggtatgtgcaagggggcctggctgggctggggaggagggcagactggggctgtgcctggactcagctaccttcctatattggagacagaggaagagctgggtggtgaagatagcatggactccgaatctcacatccctgggcccaaatggagctgaggaggcttcgtgggtcttttccctctccaggcctgtttgcaggtctgtgaagtggccggtcccctagggttgttccaggtaaaatgcacttaggcctaaatgatttcactgtggtggtgactgtcctgttggggaaggagggacactcgtgcttcaggtagaggctgagggacgtggacggctgtgggcaggggaggggaggcctgctgcctgcctgtggacactgtggagcagcgcctgtgcacacccagagcttagagcccaaataattcagtggagtgtagcccatgtcaggaggtgggtagcagggaccctcgagactcatatccttttgtcaccctgcaaagtcacagtccaggcctggggtgggctgggacacaagtgagggggccggcccggccaagggaaagaatggcagcagggcgtgggaaccgacgcggtgcagataggccgaacacggtgggtaggccagggagtctcccagccactggcccccaggatgcagggaggggctgctgcgtgtcacttttaaagccctttttgcctcctgggccctcctgagactctgccctgggccagggagtctcccagccactggctgggagggatccaggtgagacacagccgagaggagacaggcaagggggtccggaagggcttcccggggagggtggggagggctgtggcccttgttcttaccctttggcccctttgtcggggtcccttggcctggagaccctttgtccaacccgtcgcccacctcaagacctgcctcgatgctgcgcatacagtaggtatccaataaatgttcctgggatagaaggcaaaggcgctggcaccaaggcggctgcccagagtaggggcgagacagagaggtcccggtggttaaggggtcccctagccctgccgcctccccctgccccgcctcgggctggccgggcgcggaggtaggggcctggccgggacggctgggactggaggcgggggcggccgggcggcgggggcggggaaggggcgggcgcggaggcggtgccgcagcccgagccggagcccgagccggatcccgaggcgacgggagccgaacaggagccgccgctgaagccaccgccgggtgcccagcgccgccgccgcccccgagctcccccgcgcccctgcccgcgggcggccggtgggcagcgggcgccatggccgcgccggagccgctgcggccgcgcctgtgccgcttggtgcgcggagagcagggctacggcttccacctgcacggcgagaagggccgccgcgggcagttcatccggcgcgtggaacccggttcccccgccgaggccgccgcgctgcgcgctggggaccgcctggtcgaggtcaacggcgtcaacgtggagggcgagacgcaccaccaggtgggggccagcgctcgcccccggcccgccgccccctccccgagcgcgtccccctggggcgagcaggggtcgcacgggggcccgagggggctcccgcggggaggacgcggacgttgtcgggaggcagcggcccggcgccttcggagtcccggcgcaggaagctcagtcctgcacgggggtgggggggggcatcctggcagggaggggcccgcactgcggctcctggccgctggcctcgccctttggtcgcgttttggcctcagtgtgccgtgaaggagggtgttgggccgcctggagcccctccggaaaggtgaagacctgggtgcttttgcctgggtgtgtgtgtacacgtgtgcgtgtgaacacagctgggcgtgtgtatgcaggtccctttggggtcagccatgtgtgcatgcgcctgcctgtgcgtacccaggaggggtcgcagtaaaggcatcagtgtgtctgcacctgtgtgtgctgtagtgtgtgtgtgagtatacaggtctgcacgtgtgcctgtgtgtgtgcaggtctggactcctgggcgtatgggagctgggctctgtgtgtgtgcacgcctggctagtgtactcatcactgtctgcaggccggtgagtctttgtgtctgtactctagtgtgtcccagctggtgtgtctgggaccgggctgagttggtcattgctggcaaccacattccttagctacaaagg

SEQ ID NO: 6937 - DNA, 6000 bp, Homo sapiens; identical to SEQ ID NO: 3272

SEQ ID NO: 6938 - DNA, 6000 bp, Homo sapiens
cgtggtgcaggtgcagcccccggccctggtcatttggaagtttgtgtccaaaaaaacccaatggctactatagcacctgtgagccaatggggtcctccacctgcccacctgcctgcagaagaaacgccgaacactgctgcctagtggtcagggccggctggactccctgcccaccccactgggtcctcaaagaggagggcccactcaggcccttttccatcaaccctgaaagcttggggtgagcgagaagggggagctgccctgtccttggggtcattgcagtcgtctgcctccaacctcttgccccctcagtgcctgctgtccagcgggagcagctcagggctccacctcccctgccgccctcgactttggggagcctccttgcaccaagcagcttgtacggtgccgagtcctacttgcaccacgttgtctttacctctggcattttattttatttaaacatgggaggcagagcttgcggtgagctgagattgcgccactgcaatccagcctgggtgacagagtgagactccatctcaaaaacaaaaaacaaaaaacaaaaaacttcactgtatcattgtttaagccttaacttttaatgataagaaaataaagcacctttggtcatacccctgatggtacacctgtgttcttggcccatttcctccggccctgctggggccacacatggctctcctggaagcaggtcaagagtgcccagtgccatctcccagcattgtgcccctctgggtgtgtcctcagggcaactcagaaggatagctgtctccaggagcaggtgcctgcagggacactgtcatctgcagatgaggctgccccccagccctttgtgatggcttcttccggagaagttgatctccccagtcactcttgggactttattccttgtctctttatccccatcctcccctacccttgccggggtctctgcaaaatgctgctggtccctcctgcagaagcccaccctacatttctctacggcttctgttggggtctctgacctgagtttctcaaagcccctcccccagttcctggaaatccccgctgctgtagcagtgacaggccaggggctcgtgacttgtggtttcacgccaggggggacgtagctgtgagggaggagagagatgtgtgtccctggccatccccaccccagagtccactccaccctggggtcctgcccggtgctgggagaccaaggagaaggagatctgggtccttcctagacctgtcactggtcatcagtcatctgtggagcccaccacagaggcaggccctggagctccagtttcaggttcccttggcagctgctagctggatgcctggcaaggctcttaaccttctgaggcctgtttcgctgaccagaaaatgagggtcacggtgagagtgaggggtgacggtgcccagacagggcctggcccaccctggtgctcaggaaatctctcctgtgtgtgtctggcaccctaccaggtcaaggacacagaaaaagagtcacagcgaccctcagtgggggaggcagtgagcggaaaaaaaaaatcacagaggttgggcgtgggctcacgcctgtaatcccagcactttgggaggccgaggcaggtggatcacgaggtcagaagatcgagaccatcccggctaacacggtgaaaccccatctctactaaaaatacaaaaaattagccgggcgtggtggccggcgcctgtagtcccagctactccagaggctgaggcaggagaatcgcttgaacccgggaggtggaggttgcagtgagccaagatcgcgccactgcactccagcctgggtgacagagtgagacgccatctcaaaaaaaaaaaaaaaaaaatcacagagtgtgaggggagcatccagagaggcctgaagggggtgtctgaggaggaagaaggaggggaaggaaagtgggggcttcctggaggaggtggtgttctaaatactgagacccatttctttttttttttttttgagacagagtctcactctgtcgcccaggctggaatgcagtgaggctgtctcagctcactgcaacctccgcctcccgggttcaagcgattctcctgcctcagcctctgcagtagctgggattacaggtgtgtgccaccacgcccagctaattttttgtatttttagtagagacagggtttaactgtgttagccaggaggtctccatctcctgactcgtgatccacccgcctcggcctcccaaaatgttgggattataggcaccccgccaactgaggtgcatttcttaagtagggagtgaggaagagagttggtgcagacacaggtgatgcagacacgttggggggctggtgatgagaagcgggaggggaccagggagggctcttgaggggccgaaggattccaggatggaaagtgccctttggaaagaacctgtggctttaaggtgaagactcggttgattgggggtaggcgatgagaagacctaggccaggcagcggcaggggcaggggcgcgggcgcggacacaagctggggaggcaggatctcgggatcctgagtaatacagagtggggagggagcagtggcgtgacgtcaggctgcggggggatgggcgtgccttctgcgggaatggaaatagcccagtggaaggtggtggtgaaggggtgggggcgagctcagcttcagacacgccagcttgaagtgtcaggagccacactggagacccggtgtgacctctcacactagaacttaggcagaaaatgaatgggtaagaggccagtgagcacagctgacccactccctgctcctgcaagagggaagtctctccacgtccccatgtccccagtcctggtgtttcagccacaatggagttaggtgctctttgcccaccctacaatgttttgtttgagacgaggtctcactttgttgcccaggctggtcttaaactcctgggatcaagcaatcctcctgcctcggcctcccacagtgctgggattacaggcgggagccaccgtgcccagcccacccctgagcttggactgtgctgtttctccatggtgggctgctctgcgccacctttccttggtctgaattcggccccaggcacagccttcctggcctaggctttcctggagggcttggagttatgggggcaggcactggtgttgctctcactcagagggcggtcggggctggaatggtgcaggtgagggacaagacggcgtaagatgggggacaaagccagggaaaggatgggatcaagcaggggaagggcagagctaggggtagccctgggtatgccaggacctgcagcaaaattggggctacagggccttgtgactccaggaagaatgagggcgtctgagatttaggaagtccgcaggagagaggagagtgtgtggagagggtggcaggccacgcagcacagaggtccacttggacagcctgacagatgtccttctgcttagagaaatggcggtcaccagtgaccttggcaagggcaaggagctggagagggaagggcaggtgaggaggtggagacagagtgaagattcgtcttctcagaaacaagggccgggcaagaaagagggaggagcagaaagggcctctggccgtatctgttgcctcctctcctttgaaccaggacagacttagggactttcacgggctgcaagttccaagagtggcagacccaggctagcctggggaaggggcttgagggaggctcctgctggggaaggtggggctgagtccagcaggagggccagaccaggggccatgaccccattgcctacatagagaaggtgatgagccagcatccaggctactcagggagagctctaacccaggatgaggccttagagctcaaaggacactcaggcctggtggcagctgcccagggcccctgaaagggggaatggagatcaggcagagggggtgccagggactgccacacaggatcagtagggcagcgccagccctggctgggctgctttcacggctgcgggaaccgctccaactgctccagaaagacagaaagatggccctgaaggtgcaggctttgcgtgagtgggtggctgcaaggacaggtgggaggaccaggacgccagaacgtgcagagcccggggggcctccagaggtcgcagttccgacagggcttccaccagtcatgcctacatcttgaggggcagagacacaccccactaatgtttgggtccctgatgcaaaggcagagacaggtgcggggagggggtcctttttctccgaagcgagaggtgaagtcaccaactgctgggtcagaggcagtaggtctgggtctggaggagactggggacagggtggagggaggtgaccgcagccacgggctgggacttcacaggtgtgggctgggggcttttccggacgctgtggcagaggaggcccgcgcgccgcacatctgctgggacccttagctcgcccaggattggtagggagatcctggaagaccagcgcccggaggggtgaggccccgtcttgggggcaaggccgcgaaaccacggcctgcagcttcacgccaggggtacaaagaaaagcgtcgccgggaacccaacacctgcagacgacgcgcagccgcagaggaggcggggcgtccgaggccccgccccgtatgctaatgaagcacacaccacaccgccccgccccggcgcgagaccggtccaacgctgcggagatccagaggccggcggcgcccggaaacacccgcggaggccgaggcagggcggggccgggcgccggggccgggtcgctgggcgggcggcacagcccgggggaggtcaacgggccggccgggcgtcccggggacgcgtctcccccacggtgcgaagtggtacggctcgcaggggcggggcccaggtcatgtgacgcggccgcggccgccattttgttctgcggtgctggtatttagagcgcagcggctgacgggccggatcgccttcgccgccgcccgcccgcaaaccttcgtgcccggcccgtcctcgcccccgcctccgccaccgcctcggcccgcagagcttgccccctccccacccgcagacatgtccgagtccaagagcggccccgagtatgcttcgtttttcgccgtcatgggcgcctcggccgccatggtcttcagcggtgagcgcggcggcgggagggactcgggggcgggggcgcgcgcgttgctcatgcccgcagctcgccggggtccggtgtgtgacgtcactctgacgtaatcccgagctgtcgggggcgcccgggcctcgtgtgacagcgggcgggggtcggcgccccgagggctgcggggagccgccgggggtccggggcgcagggcgtgcgggcctggccggggtgtgagtctcgggggtccgggccggcggccctgccagccgggtcgtgcggttgcgggggtggggcggcggcgccgctgccatattagccccgggagcggcgagagggaggctggggtgggggcgcgaggggggcggcgcgaggggggccgattctgcgggcaggtgacatcacacctcgaaggccccagtgcgcgggcggcggcgcgggtccggcccaggaacgcccagccggtcgctggagctttccggctggtggggagcccatgtcccccacgggaggtcctcagccctcgcccttatggcggccggccccgagggtcaggtgggtctcacccacaggcaggtacttccggttggagctggttacagttgcccaatacccgtgtcgctgtgtgggctgtttgggaaagctgggctgagggcttggttcggagagcccgcggagacccgggtgggagtgtgtggaagtggagggagcggggagacagcagcatcggcgctggcggggctgtgtagcttgcagagggtctgtgctctgaggtgggtgagagggtggcatgggtgtccgagtttatgggatccagtcgttgccctcaggactgaggcttccagttgtggtcctaatgaatggaggggtgaatga

SEQ ID NO: 6939 - DNA, 6000 bp, Homo sapiens
tggtatgtgcctgtggtgccagctacttgggaagctgaggtgtgaaaatggcttcagcgcaggtgattgaggctgcagtgagctgtgacggtgccactgctctccagctcccgtgggggagaggcagacattgctgcccacagacctgcctctgactcaactgtgtccaccctccctggtccctacccccaagtcacaggtgactcagcagtgaccctgtgtgccaggccagatccaaactgagagggaaggtgtcgtttttacactgctaatgacgagagtggctctttttagctaagcgagtacagacggggcctgggagggggcagagatgttccccaggccctgcctgtggttcctgcctgggccttggctgctgctgtgtgagagctgcatgtgagcctgtgaccgtgagctggggtgagctgggccgcacctaccctggggccccagggagcaggacgctccggggcccagcacgttgccctgggcctgtggccggagtcggagtcctctctcctcctcctggcttttggaaaggcttggctgtgttggggagtctctcttagccctttcaggaatttctgttcaggcttcctcctcctcatcagctattttacccatctcagaacgtatctctcagggcgtctggttatagggaaacaagtggagcagggacgtggctttaattggagcactcggctgggctgcctggggagactcttccgtgcgttcttcctctggatagaaccaccacctcctgggcgtcactgacaagctccatcttaacctccaaagccacagaactaggggctcagagccagagctggcagccgccagccgaaatgatgccattgcctgagctgacagccaagcccttctgtgggtcacctttctcctcaccttgctcttcccttttgaaaggcccgtgtgttttctttccttaccctgtgcttgctcatgtctactccggttttctctaccacatccttagagccatcacctggcacgcaggcgccttacattctacggtagaacgtggggtactgtgtgtgcacatagacacacttacgtggaattacagttgtgggtttatccaagatgaggaagatttcacttgctgtttaatagacttggggccatgtgcctccccacacatgggcaaggacaggtggaatgtcgggaccacactgtgcggcttctcggcacaaagtggagggaggctgtggtcgctgccggcctaggtgtcccaggtgccccgcctttctctgggacacagttgggggctggcttctgagggattcctttctcccctctttgtgtggccccagccagggcggtgggcagtcctggtgtagagcacaagcctctccaccctagagaaatgcctctgtaccacggctaccatgtggaaccttaacttgcagaaggcttgttaacaattgttttgagagagatggctggtcatgccacagctgctggggactccgcctactccagccctcttgggacacactgtgggatttgtggcccttccccagaggaattgtggagactgtcccatggaacaaaccctcaggcaccagcacagggctctgggtgactcagtaaaactaacgtttgtctctgacaagatcagctgtaggctcaccggccagagaagaccactgtgagcattttgccgtatatcctgccctgccatttgttcactttttaaactaaaataggaacatccgacacacaccgtttgcatcgtcttctcccttgatattttaagcattttcccatgtcatgagtttctcagaaacatgtttttaacaattgtactatttagtcattgtccatttactataatttatctgaccatttccctactgtaaaatacttgacggtttctgatttttccactatttaaataatgctgtgatgaatatctttaaaatcttctgatttcttactttttttccccttagatgcctggaagtggtattttgaggtgaaagagtttgttcattttgaagatatttctgtctctctctcgacctgatgtgtagacgctcagttccagtagcagaaccaccttagttgtgtcttacagattctgaacaaatcggtttctgataagccgtgtgttccaaagaatgtctgaataagaccgctctttatttaaatgctaagaggatgtcactactgcaatccatttgtggccgattttttccaagagccaatttccttgttttggttgcaagaacctggctctgcctgcatgtcagctctctgccctccctgctgccgtggctttcaagcgcttggcgatattttcagaatcttgtacttcatgtccacaatggtattgaatttgcaactgcgcagtcagcagagataacaagtgttgaactgaccttgccacatgcttagtgagtgatctgtaattaagtttatagactcagaaagtacattaggccatttggagtcagtagcagagcaaagcctctacttgaaaaaaaccacgtagctgattgggttttacaagagtgcatttgtctcccccttccacccccccaccttcaggtcttagtggttcacaagagcccagcagccaggctggctttttcattgtagggcgtggttgtcccagctggtgtagatttcaggccgcctccccccatctccctgcccacagtgttgcagattgcctggctggcagcaagtccagaccacccaaatttggttggattcttcatttctccactgtagttggggtccattgattgtgcaggggaacgtgcaggaggtttttctaggcactgcgttcagtgctgcttcactctaccagagattatggccaaattgcacggaatttggtttcttgccctctgaagcctgagggcccccccttgcctggctggttgacagacccggggtgctcactgctgagacttcagagatcgcagctgctgtgagaatacggtgaaggtactatgttctggaagatgttgtcatacacttttccccagttattttcaaacttgacatgagcctatgttgactcactgggtggggtcccttcttacgcagcacacgtggcaagtgcctgaatcggggctggaggcacttcagagcctctgaggggccaccacttctggcccaaaattgcagggttgtagatgaggctgcctgtggagaactggtgtgaggaggaagctgtttccaacaaagagcactttcatctgttgagatggctgtggtgagcaactgaacgagcctacgtgtgtacctgaattttccccataactcatttcttccatatgaagaaacaccaaactatgtacagagaactttttacaaaaggcagaccttttttaagctgtgtaacccacatagcctaaccgtctggcagaatgactacgaataggggtcattgtgctggtaaaagcctctattacgactgttaagttggatgttggcaaaattaaattgttacagtatttagagctgctgtagctgttccttcacaacatgaaataggataaatgactagtacgtctttcaggtgggtggcagtcagaacatgcgtaatattctctacctggtctgtagctgtaactgtgatgtacagacaaagcaaaaattaaaagaactcatgaaaacaaataatacaatggtattaggatatacacttttgtgtttttaatcttatagaaggttatttgctggctattgttggcctctagttcagcctgttatttaaattctttttttttcttgagacggagtctcactctgtcgcccaggctagagtgcagtggcctgatctcggctaactgcaacctccgcctcctgggtttaagcaattctctgcctcagcctccgagtagctgggattacgagcgcccacaaccacatctggctaattttttgtatttttggtagagacggagattcaccatcttggccaggctgatgttgaactcctgacctcgtgatccacccaccttggcctcccaaagtgttgggattacagacatgagccaccgcgcccggcctaaattctaatatatgaattatttgtattgaattcatgttcggggccacgttgttatatgtattgatatacagccttgaatgtgaataattactatatattttacaacttttttctggctttattacaaaaactttctttttttttttttgagacagactctcgccctatcaccaggctggagtgcagtggcgagatctcagctcactgcaacctctgcctcccgggttcacgccattctcctgccgcagcctcccgagtagcttggattaccggcgcccaccaccgcgccaggctaatttttgtattttcagtggagaccgggcctcaccatgttggccagcgtggtctcgatctcctgaccgcctgatcctcccgcctcggcctcccaaagtgctgggattacaggcgtgagccaccaggccccgcccttattatataaattttctattgggtcaatgatttaatcatataatttaatgaatctgttctttttttccccccaaatatttgtgctttaggtgtagttaccagatgatgaattttcctcctatgctccgtagtcttgtaataaaaagcatgtacagtgtagacgtttgctggcatggctcttcctttgaccagttcatgaactggagtcagggtgggggtgaaggctagggtcgaggtctgggtcaggcgctcgtgcaccgctcgtgggaggtcgaggctgatgtccgctgctccccatcagcgttagtgcccagatcaccccgtgctccgctcccgccggaagcgggcccagcctcctgcttttcgggaccggaacttccgcctaccgcgtgacgccggggcgggcgctctaccagggcggacctgtgggcgggacagaactcagaggacgctattaaaagccggacgcttccggtggaagggagctgttgcggggcttgctgggatcatggcggagaatcactgcgagctcctgtcgccggcccggggcggcatcggggcggggctggggggcggcctgtgccgccgctgcagcgctgggctcggcgccctggcccagcgccctggcagcgtgtccaagtgggtccgactcaacgtcggcggcacctacttcctcaccactcggcagaccctgtgccgggacccgaaatccttcctgtaccgcttatgccaggccgatcccgacctggactcagacaaggtgagggcctcacgggccagcccggagggtcctggccttcccggcctgcggctcctgcacacgccctgcttcgtgcggaggagacttcagcgggagcgggcgactctcctcgggcttcgagccccgcgctcccttgtcgccagctcctccccagcttgccccgatcccctaccctgggaggggagggtgaggatggcgccctggcgtccactgcctttgaggatcctgagtcgattcaccttgggggtgtctcttcctcgccctctttgctctttggtggaggaggcttcctagaccccggactttgctgtgattctactttctttttctcactaggttcttttgcccagggtgtgtgaacgccttctcttctctgtcccagggtacttgctggctctggaaacagaacccttggcgttgtttcacattctggacgtttgaattaacgctgacgtgggggttgatatgggcggccctttttttccctggtgacttgcatttagagagttggcgctccatcctttccatccacagcacgcagcacccactcagcacctcttagaagatgcgtccgtagtatatagtatgatttttcgaaggggattttgctcatattaagggttgctttagggatgtccaggaagggtcaggtaaggaatctttcaatctgctttctaattggcttagttttcccactgtcttcgcaaaaggacaggaatttccaggttagtttgcagcttgtctttcatcaagcgaaatgctc

SEQ ID NO: 6940 - DNA, 6000 bp, Homo sapiens
cggttggcaggcaccttccaccaggtcactcggggatccagctccctccaccctccccaaggtatcccctccgctcagttggtgaatggagaagagagaagctgaggctgtggcaggccagacctggcagggactttccagggatcctgtgaaagtgttctagcccgatatggtgtggctcacacctgtcatcctagcactttgggaggccaaggtggtggatcactcgagctcaggagttccagaccatcctgggcaacatcggtagactctgtctctatttatttgtttgtttatttttatttttgtttttttgacatggagtttcagtcgtcacccagggtagaatgcaatggtgccatctcggctcactgcaacctctgcctgccgggttcaaaagattctcctgcctcagcctcccgagtagctgggattacaggcatgcaccaccatacccagctgtttgtatttttagtagagacggggtttcaccatgttggccaggctggtctcaaactcctgacctcatgatctgcccacctcggcctcccaaagtgctgggattacaggtgtgagccactgcacccaaccaagaatgaaccaaccaaccaacctacctacctacctacctaccttccttccttccttccttccttccttccttccttccatctttgagacggagtttcgctcttgttgcccaggctggagtgcagtggcacgatctcggctcaccgcaacctctgcctcctgggttcaagcgattctcatgcctcagcctcttaagtagctgggattacaggcatgagcccccacgtccggctaattttgtattttcagtagagatgcggtttctccatgttggtcaggctggtcttgaactcccaaccttaggtgatccgcctgcctcagcctcccaaagtgctgggattacgggcgtgagccgccgtgcccggcccaagagccacatttctaacaagctccccggtaataatggcgctggtccaggctccgaactttgagtactgagagatgccactcctgctattcccccgctagccacacctcatgtaggggaagtggggaaatgagtctagtgtttgtgcaggagctggaggaactgggatcagtaaacacaggtagggagtgcagctaggaagcaggcaggaggaacacagctgtcccaggaagggggacaggacaaagtatcattgctgctgaggatgggtgaggtcacaactgggacttgcagcccctcagcaggggcctctttctgaacccctgggaaggccccgaaagatcccccagggctgctctcagggtctcagaggggcccacgaacccctaccccacccattcctcatccagctgtcacccaggagaggtggtccactgacccaccgccctcctgaagacagagtgtggaggtgaggcctggcctggttcatctctcccagggcctccccagcggcctccagggggaccccctgcccacagatttctggggcttccttttgccttggtggccctgatgtgcctctgccatgaggagtgggccccaggtggaacactgtcaccaccagagagatgagaaaaaggaaggaagggccgggcaaggtggctcacgcttgtaatcccagcactatgggagtccgagggaggcagatcacctgaggtcaggagttccagaacaacctggccaacatggcaaaaccccatctcaagattgcagtgagccgagatggcgccaatgcacgccagccggggcgacaagacagcgactctgtctaaaaaaagaaaaaaaaaaaagtctctactaaaaattcaaaaattagccaggcgtggcggcgcccacctgtaatcctagcactttcgtaggccgagtgggggggcagatcacctgaggtcatgagttcgagaccagcctggccaacatggcaaaaccccgtctctactaaaaataccaaaattaaccaggtgtggtggcacccacctgcaatcccagctattcgggaggctaaggcaggagaatcgcttgaacccaggaagcagaggttgcagtgagccaagatcgcgccactgcgttccagcctgggtgacagagcaagactccgtctcaaaaaaaaaaaaaaaaaaagcaagaagaccaagggcagctgagcagccccaggtggaacccaggcgtcctgactgcaccgggtctggccctgacccagagctcccggcaggaaagggctgggctcaaacacggccaccctgcaccgccttaagaagggcagggctgagcctgctcctccccttcctggggggctgactggggcaaagtggcctggtccctcctcttgcccaggtcccccaacttctcaccttctccctacttgggcagggcaaatcctgtgttccatgtcccataggagagaaatgccaggctggcccctgggttgcttctgcacctacctctttggctcctttctctctgccgcccccatgtggccaatctgcacctgtgcatctgcttccctcagagatgacatgccaagcctgtcaggccctagggaccccaggccgacccctgccccagtctggcctcagtctccctgtctgtgaaatgggctgctggagatcctgcttccaaagtgtcagctggcggcaacgacattcgaggggtgaggagcccctcagagcatgtgagagagtatctctgtgtgcccagaggtccctgaagaatcagagaccctggaagcgacatggaggcatgaatcagcgcccagcccctggatcagaccaggcggagcttgaagcccagttccaacgcttaatagctggtgacgcccacgagtcacccagttaccacctctgcgccccatctgcagaatggggagatgagcctgtcccctctcgcagggcgtcaggagggcagacatgccgctgcttgcagagccctgagtgccaaatgctggggaagtggtggggggtgggcttcttagttctggaagtttccgtgagtgacctgagactgaagtttgccgcagggatactccaccccactccatctcagtgccccagcctcagcactgagcacccacttcctctcaccccctgccccctctggaggagacaggcctgggccaaccgaaccgggtgtcacagtgccagggacagagggacggttctttcagaccctactctctcaagggaaggggctgattcctccaccagcgtcccaagccggccccctttccgcacagagtccttaattgtccctgtcgccaccttgccccatcctcagatggctgtggctgtgggggtgaagctccccacgcaccgccattgtgcaggcctgcccctaggacatcctctgtggactggagcccgggaggacttcactgagcccccgccaagagaaaccgggcagacaggtggtcccggatgctccctcgtcgggaagcgcagttgggttccagggagcccgtgggtgctggaggccccagctcagggctcagtgagccgggccagcctggcctctgagagggctcccggaggaggcgaccaggaccctggcctagagtctcagcaagtccatctccttcaaatgcccccacctcggctccacgcccctcctccagagcacactcgcgtgaggcgccagctggaagatcctcgcgggtcccagcaccgcagtgggtgcctgggcctgacagaacctccctgaaccccatctttcttctccatcgacaccggggcagagacggtgtgggggctgcagggcggggactggtcggcctgggctcgacagcttggcgagggcctggtgcgggctgggcaggctggactgaggggcaaagaggtctgggcggggcggggccgctctgggcgcccggcccccaccagttccttcccccggcccccgcctccgccctcccacgcacctgcgctggcctccccccaagccctgggggcagcgggcgggtggcgctgggagatcagaggactcggaggagtcgggcccagggggagggggcggggaatttccccccacgcctgcctgggcctgctcccctccccctcccccgccaggtggggggcacggctgggggaattccactgcagtgtgaaggctcgggagagtctgggctgggggtcccagggaagggcggggcagggggaggaggaggggacagactgggacctggggcgcagctgcctttctccccagacaccagctgcccctgcctgtcccggactgagcgtccacgactcccgcctgtctcgtgggcgcgggggcagggagtggagcttcctccgtcaggccagcggcatctggaccaggggcgggaggggcgtgcggatccgaagaaagtgtgcgcgtgagcgcctggcaatgaatgggagagagtgcgagcgcgtgcgtgcactgggaggagggcgcttgtaactcggacattccgggtgtcctggggcgcgtgcgaccacgtgagggggttctgtatctcccattttaagggccttccgtccgcttgccccgcctgtccccctccacaccttcccacttgaaccggcaccgacctgagggagagggggccgggaagcgctggacgcccggggtcgggggaacgggcgtgggaggcgtctggacctgctgcctccgctccagtgctgggcggggcttcccggcctcccatggggggagggagagacccagggggagggacccacggagggatgcgaggcgggcaggagtcagcccgttggagacctgggcgagggagacgccgagagctaggctcagtgggagggggcgggcgtagaggctgaggcaccgcccagagctcgctgagacagagactgagaacgcccccggccagattccccccggagagacccgggtagggacagggacagagagacgcctctaggggcagaggccctgggaggcaaagacccccaggagagatttacccaccccagacggaaagcgcggctcagagtcggacgaggggagactgtcagaggacaacgccccctaggtctcctgggagaccccgaagcgaccccgggggcagcccgggccgtgtccgggcgagggtgacctatccttggttgagagcgatggggacacaagccctgcagggcttcctctttctcctcttcctcccgctgctgcagccgcgtggggcctcggctgggagcctgcacagtccaggtaagtccccgcacggctgtcgggccgtgttcaccaccccttcctcggcctccgcccccagggccaggcccccaaggctagggagggggacagagcaggtggccggagcagctgagcagcccgagggctcctgcaggggcgggtgcggggtcgctggctggggacccaggcgggaggtggcgtaggggcgcgaggatgcccggcgtgggtccggacctccccaggccctgcctttgccgtgcaggcctgtccgaatgcttccaggtgaatggggctgactaccgcggccaccagaaccgcactggcccgcgcggggcgggccgcccgtgcctcttctgggaccagacgcagcaacacagctacagcagcgccagcgacccccacggccgctgggggctgggcgcgcacaacttctgccggtgaggggcggggcctgcgctgggggcgaggctgggctcaccattgcagggatggcccgaagcggggcctccgtgcgggcggggtggaggtctgccgtggactggcagcccagcctcctggagaacctgggggcggggccagaatgaggggcggggcggggcggggcggggcgcgcggaaccctggcgcaaaagggatcctcctcaggtgaacaatttctgcagagctccagttcagggccaggagagaaacggacctgggcactcaaaggacccgtatgggcggggcctggtcagagcgggggccgaatgggcggggccttgtcagagtggggctcttgtcatacaacttattttggggttcagagccacagctacg

SEQ ID NO: 6941 - DNA, 6000 bp, Homo sapiens
cccccagggccaggcccccaaggctagggagggggacagagcaggtggccggagcagctgagcagcccgagggctcctgcaggggcgggtgcggggtcgctggctggggacccaggcgggaggtggcgtaggggcgcgaggatgcccggcgtgggtccggacctccccaggccctgcctttgccgtgcaggcctgtccgaatgcttccaggtgaatggggctgactaccgcggccaccagaaccgcactggcccgcgcggggcgggccgcccgtgcctcttctgggaccagacgcagcaacacagctacagcagcgccagcgacccccacggccgctgggggctgggcgcgcacaacttctgccggtgaggggcggggcctgcgctgggggcgaggctgggctcaccattgcagggatggcccgaagcggggcctccgtgcgggcggggtggaggtctgccgtggactggcagcccagcctcctggagaacctgggggcggggccagaatgaggggcggggcggggcggggcggggcgcgcggaaccctggcgcaaaagggatcctcctcaggtgaacaatttctgcagagctccagttcagggccaggagagaaacggacctgggcactcaaaggacccgtatgggcggggcctggtcagagcgggggccgaatgggcggggccttgtcagagtggggctcttgtcatacaacttattttggggttcagagccacagctacggtctgaggcaggatggacccagcgggaggagagccgcaaagctcaggagctcacttctgcttttaagtggggttggaggccaggcgcggtggctcagcctgtaatcccagcactttgggaggccaaggcaggcggatcatctgaggtcaggagttcgagaccagcctggctaccatggtgaaaccccatttctactaaaaatacaaaaaattagcggggcatggtggcgggcgcctgtaatcccagctactcaggaggctgaggcaggagaatcgcttgaacccgggaggcggagcttgcagtgagcagagatcgcgccaatgcactctagcctgggtgacagagcgagactcgtctcaaaaaaaaaaaaaaaaagtggggtttgagggacggaagtggctgaggcccatgccgggtgggggtgaagaatacagatggcctcaaagtcctcatatatggagtcaagtctagcaacagctgaagcctaaaaacagctctcaagtcccctttaatgacttcccgctgtccactcggaagtcgacgtccagttccttcatcaggcagagttctgcgtagacaaaactggaatttgtgggtgtacagcaggcagcacagccgctcacaggcacagagccttgaaggccactttgagcataggctgcggggccgggcctgggtttgctattcttggggtggtgggagccccaccacctccctcccacccgcagtaacccagacggtgacgtgcagccgtggtgctacgtggctgagacagaggagggcatctactggcgctactgcgacatcccctcctgtcacagtgagtagcgcggctggacagaggtgggaacgctgctgcatctgggaggagggttgttttcggagtcacggaagtctgactctgccccctcagtgccaggctacctgggatgctttgtggactcaggggcacccccagccctcagcggccccagcggcacctccacgaagctcacggtccaggtgtgcctacgcttctgccgcatgaaggggtaccaggtactgctcacgggcccagaccagtgacccctgacctggacctaaagaccacactcaactcccaacactcggttgccaaacccagacaccggtttctgaacctccagcccgattcccaccccgaccccaggcccccaccacttcacccctaccccagcccctgccctggggtcacccagtctgtgctcccagctggcgggcgtggaggccggttacgcctgcttctgtggctctgaaagcgacctggcccggggacgcctggcccccgccaccgactgtgaccagatctgtttcggccaccctggacagctgtgtggcggcgatgggcggctgggcgtctatgaaggtgaggagtgggcggggaccaggggcctgggcgggcctcgaggtggggcctggccgggcaggggagccgccgtgtcctggtcctcaggatgctgactgccggccccgcccgcagtgtcggtgggctcctgccaggggaactggacagcgcctcagggcgtcatctactccccggacttcccggacgagtacgggccggaccggaactgcagctgggccctgggcccgccaggcgccgcgctggagctcaccttccgcctcttcgagctggccgacccgcgcgaccggctggagctgcgcgacgcggcttcgggcagcctgctccgcgccttcgatggcgcccgcccaccgccgtccgggccgctgcgcctgggcactgccgcgctgctgctcaccttccgaagcgacgcgcgcggccacgcgcaaggcttcgcgctcacctaccgcggtgagcctcagctcggcgcgccctgcccgctgttcccaccccgctctccccaccccgcctcacgcccctctccgcagggctgcaggacgccgctgaggacccagaggcccccgagggctcggcccagacccccgcggcgcccctcgacggggccaacgtgagctgcagccccaggcctggggctccgccggccgcgattgggggtgaggcgggcgcgcgggacgggagtgagtcagggagccgccccctcgcgcccatcctcaccgcagccgtgtgcccgcagcccgggtcttctcgacggtgacggctgtctcggtgctgctgctgctgctcctggggctgctgcgtccgctgcgccgacggtgcggggcgctggggcagggcctgagggcggaccggtggtggggagctggagccccagaagggaacagagctaggaaggaactcctgggttcttaagggagcgaggctttgggtccacgcacaggatcgcgcgcgggatcgcaggtagagcaggacgctgcagcgggattggaccggctcggctgatgtctgctccctctctaggagctgtctgctggctccgggaaaagggcccccggcgctgggggcttccaggggccccaggagaagctgggctgtgtggtaccaacagccccgaggggtggccttgccctgctcccccggggacccccaggctgagggttctgccgcgggctaccggcctctgagtgcctccagccagagctccctgcgctcgctcatctccgctctctgactctgggccccgagggtccgctgggcccgccgccggcgagatggacacctgagatgctgtgctgcgccctgcctcggccttgcgcctgtgtaggggcagctcggcctctggtcgccttggggagaccaaaagtcggacaggaaacatctggtgctattatctgggacttggcctgaccgtgggggtccagatggtccaggccctctccatggacctgtatgtgggggtggtctctggtttcggaggtctttgaacccctctgggggtggtcctggactgccgtcctcagtgagaggtcacaggtcagcaaaaacagtcaaaaaacccccacagattttgaataaaggatctactttggtacgggcctcgaaagttcttccgtggtgggaggagcatgttaatgaccatacaaacgccgagggttgcgtgtgtccatgcaaatgaagggcgttgcacgcagactttggtggagctgcctggaatgcagagaaggacctagaacacagacagatgggtgggtgggtggagtcctgtagaaggcggggggtggaaggggaggaggatcgtgggcagcgttatgctgaataaggggtgccttcccggtccctgctcagggtggacggggcggaggtcgactttgctcccctggcctccaatctgtttcctgtctatcctcggtagggccccgcaagggtgctccttgtgggcgataactgggagcaagttgggccgggcccacgctccgagaagcctagcgcgaaggatagggcctctcccgacggctgcgggcgcgtgaggcacgccttcagaggcctgggtaccgtggagcgccttgctgcactcgggagtccagcctgcggaaagatcactttggagcgggggcgtaccggatgtaggccggacccgtccggcagcaccttggacagagccccgtctgcagggtagggctaggtggcaggactatgcccccgagggtgggtgcccaaaggtacggagacctgggtgtcacgcggaaagcccggatgcacagttctgagggacgcgaggtgccagggtcactctagcgcagcccgcaggacccagaacgttgggtcgcaagcccacagccaccccatgcaaatgaggctgggagcgcgcacactatgctaggaggcgaggcctgggcggcctcggggcggagcctccccgccggccacgcccattggctctcgctgcgccgacgtcaggagcccggcgcgcgaaacgctggccggccggcgggaactaggagcctgggcggagcctggcgtcccctcccgcgtccggccgcgcccgtcctcctggctgcagagagactaccggccaccgccgccgccgccgccgcgagctgtccctgcggcgcgtctgccttggcggagccgaccgcagtgcgctcaggcgtccggtgcgtccccagcctccgccccggcgcgggggcgacggactcgcgcgtgcgcagcgccggaggggcgcgggctgggaccccctagccagcgcgtgcgccgatcgagcgcagggcgatgggtgggcgccgggcgccgggcgccaggcagtgatgggccttcccgcgctgcggccccactgaggaggaggctcggggacagcaggagcacgggctgcccgcgcggtgcggaccatggcgttcctggccgggccgcgcctgctggactgggccagctcgccgccgcacctgcagttcaataagttcgtgctgaccgggtaccggcccgccagcagcggctcgggctgcctgcgcagcctcttctacctgcacaacgaactgggcaacatctacacgcacggtgagccgcgtcccgcaacgcgcttcccacacccccggccgccctacctgcgttgggccgggggcactgaggccgaggagggccccagcgcccaagtccagggctgccccggccctggcaccgccagtagccgcggtgacaaagctgccattgtcccgggccgcgctgccagcttccgttttcccggcgggtgggggccgggtcaggagaggggagcagagtagggtctgagcctgcttaatccctctgagccccaggggtagggagcatggtgtccggcctctgtaatcccagcgccctgggaaccccctcccgccagcacccagccgggagatggtgttgactgcgatgaggagggcccgggaggagcctcccagcgccgccgtcctgacgcccccgccccaagccgctctgtcttggggctccgcctggtggcggctccttcttcccccaacaggcgtccggcccctcctccgcgccccgcggagctctgctgacacagccctgcccgtccttgagctgccccaggcgggcaaggggccctgagcggcctggcccagcctgggtgcctttcccgagcttttgccaggccacattctcacaagggtgggcagccttcggagccccgtttggcccctgggaggccagtactagaggccggcagggaggggtggagacctcccagaaagggctaggctggaatcaaactccccagggagaggtctggggagatgggacaagcccctcgaagcccccttcccttcattctggacttgtcttcccccacctggcctcacccctttatagaagataaaaaggcccagtgcc

SEQ ID NO: 6942 - DNA, 6000 bp, Homo sapiens
agctccctgcgctttatattgttgaggcctcctctctcagctaagaaacaggaagtacacagatgtgtattcttaaagacagcattagccacggggcccccaccctcaaagggtgggagcgataactgctgctggttgaaactgacagttactactgataataaagttaattgttacccagtcagtggagtctgcccaggtgtacaagtgaaacctccattatgcttttgacaaaatatgcttgtcttgagtcaatacccacctcgatccccaaggtgccagtccagggatgtgccagggttgaagcagagctgtctcctctctgctttacagccaggagcacctgaggtttgggcagctgtgacttgcccagggagccctggggtggggctcgcatgaggttctgggagtccagcccgctgccccctgcaagtggggagcaaagggcacttcccttgccagggacatggcaatgagagtgagccagctggtggagggggcctcttccgtaatcagatccaaatgcagttttctgcagaggtttccctgtactgggagcctcgaagaatttgggacaaggaggaacgggatggtgcttgggaggcccagaagaaggagaggccctgccccgctgccctgtcgggaaagaggttcaggaggctctcttagcccacctaggggggctagctccaaagtcagggtctgggttggtgtcaggtgtgtcctgcttcccgctgtgcacttggtcaggttcgctcagctccctgagcttgttcctgtctgtgaaggtgggcagtgagcccgtgagggtgacagctgcaacaccgagatttagctgcaccttttggtttgggagctaggggaccagcttctctacctgtaagatctgggtcttggctcctccgggcgcagtgggtgactctgcccttggggttcttagtgtgctgcccccacacccacccccgcactgttcctggcgcatggtagctcctggtaacttccttcctttcctttgtggtcaggccacacttccccctctaagaggcgcgggttaacccacttcgaccctatctaagctgatctctggtttcttctgcccacctgagcctccctgcccctctttcctcctagacggaacaaaaacgaggtccattttgtcgctccaggaagggactggtggagagccggcttcctttcctcccagggtagtacagtggggaaggttcccctcccccacctcttttcccagacgtggtggatgggggaggggacttcgctggaggtgttaaagtgccattgagatggtaaccacaccaaggggcccccacttttccatatcaatggcattccagtccctgattaggccccaaccttaacccttcctttcccaagatccaactgaatccaggtgcacgggggcctaggagagggtctaggacctcccaacctaggtctagtgagggctgaggacaacaggctaattgctacccatgtgtcctgggaatcctcccaccatgggcagctccccaaccaccctcttccagcctctcctaggctccaagatgtttctccacttttactctccccaaggggcttggggagatactgtgttttatcttagagacttggggtgggaggagcctgaagccgcacagggccactgtgaaggcaagtccagtgggttggtcactgaggtgggggtgtgcgcatttgctgagcagcctccacccactctgctggctagtccctggagtgtgggcttgctttccttcttgctccggtgtggagatgttgggccaaagaggaattggggtcttaaaaacctggggtcggctggatgcggtggctcacacctctaatcctagcagtttgggaggccgaggcaggcagatcacgagatcaggagttcgagaccagcctggccaatatggtgaaaccccgtctctaataaaaatacaaaaattagccgggtgtgttggcacatgtctgtagttccagctactcgggaggctgaggcaggagaatcgcttgaatccagcgggcagaggtcgcagtgagccgagatcacatcactgcactccagcctgggcaacagagcgagattccgtctcaaaaaaacaaaacaaaacaaaacaaaacacaaacctggggtccccgagcaagtgcggtggcgcttgcctgtaatcccagcactttggaaggctgaggcaggcggatcacctgagatcaggagttcgcagaccagccagaccaacatggtgaaaccccgtctctgctaaatacaaaaaaagaaaaaaaatagccgggtgtggtggcgcatgcctgtaatctcagctacttgagaggctgaggcaggagaacagcttgaacccaggaggcagaggttgcagtaagccgagattgtgccattgcactccagcctgggcaacaagcgcaaaactccgtctcaaaacacaaacaaaaaaacccctggggtcctcttatgccctttccgggcacagcgctcactggatgtgtgcagcccgccactgggctacaacgtaggggtttagagctgaatgtggaaccggtgagtcaccgaggcagggcccgacagcaagtggaccagccgtcccggtttccctggaggacccaatattcaagctgggaatgtccctcaaaaaagtgggatgagccgatcaccttaggccctaggacaaggaggacttgttccggcccagggaagagaatagcccctgggttggggctgctgggtggggggacttccagggaggcaggcttgctgctgcctcctgacagctgcccaaacctgtgtggctggattcctggaggcccctggaaggctgcgagggagcccgctgaccggcttgcctccgtctgcaatctctgctctccccaccccaaccctgtgaaatctgagccccaggggctgggtgagctggacaaacctgccacaagattccctgagtccactgatggccattttccagcctctgtatcacccccccatcttccagactctgtggggccaccaggtcagcccccctcgtaccggaggagcccccctcagtggagaggcccagggggtggtgaagaggaggccaggcttctgtttaccttacagaccagctgattggcgctggcctgtctctgtgtttgcaggggaggatcttaagctgttttgggtcaaggcccctttgcaaatctgaaggaaagtataaatctctcttccaaaagtatcattttttttaagagacagggtctcacctaggatggagtgcggtggcataatcatagctcactgcagactctaactcctaggctcaagagatcctcctacctcagcctcccgagtagctgggactacagacaggaaccacctaactcagctaatttttgtgtatatatatatatatatattttttttttattttagaaatggggtctcactgtgttgcccaggtgggtctcaagctcctggccttaagcaatcctcccaccttggcctcttaagcgctgggattacaggcgtgagcctcagtgcccggacccaaaagatgctaaaaccctttcgcagaagcgatgctcatacccctaggtttgaaccctgaccgctccttgaggttagagccctttatacacaatgtcccacccactaggtgaggggcactgagcaggggtgtgcctggccactggctccccgaaggcaatgccgtgaagtggtgcagccaccagatgtgtgtggtgggcacctccagccctgcccgcactggccagtgggctccagcacaccccagccctcccagcaccaggcaggtgagaggcagtcccaggtgagggcccactctgaggatcctctgtacctccctggaaagtgtatgaatggagacaatgttcctcacatcccttttcctttttttttttttttttttttgagacagagtctcccactgtcacccaggctggaatgcagtggtgcgatctcggctcactgcaacctctgcctccggttcaagcgattcttctgcctcagcctcccaagtagctgggattacaggcacccgccaccacgcccagctaattttttttttttttttttttgaggagtctctctctgtcgccaggctggagtggagtggagtggtacgatcttggctcactgcaacctctacctcccggtttcaagtgattctcttgcctcagcctccagagtggcgagtggctgggactagaggcttgtgccaccacgcccagctaatttttgtatttttagtagagacggggtttcaccatgttggccaggatggtctcgatctcttaaccttccgatttacctgcttcggcctcccaaagtgctgggatatctaattttttgtatttttagtagagacggggtttcaccatgttggccaggctggtctcgaactcctgacctcgtgaatcgcccaccttggcctcccaaagtgttgggattacaggcgtgagccaccgcacctggccgtcacacccctttttcagacaacaatcctcagaggttcttagcacccaggcaggggcttgaaggagttcatgaaccctcccccacaaatgaggggcacatgtttgtgggtgcatgttctgtgagtcccacggggtttctcaagtgggtctttgaccaaaggaggttaaggacctcgaccttccatgacctgtcccaggtaggggtcaggatttgagctttggtcagtgggactcccaggctgtccccatgagtggaatcacaggctctgagggggtttttccggaggtaaggctttcctgcaaactggaaggcaggtcttggggacacttgagtccctggacttaacccccgtgcccacctctggggtgttttggcccgggaggcctgactggccactcactcacccacccatggaacataaccgggtcctgggctgtgccccaccctgggttccagccccagcccgtcccgcctccatcccccttcctgagtgccccccaacctccacaacaggcccctcatcctctggcctctggagatcttaggcagctcagctcagcctcggtttcagcagcaggggtggcaagagcgcacctgagctgaggttgaagtggggggtagttttctaggccgttgccagggcgatgccacctgagctgggcgccaggcacctgtcgtctggggaacagtgcaggcggggaccttcccccgggagctagcggggccactgggctgagacgggggatggatcagattccagagagtcccaggcgggcgggagtgtgcgatactcggggagctggggcatgtttgcatcacgaaactcggctgggggagagcagaggcagctggggaggggctgcggaaggaggaggctcaggaaggcaagccgacgccccctgtgtgtgtttctgtcctgagcctgttacttttttgacccccgatccgtctcttcttcctcagcttgtcctccatcttcccctcctttacccttggttcccacatgcacagatgctacggacgcttttcctcccctgtccccactcagccgcagcatcccccgctggcccccaggcccctcatccatccgctgcccacgaacccccagccccgcaccctccccgtggctcaggtctcccctatcccggcctccctgcacttcactctgctcctcccctgcctgggccttaaaaccccgcctgcagccgagagcccgcagagtccccaggtggcactgtcagagtcgctcagtgggaacctgcgccagccggcaggagacgtggctgtcctcagcctggcagtgcgtctggagggcctgtgcgagctcagcccaggtgtgacagcggggtggtaagagcagcagcaccctcagggcatccgatgggcggaggcccctcgaggtgacacccaccactcagccgagcgggactacgagtctgctttgtgctccgcgaggaccagaaacacctgcaagaggcacggagaggaggcgcctttca

SEQ ID NO: 6943 - DNA, 6000 bp, Homo sapiens; identical to SEQ ID NO: 3659

SEQ ID NO: 6944 - DNA, 6000 bp, Homo sapiens
tttttatttttgtcatactaagtctttgaaattgatgagtagtttatgttcacaacacaattgttttattttgttattttatttttaagagacagggtctcattctgttgcccaggctggagtgcagtgatgtggtcatagttcactgcagtctcgagctcctaggctcaagggaccctcgcgctttagcctcccaaggagctggcactccagatgtaagccaccatgccaggctaagcacatttcaattcagactatccatatttcaggggcttgatagtcacatgtagctggtatactgggcagtgtcttagttttgtgctactacaacagaatacctgagactgagtaatttataaagaaaagaaattcatttggctcatagttctggaggctgggaagtccaggttcaaggggttgcatctggtgggggtcttcttgctatatcatcccacggtggagggcagaagggcacgagagctggagagagagaagagaaagaagctaaactcattcctttatcaggtacacgcttttgcaataacagcatgaatccattcatgagggcagaggcctcatgaaagattccatctctcaacactgttgcattgagaattaaggttccaacatacgaactttagggcacacattcaaaccacagcagagagtgaggacctagcgtccttattggtttcattcagtgtgaatgcgcatctgtttccttgcagaaatgttaatgttggtttcctgggtgctgtcccaaaccttgctggggctgttgtatgtatgtgcaccacattatctttctaaaatcccaacaattttgaattcagaaacatacttggtcccaagggcttcagcaaacagattacagatctgtaataataatcaaaagaacaccactaaagtgtgtatgtgatgctccctatgtgcagatgctaggttagggcttctccaccttttaatttcgtcattgttcttttttctacccccggagtgtttttagacgttttaatcctgaaaaatctttagtaagaggcttattgagatattattcacataccataaaattcaccttttaaatgtgtacagtttcacagtggtttttagtatattcacaaagttgtgcagccatcactatctatctccagaatgtttttgccaccctgaaaagaaatcccatacccatttgcagaaactccctattccctcctccccagcccctaccaaccatgaatcaactttctgtgtctatggtttgacctacggtggatatttcatataaatggaatcatacaatgcgtggctttttgtgtctggcttctctcactcagcgtgatgttttcaaggttcatctgtgttgtagcacatgtcagtactttattcttttttatggatgaataatatcatctcccggggaagcccctcctgctctgatgatttaagaggatgaggactatggagatgacaaaccaaaagtagacacctaggccgggcatggtggctcatacctgtaatcccagcactttgagaggctgaggcggggagatcacttgaggtcaggagttcaagaccaacatggccaacgtggtgaaaccctgtctttactaaaaatacaaaaattagccaggcgtggtggcacgcaactctaatcccagctacttgggaggctgaggcaagagaatcacttgaacctgggaggcagaggttgcagtgagccgagatggggccactgcactgcagcctgggtaacagagtgagactctgtctcaaaatataaaatgaaatgaaatgaaatgaaatataaaataaaataaaataaaataaaataaaataaaataaaataaaatgaaaacaagacacctggagcagggcgtggtggctcacacctgtaatcccagcactttgggaggctgaggtgggcggatcacttgaggttatgagtttgagaccatcctggccaacatggtgaaaccccgactccactaaacatacaaaacttagccaggcgtgatggtgcagggctgtaatcccagctactagggaggctgaggcaggagaatcacttgaacctgggaggtggaggttgcagtgagccgagacggcacccctgcactccagcctggacgacagagtgagactccatctcaaaacaaacaaacaaacaagcaaacaaggagacacctgggaaacctcgggtgggaggctgtgggagctgtggacagaccgcattctgttcatcactcatccactgatgagcctctggattgtttccatgatttgattcttgtggacagtactgatgtttgtttacaagtttttgttcgaaaacctgtttttcattctcctgggtgtatacgtgggaatgccattgctgtgtcacgtgataattctatgttgaacctaatgagggaccatacgactgttttccacagtggctgggccatttacgtgcccactggcagaagatgagggttccttatgtactgccccatgaaattttattttacttgtttatttttttgagacagggtctcgctttgtcacttaggctggagtgcagtggtatgatcatggttcactgcagcctcgacctccctgggctcaggtgatcttcccacctcagtctcccgagtagctgggactataggcacacgccaccaccattttttgggtattctttgtagagatggggtttcactatggtgcccaggctggtcttgaactcctgggctcaagtgatccttccgcctcagcgtcccaaagtgctgggattacaggcatgagccactgctttcagccttcataaaattttaatactgcagatatactgcatgcttgtgtattgtatcattatctgtgctttatacataaaaagggtaaggatgttttgctccccaagagccatttttgcccccttgggagcaccactgggaacagaggttctaggggaagcttgtcattgtcattacttctgttaatccttgatcacccctcaagtgggtgctcagtcaacttgaacaaaatctgaggctccaagggagattgagtgacttatccatatatcctcttgattgttggaaagactggatctcatgtggaatggatgccaagtgagaaagccggacaggtgggctggcccagctatgaaaccgcccccctgctggggatggctccgtcccctctctccaggagacaccacggcaactccctccccgacggaggttcacctaccagagggaggcatctacttttggtttgtcatcaccatagtctttatcctcttagctcatcagagcaggacaggctctcaaagacttgaagttcccctcccttaattcacagacgaagaaagcaaattgatggggagtgactcgcccgaggtggagcaggaaagccaggagtcctgaggctgaggtcccagatccctacctgtcccattacagagcgtcgacagagttgggcaggcgatgtgtcacaggcctccaccccagcacacgcaacctggaggcaggggcctcgctgggaactggaggataaatgccgctgccagcatgtttgtatgcccatccctgctgtctgcagatacttactcgtccttcctttccttctgaaagctcgggtttcaaggtctggcttaaggcgtgagctgtcccttctgaatccatagaaagggagtgatggggcaattgtgaaaagcagatgcaaagtgtgccaagccctgagctgagcccagggacactggggagccacatccatgtgggctaccctgtcccgtgggtgctgcctgtggtcctcatcaggggaggagtcttgtttgtttgttgaatacggtctgggtggtggctctccaggttctgcggcagctcccaagtggaggcaatggggtagcatcaccagtgagctcttggtgtttctctgcaagggaccgctttcaaagaaaaaaggtcatgatacggtttggctgtgtccccacccaaatctcatcttgaattcccatgtgttgtgtggaagggacccagtgggaggtaactgaatcatggggtcaggtgtttcccgtgccgttctcgtgatagtgaataagcctcacgagacctgattgttttataaaaaggagttttcctgcagaagctctctttttgcctgctgccatctatgtaagaggtgacttgctcctccttgccttctgccatgatggtgaggccttcccagccatgtggacctgtaagtccatgaaacctctttcttatgtaaagtgctcagtctcgggtatgtctttatcagcagcatgaaaacggactaatacaggccatcgcagagacacacattaaactctcactatggctactttgggaggtgaaattggagggtcactgtggaaatttcctttctagccattgatacttaagcaaaatcatgatggtgtttacttccttgtttgtccttccccctctctaccttttaaatgttttattaagtgtgatgtacaccctggaaaatgggcaggtaatctgctgcttgaggtaccgccccaaatgcagcacacccacattaccagcaccagatccagaagcagaacccaccagcccctaacttctaacagcgaggactggtttttatttacatagacggaactctacaattcgtactcgtcagcatctggctcctttatcaatgttaggatgaaatttatccaaattcttgtgtcactatattttgaaattatctttgaatcctgaagagagttcttagatcccaatacagtaacagctttactttagtcggggaaatacactggtgtgtagggaatctggtgtatgtgcgtgtgtcctactactactaattcttggccccgaggggctcctgggggttccccgggcccctgttagggaaccgcgtccacttctcgccctctcggcccacttcggaggctcggtctgcggctgcgcacagcgcgaggaagcgcggtcacgtgactgctgcgggccagccaagatggcggcctcatgcttggtcctgctggcgctgtgtctgctgctgccgctgctgctgctgggaggatggaagcgctggcgccgggggcgggcggcccggcatgtagtagcggtggtgctgggcgacgtgggccgcagcccccgtatgcagtaccacgcgctgtcgttggccatgcacggcttctcggtgaccctcctggggttctgcagtgagtggccaagggtctgggagggacgatgctctctcagccgttgatcctcggttctaaccgccccggggagtcgaggcggaagtgctcctttagtcgccgcctttgggcagctctccgagattagacgagcggttctgccccagcctttcctgggtgggtctctaggtatagccggcgttaatcttgccacgtgtcagaagtgtgttaagtgaatccattgcgtggtctcacgtaattctcctagtaagtggaacccaggtgcgtggaactccagggctagtgctggtagctacgtccctgtgcagctacccttgtcaggctatgtctgagctgacaggatatttcattcctcatccctcaacgcagagctctgcagacagatgttttcatttgttcttcatgtccagcttttccccacagtgtgcagggcagcggtgtctgctccctcattattctccacgttggtatcttgagagggtagctcaaccccatctcaggaagaagtgggaacagcactagttgcctttaatccctgtttagaatctgctatcctagggtgatggggtagagtgggacttcctagggatggctctgtggtgggaaaattccactatccagacaatctagattagtttaattgagcacctactgtttgccaggcatcatgttaagtgaaggtaggtaagattcaggccctatctctgtgtgcctcctagagcaatctgaacaagaattggccgcattctctgttctggctagtgaggagcagagagaggttttgaaatatcttactt

SEQ ID NO: 6945 - DNA, 6000 bp, Homo sapiens
tcgtgatccgcctgccttggcctcctaaagcactgggattacaggcgtgagccaccgcacctggccccttttcttttactttcatcttctttttttttggtcttgctctgtcacccaggctggagtgcagcctggaactcctgggctgaagtaatcctcccacttcagcctcctgagtagctagaaatatagacacacaccacaacacctggctaaccaaaaaacaaaacaaaacaaaaaaaacaaaaaaactgtagagacagggtctctctatgttgctaaggctggtgtatgtttgttttcaagctaggaatgttcatgataggttagagaaaaggtagaataaactggcattttgtagtgccaatatggtatcacactaatagccccttaggaaataaaatactaacacacgtttattgaacacttactattggttaagtactctattgagcactttacatgaattgggtcaatgtaatttaattcatgtaataattctaaatggttacatttttactatgtgttacatattgttagtaatttcattctatatgtcaggaaactcaggcatggagaagtctattaattagggttcagtcatggaaaaatgaaaccactccagatatttcaaacataatggtatttagtacagagaattagatgctcataagtttgtaagggctggaggagctactgtcacattggttttctttctttttttttttttttagacagagtttcactcttgtcacctaggctggagtgcaatggtgcgatctcggctcaccgcaacctctgcttctgggttcaagcaattatcctacctcagcctccttagtagctgggattacaggtgcccgccaccacgcttagctaatttttgtatttttagtagagacagggtttcatcatgttggtcaggctggccttgaactcctgacctcaggtgatccgcctgcctcggcctcccaaagtgctggaattacaagcgtgagccaccacgcccagcctcacattggttttcatttgtgctgctgcctctgtggtccagagaataagaagggtgctgcttctgctgcccaaagggcagaaaagttcagaaaaccactgttgtcacagctgcctttaaataactgagacagggactggtgcgaaagagagccaaagcctaaggaaaaaacccacaataacatgtatctctgccacttttcaaatttcaggaagtgcattacactgggtaaaacacaactgaatccagaatacaggaggcaagggctcctgggaaatgtagttcatagggtttccgccttgccttagggagtgctgagaagtgtgtggaatgaatgcttgcatttgttttctattgttgccataaaaagttaccacaaacataatggcttaaaacactacccacttatctcacagttctatatagaagtcagaagcacagtggactcagctgggaactctgcttagggtctcaataggctgtcagccagctaaggctctgcagaagaatctgcttctgggttcattcaggtcgttggcagtactactttcattctcaaggtttacatgtggtccccctcatcttcaagccaggaaccatgggctgagttctgcctgtgctttgaaaatctatgactttcctttctgctgcatctgtgtgacttgtcttttgcctttagggattcacgtgattacactgtactcaccagggaaatcccggttaagttctccatcttaaggtcagctgattacaaccttaatcatatttgcaaagtcccttttgccatgtaaggtgacttataaccataagacgcacactaggagacaaagatcatgggagtacaaattctgcccgccacaatcctcaatggaagaaaactatcaaacaagaaagcattccaacacaaaaatgtaaagaatttactcaagataattgatattctcagctttattaattttaataataatagttactatacatcaagtgtctactataagtcaggaaatgtacaagcaactgtatctgttattatgttaagcattattttaaaaagtcaaacagcaaattgagagacttcatagtacttcatatagcacattatgtgaatgaatttatttatttatttattgagatggagtctcgctctgtcaccaggctggagtgcagtggcgtgatcttgactcattgcaacctccttctttcaggttcaagcaattctcctacctcagtctcccaagtagctgggactacaggtgcgcaccatcatgcccagctaatttttgtatttttagtagagacagggtttcaccatgttggccaggatggtcttgatctcaagtgatctgcccaccttggcctcccaaagtgctgggattacaggcatgagccaccgcacccagccaacaataaactttattaacataatgtccagtaaatatcaattattataatttttttatagagatggggtctcgctatattgcccaggctggtctcaaactcctgggctcaagctatctgtcggtcttggcatcctaaaatgctaggattacaggtgtccacctggcctattatattactattgttaaaatgacatacaagatatcctagtaccttaaatagacataacatttctaaaggctagttactcactgttaactgaattaagtccaaattccttatctgactgcaacttactacctcccactccctcccacactatctctcttagcaaccctataattattttcaaaatcatgttctagaacaacaaaaaatgtgcaaagattaggattgttttacatttttgctaatttccttaacgtctgacttaatacagtaagactctctctctcttttttttttttttttggtttttgagacggagtctcactctgttgcccatgctggggtgcagtagtgcgatcttggcttaccacaaactccacctctcgggttcagtcgattctcctgcttcagcctcccgagtagctgggattacaggcacgcgccaccatgcccggctaatttttgtatttttagtagagatggggtttcactatgttggccaggctggtctcgaactattgacctcatgatccggctgcctcagcctcccaaagtgctgggattacagatgtgagccactgcgcttggcctctctctctctcttttctaagacagtctcttgctctatcacccagggtggagtgcagtgacactatcacagctcactgcagtccctaactcctaagcttaagcgatcctcccgtcctctcagcctcccgtgtaggtggaaggatgcagctaactttttatttttacttttctagaaaagtgggtatctcactttgttgcccaggttggtagttagattctcatgtctgcttctgtattcaatctgtagcaatatcacccgtcgattttccagaggcttctagaaaattccatgtactctcctgactcagagaatgaaaaaagcaaaatcatctttatattattataaaaatagtataattataaaaataggattgacattaaagattacccctagatccctggagcatatttggggaactggctggttggagtatgttattccattgatgacccaacctagattgtccggacttgcctcatttttctcctaactggaagtgacaaggcaggcagctctagcctcatgacaagcgtggtggctcacgcctgtaatcccagcactttgggaggccgaagcaggtggattacctgaggtcgggagttcatgaccagcctgatcaacattgagaaaccccgtctctactaaaaataaaaaaaaaacttagccaggcactgtggcgcatgcctataatcccagctacttgttgggggcagaggtaggagaagcgcttgaacccgggaggcggaggttgtggtgagccgagatcgcgccattgcactccagcctaggcaacaagagcaaaactctgtcaaataaataaataaattaattaatgaaaaagagggcattatggatctaatctactgttgtatttcctgtattttctacacagtgggcattcagtgaccacctgttgagtgagttcatggcatccaagtgcacagccacctaaggcatcgggcctcatgaaatcacaagcagccaaggctggcaggttcctgggacaatttagcaaactcaaggctatggtgcgggtgggtgcagtggctcatgcctgtaatcccaacatatggggaggcagaggtggcggatcacctgaggtccaggagttcaagaccagcctggccaacatagtgaaaccccatgtctattaaaagtacaaaaattagccgggcatggtggtgcacacctgtggtcccagctactcgggaggctaaggcaggagaatcgcttgaacctgggaggtgggaaatgggggtacagtgagctgagatcacgccactgaactccagcctgggcgacaagagcgaaactccgtctcaaaaaaaaaaaaaaaaaaaaaagactacggtgctaggaccaatctcctgagtcacaaaatttaaggagtcgtccaaaaaagtaaataagataaatattttcaaacaatattagaaaattcaaatcggaaactaccgaccgggtgaggagttgtttttgtaaataaggtcttattcctaataagtttcgaaagtctaaatcttcacacgagtcactcaaaagaaaggcccagctcaggagcctgcatctgcgctatggcgggtaagccccggtggctgaccggaagaagcgcccacggaggcgaaccccaggcgcccctcagcctacttccatttcccctcgcgacccttcgccccgcccactctagctggctgtgcctgactggctgggctgccgcatattcgcgctgccattggtccataatcagctgggggtgggcgtagggagacctacttcagcaggtcctggccggaccagcattgttaacggctgcggttcgaagtggctgtgggtattgctgcggctggtgcgtcgtcgctctaggtacgttggggccgggcgagtgtcctgcgagagcggcgattggcggggtggcggctctaggagcgtcggtcgcctctctgagggccggccccggaggcctcggagcgccgggcctaccggacgtttgcggcgaagctgccctgactgaaaagcgtccgcggggccgtctgacaggtccgggaagaggcccctgaggggcggacgggcgcgtctccaccgttttcgcagagggatactggtgaagcgggagtggtgtgcggcctcaggtccgggcggcactggggttagggactgcggagggaagtggtgcgtgttttttgtcctgaggggtaagtaaaagctcgctcttgtccggaatgctttcagaaattaacggataaatctccacctccaccaattttagtgtcccattgccaaattttcttgagttgttttaatcatctaatgaagtcaggtgccagaaggcaactggatctcgcctggcggccttgaagtttgttaaaaagtagggaccagagcatcaggaaaaatacaaaattctgagtaaaatgctgaaatcccgtacctctgagcttgccggtgtaaggatggtaggatttaaggaagacgatttccttaaggtagaagttcgtttttatgaatatgtttttaagaaaattccatcttatcgcccttctctaaccagttttctccaagtttggcaagcaagtttgagaaagagaggacgcaataattttttttgccttatttttgttaaaaccttaccgcacttaaggaaacggactttctacctttccgtgtttctgtgttgaaaatgaagtttctaaccacgtgttccttcctttacgacacaatggctttttctgttctgaagacttgcatatggttaatatgtatggaagaagaggacagttgtactgaatagtccacattagaaaaattatgtcatattcacttaaattgt

SEQ ID NO: 6946 - DNA, 6000 bp, Homo sapiens
gcccaccaggaagcggaccctgacttatttattcttttcccaaacacactgatttaaaaagcagtggggtcagggtgcagtggttcacacctgtagtctcagcactttgggaggccgaggcaggcagatcacctggggtcaggagttcgagaccagcttggccaacatggggaaaccccgtctctagtaaaattacaaaaattatctggacctggtggcggggatctctattctctgctacttaaaaggctgaggcaggagaatcagctgaacccaggaggcggaggttgcagtgagccgagattgcgccactgcactccagcctgggcaacgaagtgagactgtctcaaaaaaaaaagcaatgggggctgggcgccgtacctcatgcctgtaatcccagcactttgggaggctgaggtgggcaggtcgctgagcccaggagtttgaaaccaacctgggcaacatagagagattccatctctgcagaaaaaaataatagcccaggcgcggtggctcatgcctgtaatcccagcactttgggaggccgaagagggtggatcactgaggtcaggagttcgagaccaggatggccaacatggtgaaaccctgtctctactaaaaataccaaaaaaatttagctaggcgtggtggcaggcatctctaatcccacctacttgggaggctgaggcaggagaatcgcttgaacccgggacgcagaggttgcagtgaggcgagattgcgccattgcactctagcctgagtaacaagagcaagactctatgaaaggaaagaaagaaagaaaagaaagaagaaagaaacgagaaagaaagaaagagagagagagaaaggaaggaaggaaggaaagagaaaataataataataaaattagcccagtgtggtggtacatctgtagtcccagctactcgggaggctgagacggtaggattgtttgagcctagatggcagaggttgcagtgagccaagatcacgccattgcattccagcctgggtgacagagtgagatcctgtctcaaacaaaaacaaaacaaaacaaaaagctgagtggggtcacacaaacctgtggtcctagctacttaggaggctgaggtgggagaatccggggaggtcaaggctgcagtaagcagtgattgtgccactggactccagcctgagtgaaaaaatcaagaccctgcctcaaaaacaaagaaaataagaaataaaaagcaatgggtatgtcattaccatacacagaaacacaatacccacatcatacacagaaggtaactaaaacatacacacacagaaacccacacatcattcagttctagctgcagagtgtcaactgcccgggattctgagcctgaggtctgtgctctctcctggacataagggggctgagccagccttacagagatgctcaggccacactagcagcaaaggaggccttgcccctagaatggggagctgctatgggtttcagaggtgagtgatgccctctctgccttccacctaacctcaccctgcagacctcaccagtggttcacatctcacccttcaggaaaaatcccctctggccacgcagttttcattttgttctcaggcctggatcccttatagagatgccccaggagcagaggcccgcccacccgagcagggagtcccagctgtagagtctcccttgaggctgaggcctctccaccccgccgagcaacccccttccttgtcccagcccttatagcggctgggggagtgggcagagggccaggctggtacagggcacaccagctggaccccagcaagccccagggagctggggtgagctcatcccaagccctcaattatcctcctggctaatgagcatctgagaacctccatcccattctgtaaggacgaaccccggggacgtgaggccagatgtcactacggagggaggtagaggaaatgggcttgggggaggggcgcgatacttcctgcctcctctttgttggggagagaaaggtggggctgcagcaagcagttagggtcgcagttaagcgcaggatcctgtagcccatctcatgggctccagtgcaggcttggagcccactaccttgtgactttcagcaagtgaactcgcccttgctgctcaaagtctgtccctgaatcatcagcaccactcgggaacttttgaaaaatgcaggatttggggctcagacctagtgggtcagaagctgtatattttattttattttatttattttgagacagggctcactgtcacccaagctggagtgcaacggtgtgatcacagctcactgcagcctcaacctcccaggctcaagcaatcctcctacttcagcctccccagtacccgggagtacaggcgcacaacgccacggccagctaacttttcttttttagagataggagtctcactacatttccagggctgttctcaaactcctgagctcaagccatccccctgccttggcattccccaaagtgctgagattacaggtgtgagccaccgcacccggcctcatctccatttctcagacgaaaaaactgaggcacagaaacgttcggctgtttttccaaaaccacccagcaggaaagcctggaatctggcaatctgactcccagcttctatgccatgctgaatctccctcaccattttcccccaagaatctttcccctctaagtgtccctgcctcccctgtcatcgtgttgccagtcctggctctggggttcttagcctgcccctcccaggtcctcaccactaatgaagtctctgccaacttgaggcggggaccacaaaggctgctggaactggctttgtgggaagaacctatttccttccattctgggctcctaggtgtggctgatggggcaggatttgggcagatgtgggggcggagctgttctgagatgcccggctttggcctgtggggcagctggctgaagctgggctctcctctgcctttctgtcctcccttcctgcgcaactcccagctcacctcctgtgcctggcttcctgactaggctgccgctgaacccgccctggagttctgcagtccgatcattcattcattcaacatccatgtattcagcacccactgtgtggcaggcactgttctgtagacacagcagtgagtgcaatacacctagtcctgggagagaagaccaaaagttcatcacacaatgtcaaaaatgtacaatttcacaatgggtaggctgggcatggtggctcaagcctataatcccagcactttgggaggccggggcaggaggatcacccaggagtttgagaccagctcaggcaacaacaagagaccctatctctacaaaaaattaaaaaattagccgggcatggtggcatgcacctgtagtctcagctacctgggaggctgaggtaggaggatcgcttgagcccaggttacagtgacctatgattgcaccactgtactccagcctgggcgacagagcaagaccttctctctaaaaaaaagaaaaaaaattgcttcgtcaaatctgcccacattcatagatataggctgagtgggacgatggcttgagcccaggaaggagttggatggaggctgtagtgagctgtgattgcaccactgtactccagcctgagtgacagaccaagaccccgtctcaaaaacaaaacaaaaaaccccaagggagctactcttggctgggcgatcagggagggccctcctgaggaaggggcacttaagctgagatcgggaagatgaagtagaagagttccagctgcagggagccacataggcaaaggcctggcggtgggaaaggcttggtgcactgggcgcagggaagaaagcccagcgaggctgagtggagggagtgagggcctggccacctcagcctcgtgagcccaacccgccatgctcttccagaggcttctgcttgagaatgggaaagaagtttccagcaaataaggcccccgttcccaggaggaggtcccagctcgccctgccccctcctgtcttctcaagtcccctgggccacagaagccttgagggacccaccctcaccccttctgtgggccccagggctggggtgtcctctcgccgatggccttcttggggtggatgagtggagattactccaataactggagcctctgtcttcccaggtagacaggcctggcctcaaaaccctctctccatcaggagcaggctgtgggacttcagctctttggagcctcaggttcctcatctgtaaaatgggaagattctttcttccggagtcatcttaataaaatgtgttgggctgtttatacagggcaggcatttggtgggggccaaaccaccgggtaattatgctaaaaataactatgattataggtggcagaggggtgcaaatgcctcacagcctcatcccgcagaggaatgagagcttcgtcagggccgggaccttgtctggctcgtggctgctcccacgacgactggcgtggcaggcacgtggtcagtgttccgccatcgactgactgggcggatgaatgatacataaatgaattcgcgaacgactgatgcccagcttcctcccgaagcaaggtcattcacctcagcggtcgcgcctctcccctgcccctgccccggattccccgccgctctcagctctcgaggagtatgcagcactcttccgtgcagcgtgcctcagtttcctccgctgtaagcaggcgggaccaaggcagcctgccggggtcaggatgaggctggcagaggaagggcgcctgtagtggggccccgtacccacgggcgcccaatccgcgctcgccagggccgagcccgcccgccgcgcgcagcccccgccccaccgcctgccggccccgagcacacgtgactccgccccggcccgccccgccccgccgtcccagcgcgggctcccattggcctttctgggaggccccgtccccagccggggaggagccgggccccgcccgccgcagcgcggggctcctgcgtcccgagtgcgcggcggccggaccgggcgggcggagccgggcccgcggggctgctgcggggcgatcgggccgggccgctgccgcgccatggtgagccgggcggggcaggccgcgcgctcgggccgggcgggggcgccggggcccgggggcgggaagggggaggccaggacgaggaggggcgcgcgcggcggcggggccgggccggggtctgcgggcgggggaggggcggcccggcgggcgcggctcgggggagggtccgttccaggggccgcgcccgcgggctggggttctttgtcagcggcgctgcggcgagatccggacaaaggaggcggcggggggcggaggccgctttgtggggatcgcggggcgctcgcccccgcccgtgcagcccccgcccgtcctcagctacgctcccgccttcccccggcatttcggggttcttcaaaattctgggagctccggggagggctccggggataggggtccaggtgacgtccggcgcccgtctcgcgggtagggaaactgaggccgggccgcagcgttcggcgcccggttccgtgggcagcggctgcgcggcgtgggcatgcctagctcccctggtccccgtcccacaccccgcctccgtcgggccgattcgagctacctccccagctgccgtcccctctccagctgtcgccccctgggccgagccccctcctccctggagcctcgctttgctcctccgtggagtgggggagacgccggcgccgccgggcagggtggaacgggagggtgcgcggagcgcgcctggcaccgcgcctgccacgccgcccgcgctcagcactcgggagccgccggggcgctgtcacccctaagtccccagcacccagcccaggtcgcccagcccgccccagcgagggccacactggggttcacctgtccgcggcccctcaggcacgcgggagaggaggtagggagaatgtggcattttagagtcagggtcgaaatgcgggattttggatgcaggttgcctgggtttgaatccctgc

SEQ ID NO: 6947 - DNA, 6000 bp, Homo sapiens; identical to SEQ ID NO: 3662

SEQ ID NO: 6948 - DNA, 6000 bp, Homo sapiens; identical to SEQ ID NO: 731

SEQ ID NO: 6949 - DNA, 6000 bp, Homo sapiens
tgagccactgcacctagccaagctcaatgaattttaaaatataaatgtgtgtgtacgtgtgtgtgtgtgtgtgtgtgtgtgtgtatatatatatatatatatatatatgtttaaaaccacataactaccaccaaatcaagttatagaacatttacatctccctaggacatttcttcctatcttgactttgatcaacatatgttgttgttattattattattattattattattattattattattattcagagacagggtctacctctgttgcccaggctggagtgcagtgttgcaatcgtacacaattcaccgcagtctggaactctggggctcaagcaattctcctatctcagtttcctgagtagctaggaccacaggtgtgtgccaatatgcccagctaatctttaaaattgttttgttgaggcaggcatggtggctcacgcctgtaaccccagcactttgggaggccgaggcaggtggatcacaaggtcaggagtttgagaccagcctggccaacatggtgaaacgccgtctctactaaagatacaaaaaaattagccaggcaccgtggcacgcacctgtaatcccagctacttgggaaactggggcaggagaatcacttgaacccggaaggcagaggttgcagtgagctgagatcatgcctccgcactccaacctgggccaaagggagagagtctgtctcaaaaaataaaaaaaaaaaagaaatttgttttgtagaaatgaggtctcactatgttgcccaggctggtctcaaacttctggcctgatgagcaatccgcctgcctgggcctcccagattgctggtattacagacatgagccacagtgcctggctcttgaataatgtatattagttttgcctattgttgaacatcgtgtaaatgagatcatggcaaatatgctcttttgtgtctgccttgttttgctccttgttgtgttttgtgggattcatacatattgttgctattatgaacattttttgtagatgtgttttggtggatgtaagctcacctttcttttggaggcgagtggaatttctgtgtcactatgtaattgtatgtttcactttagcacgaattattagttttctttcttttttggagatggagtctcactctgtcacctaggctggagtgaagtggtgcgatcttggctcagagcaacctgtgcctcctgggttcaagtgagtgttgtgcctcagctccccaagtagctgagactataggcatgtgccacaacgcccagctaattttattttattttattttacttttgagacagagtctcactctgtcgcccaggctggagcgcggtggcgcgatcttagctcactgcaacctgcgcctcccaggttcaagcagttctcctgccttagcctcccgagtagctcggattacaggcatgtgccaccatgcctggctaatttttttgtattgttaatagagatggggtttcctcatgtcagccaggctggtcttgaactcctgagctcaggcaatccacccaccttggcccacctttttgtattttttgtagagatggggtttcaccatgttgctcaggctggtctcaatctcctgagctcaagagatccacctgcctcggccacccaaagtgctgggattacaggcatgagccactgcacccagccaaattgttagttttccaaagtagttaagccaatttatatacctcccaacagagcgtgccttttccagttaatccacgtctttgtctgcactcgtaattttcagtctttgtttccagtcactctggtgggtgtatgatggtatttcactggggttttatttgcatttccctgatgactaatgaagttgagcatgttttcatgtgcttgctcaataaatatttgttgaaaggatgaataaagagtgaatgaataaaacatggaaagaaatccaactctgtcttgtgccctgcctaaaacccaccagtggttcccactgcccctcctttggccgacgggtacctgcctgccctggctccttctgaccccacctgctccggatggatttcttttgcttcttctctgggttcctgccatccaggctgtcttcagtttcctccaaggaccctccctgcttcataactttgctataaactgttttcttctgcccagaacacaacccaggcccaaggaacccagacgcgttccttgtatctcagtttgaaagcctcttcctccaggaagccttctctgacttccaccccccagcaagggtggtataaattgctaacttaggcccacttttgcccactttttttgtttgtgtttttgagatggagtcacactttgtcgtccaggctggagtgcagtggggccatctcagctcactgcaacctccatctcctgggttcaagtgattctcctgccttagcttcctgaatagctgggattacaggcacccaccaccatgtccagctaatttttgtatttttacatttatttatttatttatttgagatagagtattgctttgtcgcccaggctggagtgcagtggcatgatcttggcttactgcaacctccgcctcccaggttcaagtgattctcctgcctcagcctcccgagtagctgagcctgcaggtgcctgccaccacacccagctaatttttgtatttttagtagagatggggttttaccatcggtcagactggtctcgaactcctgaccttaagtgatctgcctgccttggcctcccaaagtgctgggattacaggcgtgagccaccatgcccggccaccactttttttttctagctgtgaccatagttgtacatatctccccttccctggcttttttttttgttttttttttcctgagacaggatctcgctgtgttacccaggctgcagtgcagcggtgcaatcatagctcactgtagccttgaactcctgggccaaatgagcctcccacctcggcctcccaaagcactgagattacatgcgtgagtcactacttctggcctgtaaataccctttcaaaaatataatatttgattaacatctgccatcttaccataagaaacacttaaaaaaatcccaatccaaaaaaattccaatcctttaagctatataagagtagcaattttatcttgttcctagcaagacatctggcatatagtaaatgctcaataaatatttgttgacagtataaaggtcaagcaacagcataactggcattattacatgaaagtaattatcccttagaaactcattcacccttgggggacccgggccaataaaaaaatcacagaaaacaatcctatctaccttcctccttcctccttccctcgctaggtcctttgattggggggaggtctcaaatgcacacactgtttctgttttatttggtgcagctgttgtgtgcatgtgttatggaaacccacatcaggcaggagattaaggaggagaggagaaaagaaaggcatcgctggtatcacagtgaaatttacactctgcggcctcgccctagctcctctgtctctacctgtctgcctatgaaacagttcaaaactaatatggcgcaatggatggtattatagacttcccacctccctggccagacttcttgggttcaaagtttggcttaatcacttaccatctaaataatccctgacaatgtactctgtctttctgggccttagtggcctcatctgcaaaatggggataatactacttcttacctcatggggttgtgaggattgcacaagttaatttgtgtaaattgctaagaacacagccttaggaagccttgtcactgtgaatgcatattaattttttttattattattttttgagacagagtcttgctctgttgcccaggctggagtgcagtggtgtgatctaagctcatttcaacctccgcctcccaggttcaagtgattctcctgtttcagcttctcaagtagctgggactacaggtgcccgccaccatgcccggctaatttttgtgtttttagtagagacagggttttgctatgttggctaggctggtcttgaactcctgaccttatgtgatcggcccgcctcggcttcccaaagtgcttgattacaagcacgagccaccatgcctggcctacgattatcatgtctccaggcttcagtttccttacctctgaggtgaggatcaataacctggttatttctaagtgatgcttaaagaggttgagaagaagcaaaggcgctctgcacacaggtgaggtcaacagctgttagtgatggagactggcgccgtctgggtcatcagtgctccggaatcaggctgctcacgggtttgaatctcacttccactttcactccttattaactgtgtgacctcgggcaagtcacttcgcctttctgaacctcagtttccccatctgtaaaaggtaggtgaataacagtattcacctccttctgtgtgactcagctttggagtcagcggaccgggttcaaatcccagccctgcaagtgattagccaggtgaccctgggcagagggaatcactcaacctctctgcacctgggtttcttccttcatgaacgtggagactttacaggatgaaatgagggcacagttaaggcgcccggtacactccaggcaggtagggggctccgttcacgttattttcccctggtgacggatactgtccttaaacagcatttgaaaagtggtcgcagggtgtgtggccccaaagatcccaggcgcttccggaaggcgagccaacgctccccaggcccgtccgcgagcgggtgggcctaagccttggaggatctggggtgggggtggcgcggggtccaggcccggggcgccgagaggtggctggtccggctgcccacgccgagacgcgcgaggtgagcgggcgccggggcggggcggggtggggcggggccgccgcatccccgtgacgcgcgggccaaccaggcggcgttgcggccccggccccggctccctgcgccgccgccgccgccgccgccagcgctagcgccagcagccgggcccgatcacccgccgcccggtgcccgccgccgcccgcgccagcaaccgggcccgatcacccgccgcccggtgcccgccgccgcccgcgccaccggcatggcgctccggggcttctgcagcgccgatggctccgacccgctctgggtacgtgccgggggccgcgtgaggccggcgggacggagggaggccggcggggagggaaagcaccgggcccgcagccgcccggggcaccccgctccccgctctgctgccggcctcgggggcccgggaccctcacgtcgcccgcggcccagcccctttcgggggtgcaaggcatgggggaaacttgggtgactcagttcctgcggagcagagcgtggggggccgcgtgcccagccctggggttttggagggtcgggtcgggtcagagccgccgtgaggaggccttcctgttttggggttcccgtctgtaaaaacaaccttccagggaaggggacgctagagatggggggcgggaagaggggtgtctctctgcttctgttttcccatcttttttgtggttagggtccccccttttcacgaaaaatactccgtgaccaacggggtgagctggggaggggcttagattgtagaaagggactttcattgtctccccaaagttgtcgtacaagccacattactcttctgtggttacctagctttgttttttttgttctttctacttagatactgcgggggaagtttgggggaaccagggaagaagggggatgtccacccttgatgtgccctacctgaccctcggctcggggcagacttggggtgcagctgaggacgcccaggaccctggtagctgtggtcctgccctcccttccctgcaacacgtggagctcctctctggggatgccccttagatttaaccccggcaagttttcttctgtaacgtggcctgcggagcctgactgggtgtctggagtccacttgctgtggtttaagccccagt

SEQ ID NO: 6950 - DNA, 6000 bp, Homo sapiens
cacagtgggtgtacgccctgtcatattatccattacatcatgggaagatattattacatctaatatcactgtgggtgtacaccctgtgatattatttattatatcctggtgagatgttattactgctaatatcacagggtgtgtcaaattttctggagatattattacccttaatatcacagtgggtgtgcaccctgtgtgtacactctgtaatattattcgtaatattttagggagatattactactaatatcacagtgggtgtacaccctgaggagatattacttcctctgatatcacagtgggtgtacaccctctcatattattcgttatgtgctaagtagatattattacccctaatatcacagtgggtgtacaccctgtgatgttattccttatatcccaagaagatattattataactaatatcacagtgggtgtacaccctatgatattatctgttatatactggggggatattatttgtaatattttagggagatactactcctaatatcatagtgggtgtactcatattttacagatatattacttttaatatcacagtgggtgtacaccctgtgtgtacaccctgtaatattattagtaatattttagggagatattactcctaatatcatagtgggtgtacaccatgtttgtaaaccctaggatattattcataatatccgagggagatattactcccaatatcacggtgggtttacaccctatgatattatttgtaatatctgaggcaggtattactctccatatcacagtgagtgtacaccctcctatattattcataacatccgagggagatattacttccaatatcaaagtgggtgtgataatatctgagggagatattattcctaatatccgtgggagatattattcctaatatctcagtggttgtaccgcgtcacagtgggtgtgcactgtgtgatattattcatagtatccaagggagattttactcctgatatcacagtgagtgtacaccctgtgatattattctaatacccaagggagagctttctcctaatatcacagtgggtgtacactctgtgatatttttcataatatccgagggagataggatggagaccacgtcacagtcccctcactgctggaatggacactgtctacccgtggagtggtggggagaacttagtgagattatgcaagcgtttagcacactgccagatatacattaaatgctcagaagacttagcttttattattactgtcataattgaggccatgggttactaaccagtggtttaaaatgccattgcagctgggcacggtggctcatgcctgtaatcccagcactttgggaggctgatgagggcggatcacttgaggtcaggagtttgtgaccagcctggcaaacatagtgaaaccccgtttctactaaaaatacaaaaattagctgggtgttttggtgcgtgcctgtagtttcagcttctcaggaggttgaggcaggagaatcgcttgaacctgggaggcgaaggttgcggtgagccaagattgtgccactgcactccagcctgggtgacagagcgagactctgtctcagaacaagcaaacaaaatgccattgaagacatatatgaatatgaaaaggtgcttgctaaatgatgattgaataaaagagattataatataaaataggctttggtttttttaaagcaaaaaagaaaaggatatgcctaaattagggaacatggagaagaaggccaaggcatttaccttcctctcttgagtctttttctctctccgtctctgttttttttttttttttttttgagtcagggtcttgctctgtcacccaggctggagtgcagtagtgccatcatggctcactgcagccttgacctcctgagctcaagcaaccttccacctcagcctctccggagtatctgggactacaggcacacaccaccaagcctggctaatttttaaatttttttgtggagacttgtctcactttgttgcccaagctgctttggaactcctggcctcaagccatcctcttgcctaggcctcccaaagtgctgcgattacaggcgtgagccaccatgcccagctctctcttgggtcttaaagcaaagtgtcaaagacccagccaccacttcttagaaatgactcgatgtcatactagcataaatgcatcgataaaaagatggaaatgtggtaacacagtgatcttggggaatcctagttttcttttccaatttctttgttgttgcagtgagcaagtacttgtttcaagataggaatgaaatattcggctcttttagacagacaagcacaggtgctcagtttgggagaagaattaaaatcctctgcactctccatgctgccttgctaattcttggggtcctgtcctcatcttctactcttgccttctgcagggaccccacagtgtgttttccccgatctttttgtatcactctaaatccagtattgggcccagggagcaccccctcccctgcccccttcagctgtcctcctgcctgagtcttctggaagcttcgggacagaaagaacccaaggatttgtcatgaagctcagtgtggcaggtctactgtttccatgtaaatcatgtctgcttatctgagctggttttggtggaaactgatggaaattatggggaagctaaatccctgtctctctgcaagccactccccaatcccacccccatgaattggcattgtcacagtcctggtgcttcatttctttctatatttgaagatgaatttgagggaaatagtcagaaagtcaagaagaacacagcagaaatcaattggggtgagtccagaacaaaacttggggatcccacttcctgctttttttttttttttgagatggagtctcactctgtcgcccaggctggagtgcagcggcaagacctcagctcactgcaacctgtggctccctggttcaagtgattctcctgcctcagcctcctgagtagctgggattagaggcatgcgccaccacacctagctaatttttgtatttttagtagagacagggttttgccatgttggccaatttggtctcgaactcctgacctcaaatgatctgcccacctcggactcccaacatgttcatattacagtagtaagccacggcttctggccccaattcctgctctctagctccgggaaaacctgtggctgcatgcagagtcttagacaacttccttttcctctctgggcctcagtttcccattctgtaagatgagaggtttccataggcctacactttctaattggtggctttcaatcctctggtgatttgcataaaaggcatctatttcaattgtggttataaataacaaaccccaataaatagacgaattatttaaatggtttctcattatcactgaatagttgagagtctactgtatttgagtgaaaatgcagcacgagaaactgaaatcagatgcgctcatgattatgaccctgaggtcaatgtgtcattcccttcattccctccttgcccccatgaaggtttgactactgtatggtttgaacctgtgcttcttagttgtttattgcttaagttttagccacaacggcaaattgcagcgggaaattcagtcttactttgtcatttggaaacaaaatacaaaacctatcaaaataaagcactagcttttttttttttgagacaaaatggaagaaatcctaatattaggttagaaaagcaattttttggtgtttttaaaattttatttatttatttttttgagacagagtcttgctctgtcgcccaggctggagtgcagtggtgcgatctcggctaaccgcaagctccgcctcccaggttcacgccattctcctgcctcagcctcccgagtagctggtactacaggcgcccgccaccacgcccggctaagtgtttatatttttagtagagacggggtttcactgtgttagccaggatggtctcgatctcgtggcctcatgatctgccagccttggcctcccaaagtgctgggattacaggcgtgagccactgtgcccggcctctttggtgtgtattttgatgtggtgactggtagttaaattcagtgtacatatgaattcactcttgggacaaaatatgctggatttgagcttgttttcaggcaaatcatgtttcatcttgcagagctaattcaaagtatactgactgcatgcacttcttgcttaggggaagaaaactcatcaaaatttgtttctaggcatatgttattagagctaggattaaaataaatcttacatactttctttaatatgctaacattaacacgtttcgcttaaaaaagtatcgatcatttatcatggaaaaatacaccagcttacacaaattcctaaagcgtttttcgtgtgtgtgtgtgtgtgtgtgtgtgcgtgtgtgtgtgtagagatggggtttcgccatattgcccaggctggtctcgaactcctgggttcaagcgatccacccacctcagcctcccaaagtgctgggattacaggcgtgagccacacacccggccctaaagctttttgtgagattatatattttacctgcgaaatatatgggtcagaaagatttgagaaagttgttagataattccaccaacgaaatctcccgtcctttccagctgtgatggtgaattctaaagtagaattcatctttggagcttctccctgtaggcatgcaccttgcgttgcacctgccagatgtcgcgcggagtcctccaggcctctagaaggcagagatggtctcgtttccttgccgagcatgcgccttagttctctcttctggggctgtgaccgtggggtcgaagcgcgcgtgcgcggcggcggctggcggcggcggtggggcggggcctgggctgtcagccggcctaggaggaggaaggagcctgcggcgtgcagtgtgaggggcgggacccggctgccggcggtgggtctagctgggggaggtcgggccatgctggtgggccagggcgcggggccgctggggcccgcggtggtcaccgccgcggtggtgctgctgctgagcggcgtggggccggcgcacggctcggaggacatcgtggtgggctgcggtggcttcgtcaagtcggacgtggagatcaactactctctcatcgaggtgagcgcccgccccgccgcccggcgccgagtcgccgggccggtggttcagcctctctgggccgcgctggcctcgtctctgacaccgggcggtgtggagtccttggagcccttacctcttccgaggctatgctgtccgcgggctccctgcagcccctccccagtcgcgctggaggggaggttcttatcatggggtcgtctaaggactgaggggtgccagacctcaggttcttcaaaaccccgactccagatccccggaacacagaccccagatcctcaaaacccagaccctaaattccctggagcccagactccatttctttaaaacttagacctgagatctcctcgaatcagaccccctgaaactcagatttccccaaacccacattccagaacctagagaccacatgtcttatcccccaaactccacagcccagaaccccccgaagttctaatccactgctcctccaaaccccgcggcatgattttaaagagcatcaattcccatcccatagatactgacctagtagatcagtattggcaaccctggggccggaaagctattttttatttctccggctcccctccacttctgaaaatggagagttgccagctgccctgattgccttaatgagtagttaatggaattaccctagagatttgtgctgaaggttttttttttttttttttttaattaagttgtaaagtcctgttaaatgtttatcagcccggtgggattatgacccagaaaggttcccgtaaagaggaaagggatggatggaggtaggggcagaatgtcatttgtcccggtagatgggaggggaccagagcaaggcctgggcctcatttttggg

SEQ ID NO: 6951 - DNA, 6000 bp, Homo sapiens
ggaggccgcctgacatgtggcatctgctacctgtggagccacacctggcacccacctctccctagttcccattctcacctctaagctaatgcagaagctaccttcagggctttcttactactttctgtgtcatgaaaccctgggcagtccatcaaagcctatagagccctcttggaataatgtttttagaatcgtagaatagaatacatagattgataatgaaattataatgaacactgatatacagttatcaaaatatttaaacaaatttaaatatggtcatgtctttgcttctttgttaacacattaaatagacaatttagaggtgggcctaataactatttgtaattttcaagcagtaaagaacataaatgaaatttcaagtcatttgcaacaactgcaagtgtaatgagatagactacacatgatctttgttggtgacaaagtcctgagtaagtgctaagcttgttttggttggttgcctgcagtcataatggaaggaaacactaaatttcagaaggaggttggtgacaatggtgatgcaactttttttctttctaagttcatggaccttccaaataagccccactccccatctttggttctttgggactcagcttaatgtcagcccctctgggaaaccttctgtgatccttcatcacacgaggttggggcccctcacctgtaaccccacagtcccctgagcctccctttatcacaccacaggtcacatataattccatgcatttgtctacctccctgattggggccttcttcattgagatctgtaaaggtgccagctttgcaggcacagccttgatctgagtccaagttacattgaaaagctggacttcatgtccccgtgaaaggcaggagaggcttgcaaagcagtgggatcctggaactcattgacactcccctgatgaaggacttaaactgatttctcgtccattctttcatctgacgatggtgcagccatgatgagttgagactttattgctaaccagacctgcatttttgtcctgtccctgtctcttgtcacctgtttaccttgggcaactcactttgcttctcgtctcaggatttcagtttcctcacccgtaaactggggaccatgacagtacccaccttgtaaggctccagtagggatgaaacaaaaacaaatgtgaagggcttaacactcaatcataataaccagttgtctgagagttgaaagtgtccatgttagctgttgttgcaacccatttgctcattcaacaagcatttatcaaacacctattttgccaggtgctttgcatacatttaaagcatttcataataccagaggcaggttctattatccgcattttaaataacctcttcttttgctcgagaggtgcttagtattcttggacagtttcaggtcataagggattaaggtaccaaaaaattctggggacggggtcatccccctcctccaagatcaggcattattaggcaacatggtgcaggggctagggaaaggattcaggtttaggtttgaatcccagctcctggaagccacacacaccctgcagggcagacacatttgacggcaataattgaacttagcttaccctgcgaacgaccctatggtctaagaagaatgtgtattcacagttcagagctaaggaatccgggagtggccaacctggagattcactccttatctatgaaggatgtctgggtcccctgcctatcccttggaatgcaggctgtacaggcaattgaggcccttggttttgggttaaagagccaaaacccttggttaaagggccaaaaggaagttgcttagatagaaggtgctaagcgaaaatgctatataaactgcatgctttttatataaacatgttttttatataaacaatcgaggccctttgttttgggttaaagggccaaaaggaagttgctaggtggagggtgctaagtgaaaatgctacataaactgcatgcttttatataaacagtagaggttctcctgtccagccagctgccactggattgtccctgtatgtaagttccctcaataaaccctgtgtctcgttcactgtctctaggtctcttttttggcctcctggacatggtactattcctaaaggagttaacagtggcctggcatgacacgccttgggcaaatgacttcatctctttttttttttttcgagatggggtcttactctgtcatgtaggctagagtgcagtggtgtgatctcagctcactatagcctcaatctcctgggctcaagcgattctccagcctcagtctcccaagtagctgggactacaggtgtgagccaccaatgccgggctaatttttgtattttgtaaagaaactttttgtaggctggtcttgaactcctggcctcaagtgatccacccactttggcctcccaaagtgctgggattacaggcatgagccaccatgcctggccaacttcacctcttaatgcctctttttttctcacctaaagagtgggatagtacttgtgcctacctcatggtaatcagagaattaaaagatcaaaatttgtgtaaagggctgaaaacagtgcctggtacacagacctcaaaaagggttaactttttttttttgagatggtatctcattctgtcacccaggctggagtgcagtggcacgatctcagctcactgcaacctccgcctcccaggttcaagtgattctcctagcctcagcctcctgagtagttgggattacaggcacctgccaccatgcccggctattttttgtatttttagtagagacggagtttcgccatgttggccaggctgatctcgaactcctgacctcaggtgaaaaagggttaactatttttacttatgggaacacctagcaaattcctcgaactccctcaagtgcccccaaggagcacccgttccaataggcatcctcctctgtgaggctcactccccacctggcatgccttgccatcagtgctggagaaagattgtggataaataccacaaagtggttaggagtggccactttgggttcactgctggacttgtgggttcaaatgtcagtgccctgggctaccagctgtcaggccttcatagaggctttacctgtctgggctgcagtccctcataaattggagataatcatagcacctccctcaggaagcagagtgaataaggcaacaaaaacaattactgagtgcctactctggctggacaggtgctacctaataggagtgatcaaggtactgcaggttgaaatgaaataacgcttgtgaagtgttgaggcgtgtatgcctgcagaatcataagcactcaatatgcgttacgtgctatatgctacaaactaaatatatcatactaaaaaatgtataggtctgctagatttttagacaaaaaatatatgcatctgaatatccatcttttgttactcccatattcattttctcatttattcccacaaatcagccctggaggataggcagggtggagattttctcctgtttttactgaggaaaaagaggcactgggaggttaaaattaaaatgctgataagctggtgtccggcaacaggagatgactgggcatattaaaaagaaaaccggcccggcgcagtggctcacgcccctaatcccagcactttgggaggccgaggcaggcagatcacttgaggccaggagttcgagaccagcctggcccacatggtgaaaccctttctctaccaaaaatacaaaaattagtgggcgtggtggcatgtgcctgtagtcccagctactcgggaggctgagacacgagaatcccttgaacctgggaggcggaggtttcagtgagccaagattaccccagtgcactccagcctgggtgacagagtgacaccctgtgtcaaaaataaaataaaataaaataaaataaaataaaataaaataaaataaaataaaataaaataaaataagaaatccagcggagggcaatgttccacctcgaatctctgagtggagagccagaggccttgggctgggaggtttgatggaggcctctgggtccagggcgccccagccacgaggacaggcaggagggcggcggtggacacgccccggggcgcacgctcgctggcggccgcctgcccgtgggcagaggagcgcacgaggccgggcacgacgctgggtggcgctgccgggccgccccgcgctagacctgttgcgtccagggcgcaactccggcaggtttagggtaaaggggcgctccgctctctccgcgcgccccctgcagccctggacgcagcacctccgtttgggacgccctacgcccaccttaacttgaggctcccatccacgcagcctctgcaagcctcaccgcaaccgtgctaggcgcgtcgggtggggcgggaataaagtttttccaacccagtttggggagagggctggatgggaaggaccctccctgctgcagacttcatggcaggctgcactgtgtcccctcggctccacggctgccccgggggcgctgctttcggtaggtgccagcccccgtgccagcaggatgggctgacctgtgtaccgccccctcccacccccttccccattcccatcccctcccccgcctcctgcgcgctccggccccggcgtctccggccccgcctgcgctggggtcgctgcagtccccgcagctgccccgggctgcttgcccaggcgccccggccttattccagcctggggagcgcctcggtggggagcacgggacagcgagggaggccgaggcgggggccctgggcgcccgatatctccgaaccggggaggcggccccgattccgagagccggaacgcagggaaaggcaaggacggggcggccggcggaggggcgggcgccgctcatcagccacgccagtcacgtctggggccaccggctgcctttttcttcctttccccctttgctttcttccccctccgctgttggcgagggcaaagtggccgtggcggcgccatgcccgggccggagtgagtgcgcgcgggcgaaaatggcgtacatccaggtagggctgaggctgggggcaaggtccggggtgcgggtagggggtgccgcgccccctccggctgggagcgcgcggaagggagggcccacggctaggctcccacaaacttgcttcgagaaaaagggtgcccgtgcgcgggcaacctgtgcagcaacaggggtgcgccccgggaggagagactggggacccccaaaccccgggatggagggtcctatgtgtactctgcaacgcgcgcccttgcctcttggggagggaatggggggtggggcggacttttcttctcccctgccccctccctctccttggcaccccaccccaggggaggggccgtggggagggcggcccggggcgcgccagccacccggcccgccagctgccgttgccgtggtgacggctccggctaattggccggcggagcgagcctgaggcagctgttccgaccaggagggacaaggacgtcgtctctcctgggcactgggtgctgaggggtgggggacacccagaggccagaggcgcgctggtgaagagaagggagcctgttactttactccgctgcattggggtctgggagatgtggaccctcttcaccttgaagaaacgtcccccaagaatccttgggctgaaataattctgaaataatttctaagcagccttttttggggggagggggcggaggggtgggccgggcttcttggtgaaaagacctttctcctctgcaagaagggaagtgaccgcaggtcagcgccaaggtcaagcaggcagacccgcagtgagacccgttgagctgcttgcttctggcgctggcgcctctgagctgggcagagaagcttacagactcccacgtccagggtgcatcttggctcacatcttgtcccctcagccacagctgggggtgctgctggtcctcccattcccctctgggtcacatatcccctcatcgtgtcctcagacgcttcagcctgccgggaactctgtgc

SEQ ID NO: 6952 - DNA, 6000 bp, Homo sapiens
acacagaaggcttctgtgaacaaatgggtgggggtttctccccacacaccaagaaagcgatcaattttacagcagacatcgctgggtatcctccaattcaattctgacactatctacctggagatagtgtcagatcccataggacaaaggcgcagtccccaagactatatacctccttcagaccccagccacatgtccaggccgccggaactttttctttttattattattattatttttaaggatctcactccgttattcaggctggagtgcagtggcaccatctcagctcactgcaacatccgcctcccaggttcaagcgattcttgtgcctcagcctcctgagtagctggcattacaggcatgcgccaccacacccagctcatttttgtatttttagtagagacggggtttcggcattttggccaggctggtctcaaactcctgacctcaactgatctgcccacctcggcttcccaaagtgctgggattacaggcatgagccaccgcacccagccccagaacttctgaccaaccagcttcaagttggggttcccacgacctcctcctttggtttggttaatttgctggagcagctcacagaacttcgggaaacttatgtttactggcttattacaaagaatattacaagggacatagatgaagagatgcattaggtgaggtataggggaagggacacagagcttccatgccctccctgggtgagccaccctccaggaacctccccgtcttcagctatcagaaagctacctgaacccagtcctcttgggccttttattgggaggcttcattacatagacatgattgacaagcatgtagaaatgagactggatggccgggcatggtggctctcacctgcaatcccagcactttgggaggccgaggcaggtggatcacctaaggtcaggagttcgataccagcctggccaacatggtgaaaccccgtctctactaaaaatacaaaaattagccgggcatggtggcatgtgcctgtagtcccagctacttgggaggctgaggcaggggaatcacttgaactcaggaggcggagaatgcagtgagccgagatcaaagggtgtatgatctcatactaatagacaggttggggaaacccagaaagctgtgtctgttcagatccttcttgggctttctgtgcagcattccttcctccagggtttggggcaggaccccttctgaaatgagggagaatttctttatggccaactccaagacagaaaggtggggaaagactggaatcctgccttggggagaaaatagagcaaatgaaaagaggcaggagatcagagagagagattctgttttctgaggcttaaaattctaacattataacaagggctatggtagttatgagccaggaaccacgggtgggaaaaaattatatatatatattatatatatatatatcacaggaaccctggtagaagaggagtccccaaaaggcagagagtagtaaagaaatagaggaccaaaagatgaacctggctgtcttcatcattttgctttgtgttgaatctgattcacaaaccacatgcaattaaataatagcccaggctgggtgcactggctcacacctgtaatcccaggacttctggaggctgaggcaggtagatcacttgagttcagaggtttaagaacagcctgagcaacacagtgaaaccccatctctatgaaaaatagaaaatttggccaagcatggtagctcatgcttgtaatcccagcactttgggaggcctaggcgggtggatcacttgaggtcaggagtttgagaccagcctgcccaacatggtgaaactccgtctctgctaaaaatacaaaagttagctgggcatggtggtacatgcctgtgatcccagctactcaggaggctcaggctggagaatcacttgaacccgggaggcggaggttgccgtgagctgagatcatgccactgcactccagcctgggcaacagaatgagactctgtctcaaaaaaaaaaaaaagaagaaaaaagaaaaattagccaggcctggtggcgtgcacctgcagtgccagctactctggaggctgagatgggaagatcccttgggcccaggaggcaggcactgcagtgagccaagatcaccctactgcactccagcctaggggacagagtgagaccttgcctaaaaaaggaaagaaagaaaaacaaaagatagcctgataaagtatagctttgatgaattaattatgctgtgtccctaggaagcacctgccacatagtgtgcgtgcttatattcattcatttatgaatgaatattttgagatggaatctcactatattgctccgactgttctcaaattcctgggctcaagcaatcctcccgcctcagcctcccaagtagctgagaatacaggtgtgagccaccacctcagttggcaagaatgaatgaatgatacaccagcatcttttttgttgttgtttttgaggcagagtttcactctgtcccccaggctggagtggagtggagtgacctcggctcactgcaacctctacctcctgagttcaagcaattctccagcctcagcctcccaagcagttgggattacaggcccctgccaccacacctggataatttttgtattttcagtagacagagtttcaccatgttggccaggctggtcttgaactcctggcctcaagtgatccacccaccttggcctcccaaagtgctgtgattagaggcataaaccaccacacctggcaagaatgaatgaatgatataccagcctcttgttacaggaaggggccagagtgaaatgactaagagttctgctttgggttcagagcaatccggatttgaccccagctctactgcttgctggttttgtgacaaattatttcatgaagcatcagttttcttagctataaaatggggttgattttaatatctacttcatagcgtaaatgttgtgctctatttaaagtacttggcctgcagtaatggcaggtatcattactgttaattatcactgttgggagaaggaatacatgggttctagttcaattttgacatttaatgaaagtgtgatgaggaggaacagtgtccgttcagctctctgcacctcaatttctacaactattaaataaacaactaggcctaggtgatttgaaattagatctattggataggaattgtgtttatgtgcctggcactggaacagaaatgtggcttagcaataaaggggtttatttttctcatgtactgagaagtgtgggttaggtgcaatggttcacacctgtaatcccagcactctgggaagccaaggtgggagaattgcttgaaaccaggggttcgagaccagcctggacaacaaagtgagaccctatgtctttaaaaaaaaacaaatagctgggcatggtggtgcccctgtggtcccagatactcaggaggctgaagcaggaggattacttgatcccaggaggtcaaggctgcagtgagttatgatcacactactgcactccagcctgggaaacagagcaagacctcatctctaaaaaaaaaagtttaaaaatttgtacttttttttacatgcggtggctcatgcctgtaatctcagcactttgggaggctgaggcaggcgaatcacttgaggtcaggagttcaaggccagcctggccaacatggtgaaacctcgtctctacaaaaaatacaaaaatttgccaggctactcaggaggctgaggcaggagaattgcctgaacccaggaggcaaaggctgcagtgagccaagatcatgccactgtactccagcctgggcaacagagagagactctgtctctaaataaataaataaataaaaatttttaaaaagcaaaaaaacaagaagcatggagggaggaagtgcaaagtttgtacagcagctccacccatgatgccctcaaggactgaagccccttctgcagcctttttctctaccatccttagcaggtgaacgttcgttctcttcttttcaaaatgtctggaggaagactggtgaagggcaaattgtgaacccaggcaaactgtccccttagaaagagcattcctggaagccacaagtctcattggctaaaactgagtcacaggcccacccttagccgcaaagaacactgggaaactttgagcactatgtctgcacaggaaatggagcttttgctggtgtgagaaagaagaagattagagactgagagccagacaaatagcagagtccactacctaaggcatcaggagataataattgtatcactgtaaacccatgtggatttctacaggcagataaaactacagatataaaatataagttcagccaggtgctgtgtctcacgcctgtaatcccagcactttgggaggccgaggcaggaggatcacgaggtcaggagatcgagaccatcctggctaacgtggtgaaaccccgtctctactaaaaatacaaaaaattagccgggcatggtggcgggcgcctgtaatcccagctacttgggaggctgaggcaggagaatggcgtgaacctgggaggtggaggttacagtgagctgagatcgcgccactgcactccagcctgggtgacatagcgagactccatctcaaaaaaaaaaatatatatatacacacatttagaatatatatatgtatatttagaacatatatatgtatatttagaacatatatatatgtatatatataagttctaggccagaggcactaaattataaaaaaaaatcttgccctttgactatgagtcatttagaaaaatatcttccttctgtttctagaatcccattgtcttaaatgaaagattctgttttcgatttcttgcctagctaccaagacagaattctctgcaggaaaacactccttctcctgagaaaactcctcaggggttagatgcagggagttatgttgtgatttgtgtaggggtggctttggtgagctcatcctggcattttaaaaataatgtgaatggtgtatccctttgtgatcatcatcactttttccctgcgagtcccaatcaatgcgggtgtgactgctgtatgaagtctcaggaagcccaccccagtggagaagaaggcttgcaggaggcaggagatgctgtccgatgaccacgtgaatgaaatcatcatacaggttgagaatgtttcctctggggtccaaagccacccatcctcaaatcagatttttcaagaaaaggtgctgctagactcaagcatcaacatggttttgtcaatatctgacattgatgtgatagactctcagacagtcagcaaaaggaatgaccaaaagggtaaccaggtgctgcggttttcaacatctttgaatgagtcgatgtctcagacccttcatagcctagaatgcatgggcatagacactcctggttcttcacatgaaactgttcaaggtagtgaaatgctggggaagagaagtaggggagtaggaaaaaaggcttcctcgttgtccacagcatattttactttttagatatcaagtggggccaggcgtggtggctcacacctataatcctacggctttgggaggccaagataagaggaacacttgagcccaggtgttcgagactagcctgggcaacaaagggagacctcattgctacaaaaaaatttaaaaaataataaccaggcatgatggtgcacacctgtggtcccagctactcaggaggctaaggtgggaagatcacttgagcctaggagttggaggctgcagcaagctctgatggcaccactgcaacccagcctgggtgacagagtaagatcctgtctctaaaagaaggacattgagtaatatggaagggcggaaggttttgtggttgaactaaggaagccaaggacaaaggaagggatcaatttaagacatccctaacaagagcttatttttatcaagcttattttgtatgccttgtgctctgcagagcacctgctttttgttatccatcgaatttttatgtact

SEQ ID NO: 6953 - DNA, 6000 bp, Homo sapiens
tggatggggggagagccctctcctgtcccgctcatacctgtctaactacctgtaacaaaggtagacccagagtttacatagtgcagaaaatgtcggaattcttactgagagccacagtagagataccttactgagcaccccttacagttataactccagaaaagccatgccttagaagtaaagatcatgtcctagaataagatcaaaaacctaaatagacccaccctaataaagaataaaataaaagcctgacagaatcaaagggagcacgcaaaatatacgaaagctgggaaaagacgtttacttctgtgaaccaaaagtatctgagacaggtctcaatcaatgtggaaagtttccattgccaaggttaaggataagcgcctgagaggtatgtctatgcctttctccaaagatgatttcaagggcttcaatatttaaggagaaaggattgatatgggtgaaaaggaagaaaatttgaaatcttaattccagctctttgggaggccagtccagtggactgcctgaggtcaggagtttgagaccagcctgagcaacatggcaaaaccccatctctatcaaaaatacaaaaattagccagatgtggtggcatatgcctgtggtcccagctactcaggagactgaagtgggaggactacttgagcccaggaagtactggaagcactcaagcgtgagtgacagatcaagaccgtctcaaaaaaaaaaaaaaaaaaagaaaaaatttaaaaatgtgtgggtatacaagagacaaagggttgcatccccttgagtctttgatcagcctttcactgaatatacaatttacatgtgagaggatgggcagaggaatactcacttatgtcattgtctggctcagagaatcttcattttttttacataatacaatgtaaacaatagggcagaggaagccatcagatacacatttgtttaagatggactttgagttctgtcctttgtcctgcacctgtgaaaataagctatcaggcctggtgcggtggctcacacctgtaatcccagcactttgggaggccgaggtgggtgcatcacctgaggtcaggagttcgagaccagcctggccaacatagtgaaaccctgtctctactaaaaatgcaaaattagccaggcatcatggcacatgcctgtaatctcagctactcaggaggctgaggtgggaaaatctgcttgaaaccaggaggtggaggttgtagtgagctcagatcatgccattccactccagcctgggcaacaagagtgaaactctccaaaaaaaaaaaaaaaaaaaaaaaaaagagggaggagggagggaggaagggagggagagagagaaacagagaaagagagacagagagagagagagaaaggaaaggaagaaaaggaaaggaaggaaggaagacagctatcaatttacattgccagggtgaaattcaacaaaactgttttagggtaaagatcctcagatccacatggaattgccctgtgggcaaattgtaaggtaagttatgtagctttttatccttatagctatcttatttaggaataaaacgggaggcaggtttgtctgacatcattcccagcttgaattttccctttggcttagtgatttggaggccctgagattttttttcctttcacacttcctaactcattttatctatgacagaaaaatgcatgaatggggggaatgaaagtgaaagttaaagccagtatcactctggaacataaatgcacaaatcctaaacaaataagtagcaaattaggtctagcaatatattaaaagaataaaacatccagaccaagttgggtttataacaggaatgaaaggtttatttataatttgaatcaatcaatataacttaacacagaataagaccaatctgttcacctcaatacatggaaaaagtatatgtgaccaaaaacaataattatagaatattagaaattgatatgaacttttttttcccccccgagacagagtctcgctgtgtcgcctaggctggagtacaatggcagtgatctcggctcactgcaacttccgcctcccaggttcaagcaattctccctgcctcagcctcccgagtatctaagatttcagtcaactgccaccatgcccggctaatttttgtatttttttttcagtagagacagggttttgccacgttggccaggctggtcttgaactcctgacctcaggtgatccacccaccttggcctcccatagtgctgggattacaggcatgagccactgtgcctggcccagggaatatttcatcagagataatacctgacagggtaggattctgaaaggaatggggaaggaaatgccaacatcgaaattatgcattggggaagccatgattaatgcctctggccctaagatggcaaggtaatgttgttcccaagtataaacccacatcaccttcctctggtgtgttttactcctactgttgcctgctttctctttacattctcccaccccatactcaccgcgagcgctcaggctaggtagttaggctccatagagtcaaattggaccccacattaacgaaactaacaattcgagctttccagcaatgaactcatctgctcttccatgtctactcttttcctgtctgctggtttcctctcccagggctttcagtgtgttctacgcagaaaccagttcaaggactgggttttcttctgcaataaaatgctggagttgtggcagagacctccacagtgagaacagccacggagttggctaggaggtgacatgatgtggaagtggtggatgtgtccacaagatggcactcctaatttgtagcttaatgcttaataggacattttgcaattgacaaacttgggattttatgatttatgtagctgatatcatgaattatgtttcaaatcctgccacattttgaacagaatttatttttgcccctttctgatattgggtcataacctaagaatgagaggacattataagcaggtgtgggtgtgtgtgtgtgtgtgtgtgtgtgtgcacttgagtgtggagacttttgtgttcctcctacctgacctgaactgttgaatgatgaagttacaatgattggactcaggggtgcagctagctaacttgggaattggggttttgaagtactggagacagctttgtatgccatgttaatgaatttgaattttatcctgaaaaacgtggctgtcgttgaagaattttaagcaggcaggtggcttgatcagagcactgcttcccagatttcactcaatggtacctgtataacacattcatgatttttgctgtatctccgtatcatcaagttacttaacgtttttacaccaacttttattattttataaatgtacttaaagaggaaattcactactagcattgcttgccataatcaaaataaatatattattaaaatggaacagtgctaaataaggtgtacacatggacatagagtgtggaatgacagacaatggagactccgaaaggtggaggggtgggagagaggtgaacgatgagaaagtacttaatgggtaccatgtacattattcgggtgatgggtacactaaaggcccagacttcaccattactgcaatatatccatataacataactgtacttgcgccccttaaatttatacaaatttttaaaaggaaaaaatggaagtgttcatctatgtaccaacttaaaatcatctcacgcaccactagtgttaaatctaccacatgtggggaaactgtgtggtatgaattgggttgagggcgtccccagcaggcacagaaattgggttggtgccaggttcttaatgcccagatcttaattagagagcccaagtccgttgtaggcctggagcaattcagacacaaggcaaaaagaaagtacatttgcctatgccttgtaacgtctacaccaccagcctttctgaaactattgtgcatacgaagtcatcccaggatcttgtaaaaacaccgattcggatccaatatgggacctggagttcatacatttctaatcaactcctaaatgatattgatgctgatactgtcggtttcccaaccaagcaacgtagcaaggtacgaaactctaaagtccctaaagggcagggaccacgcctctcgcgttggcatagtgcctagctcaaggcactttctgggttaacactcgctgaggaccggagtgaacgcccccgccccaagtcgtcacgtgactgactttctccaactgccggtttcggctcacataacacacctactatccaaaacatttctattttcctaacacaaaaactatagctaagtttttatattctatgtagccccagcctaggacgtaaattccacgagaccaaaagccttgtgatgattccccgaggttgctgaccctcccggtgtgtcccgggcctgctctgggggacacagcggcgaatacgttgaacgaggcccctgtttcacggagctaaagatccagtaaggacttcacccagcgagaggcaactacgccgggcttcgatacccaatacctctgcagaaaggtggagtggcaggaatctcctgaagcctccaacgtccaggaacgcggaaacccagggcctccagtgcaggtgtcatcccggagggcgcatgcggagtcccaagagaggcgcgtcccattggacaatgctgagcggaagagcccaagatagcggggggagttgtgacaggctgctgcagacgtacttagaaaaggggtgcatactggatattcaggctaggagaagaacgcaaaaagcagtgacgtacattattctctgcatatatttacttgggaaattgtgcgtctccctattctgagtcttggaggaattggactggtccaaccttataaagagagcagtagagcgcggcagtatagagagtacctcacgaaggggacgtgggaaagtgttagcggggaacgctgggaaactcccggcctccgccaccatcttgctttcctttaatccggcagtgaccgtgtgtcagaacaatcttgaatcatgaagctactaaccagagccggctctttctcggtgagctcaggtggcgggtttgggaaagggctggggagcagtgtgtcgacaaggtgatacgaggcggaggtgtctggtctggggtctgggccttgggattcggtctgcccttcagctgaaccctgcgggccaagtgggctgcagactgggtcaggctttggaggcccagctcatgctgtgagcacaagagacctaacaccgggaaacctgaagagaggggcaggacgtgagagcggagttgaagcgagtccttggagagacttctgaaggtcactccggtactcaagtgctggagaaagagaccgtgaaacccagggggagcgggaggacggcgcacttagccccccaccttcactttatccgctgcagcctctgctccttggtttatcacggagcgtcagtttccccagcgaataaaagtataagaaaggagctaatgcagatagaacacttattacagtacctggaacttcattgttaaatactatggtgtcttagtagtctaacgttgcttttcttgatcgtatgttagacggttcctccaagacgtctctgtttgtcctcaaaagctccttaattaagtttccccttcaagcctaaattaaacatagctgtcacttggggaaaactcacacatcagggttatatcactgtgggacagtggttattaagaggggtaagggggaacacttaaaaaatcatagcgagggacagaatgcccccagggaaccggtggcgatgtttggagacatatttagttgcaacaacttgtaaggagggtgctattggcatggagaggccagggatgctgctaaacttcgccttacagcaaagaattatctagccccaagtgccagtagtagtacctgtgttgagaaacccccctagatggagatgcagaagaccagacctgggcatggaatgttcttatgctttatgtttacat

SEQ ID NO: 6954 - DNA, 6000 bp, Homo sapiens
aaatcaaccaggtctccggtcttctagatttggatcatttctacaggcagtatctggaagccccttgagcttttaccctctgattttatccaaagaatgaagcacaactgaaatctctcattctcgctctcaacctctttcctaaatgtagcagatatatgcacatcctctgattcagatgcaaactttgtacctcacagaccctgcagaccatgtggctccacttcactgtcctttgcctcataggagtcaccctctttgggacattttctcacatttttgcaaaactctgctttagggaacagatttgaagcttacacactgaaataaaactgaataacaaggcttgattaggcccaaagactgaaggggaagaaaatttcctattttatgattttaaattcaaagtcttgaatgcagggcattagagtgggaaggaagattcaagagaatgctaatgtgaaagagaaatggactcagaaaaagaaaagaaagagagtgtaatgtgctctttggttgctattctatttgagcccagttctccagccttcttcttaattttgtgagctaccccaaagttcctttcctgtgtaagatatcccaaatctctttttttcacttctagtaacccttactgtttcataaataaagagcaatggcagttaagaatgagaagcaaaataaataagatacaagaaaagtagagaagttgaagaaagtaactggatcctatgactgtctcaaatttggaagggttgcagtcctgatacatgcatatccttcaaaataagcccccccacctccaacactttttattaaaatggtatctattccttgcaacggagggagcaactctttttgtttgtttgttgtattggtcagcactctttcagttgcaagtgctaacagaaagatagctaatcactgcagcaataaagtccagggtccatgcattccgcatggctagattcagaggttcaaaggatattatcaggaatctaattctccctccatcagttctgctctcctctttgttggctttattgttggtttctcctcttgatagcagagatgaccattggaagcttcaggcttattttagattaattcatcatctcagaaaaagaagtttctcttttccaatagttttcacaaatgttgtgtggtttattctcactagaaagatttgagttactttcagttcttgaaatataattagaaagtgatgatgtcaggcttggtcatatgcctgtctttgaactatgttcaacccatacaaaccacatgggaataaaagagggaaaactgtttgtccaaggatggcaaggattactagttgtcctccataaccattctttagttctttcttgataccaaaatctcaaagtgttagccaggcatacagccatccagaatcaagactgcattttgaagcatctcttgaagctagaaagtcaaatgataaaatgctgtcaaattgaatacgagttgaaataatacaggcaacttccaagaaatgtccttaaacagatatggcatgtctttacatatttactaatgaccagaatgtgaacattctggctgcagatgaataagtcattgtagactatgtggtgactttagaatggaggaaatgcatggtagagtaacaagatagagggagcctgggtcccaaacactttggagcttccatacaagccctaaagtaccttcatctggactttcatgtgattacaaaaataaacatataccttgcttaagtgggtgttaattgacaaactacacaacccagcataatcctacctgatacccccaaagcagaatcacgtttgctactgtaaacagataaaggtttaggagatgggcaggtatgtccaatgtctcacttcctaaaaaattctatccaagtcagtcattactctgattggaaatttgaagaggaaaatcttcctggttttgatatatgtgagtacccagggatatcacagtttatgaattcaaaggttaaaaattatttaaaaattaagccaagcacagaattatgagaaatcattatattcatgttttattttctaagggaaatagtactgatcacagcagatgactccacatttaaccttgtaattttaacaatggaatacaaaaatagcaggttcatgatgtgaataattgttcaaagtatatataagagctccttccaggccaggcattgtggctcatgtctgtaattctagcactttgggaagctgaggcaggaggatcacttgagctcaggagttcaagaccagcttgggcaacacagtaagacttcatctctacaaaaaattaaaaaactagctaggtgtggtggcacatgcctgtagtcctagctactcaggaggctgaggcaggaggatcccttgagcccaggaagtggaggctgcagcatgagctatgattgcactactgcatgccagcatggtcaacagagtgagacacttcccctcacccaaaagaagaagaagaactcctttaagtatatttgttttgacatttttattaacaattagaatgaggaattaattaaattgtgatcaactgtggaaattacatgatgccaagtgagtggttcatgctttgggtaatggaatcatagaatcatgcaacatctaaactttgagagacttttaaggtgaatcatagcgtcccattttacagctgaggaacctgaggcttaaagggggtccacttgcccaaagtacacctggaataaagggtaaagctgggatacaatctttctactttttctttttgaataaatgaaagctacctcgtggtttgacttcaaatagacatttaaaaaaaactagggcagcgaactgatgagacaagatgaaatgcaatcaagtcaaatctataaggacctacacattgggtccaaaaaggcccactgtacaagcacagtatggggtagctgtgccttaatcagcagcacttgtaagaaacatttagagatgttacttggctgcaagtttgagatgtcagcagtgtgatatagccacaagaaaaagataatggagtcttaggtggcattactagaaatagaacttacaaaagagaggtgagagtcctgttgaacttttcaatccatatctgaaattcctcgcgcagtcccaggtgtgagattttagaagagacatagacaaattagcttacatccaggagaggagcctaggatggaattatatgaataatggtcaaaggaagttaggaagctgcaaagtgctgtaactaagagcttgaatcttggagtcaagactgcccgggtttaatcccagctctgccagttactgtgtatatgtttgttaaatcttcttatcactgcctgtagattagaaattacaataatacctatctccaaagataaatgaggtagtgcatgtcaagtgattagcgcataactcccataaaacaagcactcaataaatgctagctactattagaattaagacagcaaagtgatgccagggtaatggtaacaacttcataggttgtgaatatttaatcagttaacccatgccaggtgcttgatacaaagttggcagctattattattatctgccgtagaattggtttaaggtttctagggatgggactagtttggggacaaaatattttctggtttgggctaagatccacagaacctaatgatcagtttacagcctgaggaaggaagtcagttataccctgatcagggtgggggtcatggtggtcatctagacattctatggctgggtggtggtggagggcactcaccttgtgaacactcggacatggtgaattggcattggcattgctgttgaaggacaactcagccgtgttcttagccatggccatttaggcctgttctgatgcagggttctgatccaaggtaccagtgtggtccctcagggaagtactggggatcgtcacttatgcctgttctggacatggtcaccgagaactgtcctgtaggcattcacttaggaatcattcgaagtggaattgctcctggatacgttctccttgtactctgtttcctcctcctagtgtctctgtgtgaagaagccctcctcactcagccctcggcgaccctctggtaccctggacagctccccggggagcagtctaccgctaggcggcggctgctaagagaggaaccctcctgacgcggagtctgccgctccggggctcgctctccggcaggcccggggagaggtggggtgacaatgggttggggtgcgcgcgtgcctcataggtgcgagacagagcgagccgccggggtgtgagtcagcgcgctgggggctaagaagctgggtgaatagtcacggaatctcactcacgctcggctcctccacccatcccgtctacagcgcgtgtcccagtccagggcgtgcgtgcgctcggtgtccgattccgggctgtgtgtgtccatttggcgagatgtcgagagcggggggagtgtccttgtcggtgtatctgggcccaggttaggggacttctcctccccacccccgcgtgggtgtgggggtgtgtccgggctagggcgcgtgtgcttctgtgcctgtgcgtgcgtgtgcgggtcagggtggtgggaccgcgcatcagggcagggtgcctgcgtctgcgtctgggtctgtctggtctgcatgtcggcgcgatctcgacctggattcgtgtccctggatgtcgagaggccagcgtggtgggggtgtccagcctcccggaggagtactatgccttgacaccttcgtttcaccgccccaaagctggcctggggctccgtagggagtggcctgcatggggagggcccgcgtgctgtgtttctgggaggggtaagagagtgggggcgcagggggcgggccaggtccctgggcgcggcgcgggctcgggggacccgcgcggctgacgtcaggccactccttaaatagagccggcagcgcgctccgctcggcatttcccgaagagccagatcgcggccggcgccagcgccaccgtccggtccacccgccagcccgcacagccgcgccgccgccgagcgtttcgtgagcggcgctccgaggatcaggaatggggcttcgggcgctgggcgcgctccgaacccggcgcacgtaagagcctgggagcgcccgagccgcccggctgcccggagccccatcgcctaggaccgggagatgctggaaatgcaaccgcctgttccccgaggagccgctgcccccgggaccccctggcactgtgcgcaccctggtcagcagcccccggagaagacggcgcccccaacgcccgacccgcgtggccgtggcagcgccacgcgagccctctaggcgaccgcagggccacagcagctcagccgccggtgccccctcggaaaccatgacccccggcgcgggcccatggagccatggcctatagggtcctgggccgcgcggggccacctcagccgcggagggcgcgcaggctgctcttcgccttcacgctctcgctctcctgcacttacctgtgttacagcttcctgtgctgctgcgacgacctgggtcggagccgcctcctcggcgcgcctcgctgcctccgcggccccagcgcgggcggccagaaacttctccagaagtcccgcccctgtgatccctccgggccgacgcccagcgagcccagcgctcccagcgcgcccgccgccgccgtgcccgcccctcgcctctccggttccaaccactccggctcacccaagctgggtaccaagcggttgccccaagccctcattgtgggcgtgaagaaggggggcacccgggccgtgctggagtttatccgagtacacccggacgtgcgggccttgggcacggaaccccacttctttgacaggaactacggccgcgggctggattggtacaggtaaggaccaggagctccgctccgtgcgccgggtctctgatcgcttccattgggagagccatccgtctcttgtgttttctctttcttttaacccaa

SEQ ID NO: 6955 - DNA, 6000 bp, Homo sapiens
ttttatcaaaacatacatgtataagatttttaaaatcagatagaagtggctgtagtgaaaaacaactgttctggtcccatcctgttcattctcattactcatttcattttattttagttcatttcacctcaacctctcttcttctcttctccaaatatagattagaatatttttatttttatattggttatctttaattttcaatgacataccagatactctagatctccttttatcaactctagaagtatatcttgtctattctctttgtataataatatcaggatgttacatcctaccattcccctccttctacctccaatttctatcactgtctagagagtagaaacataacttcatgtaattgggttcaaagagagaatagagaaagaagagagaatagagaatagagaaagagagagaatactgaaagaaggttaacaagactgaagttgaaataatgatgtgtgaatgttttgtaagcatatttggtttttaatgcttttttctataggttgaatctaaaagtagaaaactcataacaaggctatgtgtgaacatcaagagagaattcaagatggcggggatgacactctttagtccatgtgtgcctggttttcatcatctccttgacttacacacatgtgggtgcctttacctctgaagactttttctcttctaactgatgatgctccattctcttctgacaaaaggtaaagctggtttggtaccactgacacccaggttagttggggtccaatatcttctaagccccatatcctgccatgttgtcttctccttcgtggtcacattttactgctgatcccatggacatcactggagtggtgccacaagtagatcacatagacttttcacagaagtcttctgaggtatcacagaatttcccccttttctaagaactatcctcccacaactcacaggggctggtcctgatggctgcgtttatagtacatgaccctgaatcgttggccacagctgcatggaccaggaagtggcaagcaacataagctaggctgatcaggttgtctctcccggaaattttgaattaggactaaaacttcccagtttagtctgggtgggtttcttaaatagagatgacataagaactcaaaatctagcttctatttcaaggatcaaagaatagatgaagcaaaacaatttttcaactaaaaatatgaaaagaggcagagatgcaaaatgaagtgactgtcaagactcctgatggcatttttttttttttttttttttttttttttgctggttccagctccctgccaaggcctgattgaacctctgccctgtggttccttgaaacatcgtcatattcttgtactaaattccccattttcttaagctagctctggtaagtttttgccatttacagtcaaagtgaactcactaataaaatattcccaactgcataatcttctccctgggggatgggaatcatatctttgtattctccaaggtgctgagcacataggggaatgccttgcacatagtaggcactcgaaaagcatctgttgaattgaagcaactgagagtactccttcctaaatgacacaaccatttacagggatcactgacccctccagatgttatgagaagatggacaggaaaaagcataaatagatacaccgtgccaactacttcactagctgacagcccaatagaagaaaacaaaagtcttaataagagaatcagacatcagttgcaagatgtctgaatgtctcctagtcttctgccagataagtgggatcagaaagggctattagtagacaagagtctagctccagcccgccctggagagagctctgaatctcttgggtccctcattgatctgttgaaagagccctctagtggtgaaaatgaggaacgatctctagccttacaagcagattctacgcgcccaggtccacacacctacacattcaattgaatgaaaggatgaggtcaccccctagtaagttgggaggcatgatagggaacaaactgcggcctccctgcctccacactcccactccgttcagttgttctgacttgctccacatgcaggctcgggacttcccacagtgatcaggttggccctggacagcaattccaaagaatgagcctgcctcaccaagtcagaggctcaggacaaagctccagttttatcacatgtatccctttctcttattcagcaaaactgggtgcatcctgacccataattgttaccttcatctacctgagctcctgatccttttcccccaactatccttctgctaggctcctgggcaccatactctgcttgtctgcgcttctgttgtagagctaagtgggtggagatgaagatgctgctgttccactgtgggtctggtaaatggagagattggggcatactgtcccttagcccgaagctcactcacctttcatcaacatggtccttctttgaaagaagacctttctcacttctatccaagcaagagaagaatcaaacagatcctgaaatgactgctttgatcattagtaattatttcatcttatttacctttctgagagtggggagagaaatttttgctaactgaattaatccctcccaagaaataccaacctcacctccatgttacatatggctttcccttaaaaaagaaaggtaataacaatcaaggcaggatatttttattaagatgcaaattttcatttcaggaaagaaaatgacactaagaaacttgtaggggccctcgtgtatcctctccctactatcttctgtcattcttctggagtacggctgtggtgctggccccaagtttatccattccattgtggattatgtggcaagatttcagtatttctacctcctgtccataaatcagtgtttttgaaccacgacacatgcatatgcaactaaatgctcataggtatacacacctacatattcaaatctatactatacctacacacgtgcatgcatacacatacatgtgcaaatatgtatgcatatgcatagcaaaaatgctaggcatttgcagcaaatatgttcacatggtccataacactgtctgcaggtacaaacatacatttacatacttgctttacttctatgacggattcacaggcattcagaatttataactaaactgaacatagcacaggtgagcattcaaacacaatcactccacagctatatattcaaacttcctcctgcacatgagtatttatctaacaccaagaataaagtcttcagtcttaacaccaaaatgaaagtagcaaagtcaccaagaagttgtgagctgcatttgcgaacccttcaatatattcctgctacccagtcacctgaatagaagttcccaggcagccagagatggcaccaggggagtatgtttgtctgcgattacctcccgttatatttctgtccagctaaataacattcaaacatgacagttggttgcggacacatctcaggaactgtggaaacaacccaagcaacctcatttccaactatctgacctctggatatcagtcccaggatgccataagaaaaaaaataataagggcatttctgtgggctgtttctagtcaactcggtgtgtgcccatgcatatgccggaatacatagtaataaaaagctggttaaatgctggtcctttgcaatactggctatttccaaggaagagagctttcaggtgtgcaatgccatttgccctttggactaacaagcaaagcagacctaacttcacctgcttcatggtctcacttagataacaatgttaacaaatgatatctcagagacctttgaacaaaatctgacattttcagtgactctcccaccatgaatccatcacccccttcgatgtagatatgttaaaatgtataaaaggcatattcaaaggccaaaatcttatagtcttttgcccaaggtccctaatatgtgtatgacagagtctatgtatatttagcttcttccatcttttaggaatacatgatcatgtatatatgaacagttccgggtctgatctgagcgggttgtcttcggtgtaaaccagagctccagagaaaggagggtagacatattggtttgtttgctggggaaccaaattgagacagactctacacagatgtgattgtgacaacactttttgcccgcctaagcgagccatagagccgtctccagagctgccggtgcctttaagaagactcggtctttcgggtcttctttttccccaatgggctccagtggtgcccgcagcaaaaggcaaacttgcctggctcatggggtgaaagggaggattgaagaatgccgcgttgggtgggtgctgagggagcgccagagtgcgctacgggcttcgctccccttcccctttccttaacccttcctagagcggaggaaccgggtcgtgctgcagcgcccaggagccagggcgctgactgtcctcggctccagaaactttgcgcggagagtgggcttgactgggcagagccgagccggctggctgacccgggaaggaacgggggaagggcggggtgagggaagaaagaccctttagcaccccgggtttctagcccgggcggcggtgtgcagctgcatgagggagctgtcccttcggcaccacggaccttaaagcctaggcgttaagacgacggaggcggggcaacaggcggggagctgtcccttcagcaccacggaccttggcgcccccagggaaaccagccggcccccgccccaggactctgtcttttctccagtttgagcgggggtgtcgggagcaggcggagagctttcctgcgaggctgtggaagcagtgaacactcttctcagcggctcgcctcccagcagtgctattttttgccatccgccctcacccccagcacacgcgctcgcacacacacgcacgcacgcacacacacacacacacacactcacacagagacctctctgggtttctttgccttgagtctcccggggctgtgagaagccaggcgcatctcaaaccgagctggcagctccaggctccggagccatgccctgcacggaccctcgtctttaccacgctcctgaggaatgaaaggaacccagggaccctcagaaggcagcagtgatgcggaccaaccccccggagcctgcacccttccgagggccataggcgacccagggaactggagagagctccagaaaggaaatcccagctttcccaaagtccctgtggatgctgacaaaaggagacctgaatttttggaagagcctgtactaggttacccggctgcagagtgattttcccctccggcactgactctccccctccaacccccagccgtccagagtaccatgaagaattatgaggatgtgtgacagaggtatccagatgttgatcaccactgtaggagcctttgccgcttttagtttaatgaccattgcagtgggcacggactactggttatattccagaggtgtgtgcaggactaaatctacaagtgataatgaaaccagcaggaagaatgaagaagtaatgacccattcggggctgtggaggacctgctgcctagaaggtatttacaatttcctctcaatagctctgaataatccagttctgatattctggtgggtgtttggaggagatggaaatggtgataaggaaagaagagaagttcaaattattgctgagaatgtgcaggtgcccagactctgttaacagcaagactgacgccatgtgggttaaaggggttgggtcttgttgattgtttttagtataagcttcatgagatgagatttttgtcacactctaggcagcttctgcagtttagaaaagtcttcaaatccaaaatccctaggcatattgtcaactgcttggatctctggcttgagatggggtctttaaccctgcttaaattggatttcgaagggagggggagggaagggaggagaagggacaagaggaaagaagtgaggggggagagagagagagagagagagagagagagagagagagagagagagagaga

SEQ ID NO: 6956 - DNA, 6000 bp, Homo sapiens
cagagaagtcttgccaaccaaacagggataaagattagaagccttggtcctgttaaccagacctggatttggaaaactaggaagtttgccagccaaagaattttttaggaagacagtatctccttagcccactaggtttttcagtggttttgagagacagtatattgtgtatgaggacatcaggacatactctaaaactctcatgtagtggaaatatgttgttttgtctgaatggcattcaggttttccctggaagccactagttttctttttctttccttttttttttctttttttaattaagacggactcttgctctgttgccaaggctggagtgcagtggtgcaatcttggctcactgcaatctccacctcccgtgttcaagcaattctcctgcctcagcctcctgagtagttgggactacaggcgcgtgccaccatgcccggctaatttcttgtatttttaggagagatggggttttactgtgttagccaggatggtctcgatctcctgaccttgtgattcacccgccttggcctcccaaagtgctgggattacaggcatgagccgctgcactggcctagttttggagttatggaatccaaccttgccttgagcaagggaagggtgtttttagaggaccaataggtagtttgcccaggcatcagagaggacataatatctgatctgagatctgaatgaggagtagaagttggccaagagggcaaacaaggactccaaacagagggactggcatggacaaggccgggtgagggtacatagcttatctgataaattgtttagggttcatgtggcaagagatgattcaggggctaggaactgaagtctctgtggctagctaagggagtctgggtttgtcttggaaccatgggacacactgaatgatttaattcagggaaaaactcaactagaaccatggtctctgggaaagcaacaatttctagtatgtggcagaaattgctcgatattcataaaatgcctttctttttcctcctgggcacagggctagactacaattcccaggctcgattgcagtcaggtgaagccacgtgactgagtttgagcccatcaaatataggtgagagggatatatggtatttctaggcctagcccataataatttcctgcacagccctccacattctctttttcccattttgctggagaagatctgaggacctagatggggcagctccaagatggaagtggcctggatccctgagtcaccatttggagacgagcctgtcatggactattatgtgagcaaagaatccattttttggggggtgggggggtgggatggagtgtcgctctgtggcccaggctggagtgctgtggtgtgatctcggctcgctgcaacctccgtcttccaggttcaagcgattctcctgcctcagcctcctgagtagctgggattacaggcgtgtgccaccatgcccagctaatttttgtatttttggtagagatggggtttcaccatgttggtcaggctggtcttgaactcctgaccttgtgatctgcccgcgttggcctcccaaagtgctgggattacaggtgcgagccagtgcatccagcttagtttttctttgttcaagggactaagcaagaacagatgaaggcatgggtgaaaacaagagagaattattctggaagcagtactggcaggatttgagcaaataatgagggggatggggaagccttgggtcagactatcttatgttgctatttataggatgtggaaggaagggtctaagaaacatcttgtatgatgtgctgtgggatatggaggaggtagagaacagggctaaaaataaccttcctagaggtgcagatatttggcagagaccctgtattcctgggcctctcgctgacatgggctgtcaacaaactgtcacgctcttctctagatatgtccacttctgtcctgaagcagatatttttatgtacacagccatgggtgagttcttaacttctttgtgcctcgtttttatcatctgaagatggtgataataagtgataggacttatctcaaaggggtttacgaatatataccgagtgtttagcatggtgttggagatgtagtgagtagttgagaaatgtcagaaatgagcattaaaattccgttagctctagcttgacttctctatcagtgcatacaaacactcaaagataaagctatgagacagagcaggattttgcctgtcttgttcactgctacatctccagccagcttagaacagtgactggcttgcagcagctatttaaatgtttggtgagtgaatgaatgaataaggaactcatctcattttctttccttcctccttcctttctcccttccttcctccctcccttcctttctttcttcccttctttccaaccatccatccatccatccatccattcatccatccacccacccatctatccatccatccatccatccatccatccatccacccacccacccacccaaccatctatctatccatccatccatccacccatccatccatgcatccacccatccatccacttatccatccatccatccatccatccatccatccatccatccatctctcttagaaaggcagtagagtgtagtgggttagctcacaagtattttttttcaattgtggcaagatacacataaaataaaatatgccattttaacctttttttttttgagatggagtctcatcctctcacccaggctggagtgtagtggtgtgatctcagctcactacaacctctgccccccaggttcaagcgattctcctgcctcagcttcccaagtagctgggattacaggcgtgcaccaccacacccagccaatttttgtatttttagtagagacagggtttcaccatgtggccagactggtgtcaaactcctaaaatcaagtgatcctcctgccttggtctcccaaagtgctgagattacaggtgtgagccaagcacacccagcatttggaaccatttttaagtgtacatttcagtgacattaagtacttcacattgttgtgccactgtatcatccatcccaaaactttcctcccaaacaggaaatctgtacccgctaaacacaaactcttcattctcccttcccctcgggccgtggaaaccaccattctacttctgtctctatgaatttgactagtctaggtacttcatacaagtggaatcagatacagtatttatccttttgtgacagcccacaagttctgtgatcatataagctgtgtaatcttgggaaactcaatcttcctgacactccacttcctcgtctgtgaaatggttgtaataatagtacctgcttcacagggtggcagtgaggtttaaatgagataatagaaggcacttagccccagtgcctggcacatagaaagtgctcactattagctattagttacagctaagcatgtattgtaaattagtggacactggtattgtgtgtctagcactgtcctgagcactttacccgtattatctcatttaaacttcccaacgaccctatgacatggtgaaaccactaacatccacacctaacagatgagaaaacaaaggcccagagaggccaagtcatgtgcccaagggttacatagctagtttacagcagagctgggattgaacgccaggcagcctatttccaaagttcatgggtcttgccgctgcattgcattacctcttgccagtctctgctgcctctgtctgtgaaggatcgtcatctatacactcagtcctggctcaggctgtcacggtgactgcaggtgtttgaagctgtgggactcattggaaaaataattgaaaatgggattgctgtttctttcttttcttttttctttctttctttcttttttttttttttttttttagacagggtctcactctgaggctgaagtgcagtggcgcgatcttggctcactgcaacctctgggtcctgggttcaagtgattctcatgcctcatcctcctgagtagctgggattacaggcaaacaccaacacgccctctctttctttctccttccttccttcttttctttctttttcttttttctttctttctttctttctttctttctttctttctttctttctttctttccttccttcttttctttctttctttttctttctttttctttctttctttctttctttctttctttctttctttctttctttctttctttttctttctttctttctttctttctttctttctttctttctttctttctttctttcttttctttcctttctttctttctctgtctttctttcttctttctctttccttttttttttttttcagagccttgctctgttgcccaggctggagtgcagttgcacaatcttggctctgcgcaatcttcgtctcccaggttcaaatgattttcctgccttagccccccaagtagctgggattacaggcgtgcaccaccacgcccggctgagttttgtatttttagtagagacggggtttcaccgtgttagccaggatggtctcaatctcctgacctcgtgatccacctgcctcggcctcccaaagtgctgggattacaggcgtgagccactgcacctggctgtttgctgtttcttaacatgtgaggttccaacccagtggggcccactaacatgtgctgttctgctttggaccgtggggagctggggtgctggacccatctcccaccttctacagcctggagtgtgctcccagatgacacagccaagctggcgtgtttttccctcactggcggaaagttcagcaatccctgactccctcaccctgccctgttgagatttaaaaaaatttcctcttctgggcctcagagccgcctcctacctgaggtttattgctttctctgcaccagcattgagcctctgcagccctttaaaaggggcagagcccatagtgtgatcagcaggtcctgtccctaggagataagagtatcttgcacagcaggtgcaggtttcccagcagctcaggcaagagtccgatgtttgtgccatctgatcctgatgtctggagaggtgagccctctgtcggcatcttcctctccaggctggcagagcaaggggggctgtgaattaattcaaggttgggggtcggggccttctatatctggacttgcctcccacccgtgtcctctgtccctttttccctacggcagatagccatgtgtgagcctgaatttggcaatgacaaggccagggagccgagcgtgggtggcaggtggcgagtgtcctggtacgaacggtttgtgcagccatgtctggtcgaactgctgggctctgctctcttcatcttcatcgggtgcctgtcggtcattgagaatgggacggacactgggctgctgcagccggccctggcccacgggctggctttggggctcgtgattgccacgctggggaatatcaggtgagaccagctctgaggattcagcctgatgctgacttggggcactgggtgtggaaagcaaaggcgttgtcaaggacccctgggcgcatacgtattcgggatttcaaggagcgctctggataactatggggttgggagtcagactggggtcaactccagaccccgcagcctgtgagcttgtgactttgagcaagtcattctctttttgagtagctggatcacaggcatgcgccgcagcacccaactaatttttaaattttgttgtagagatggggtctcactatgttgcccaggctagtcttgaactcctggtctcaagcgatcctcctgccttggcttcccaaagttttgggattacaggcatgagacaccatgcctggctggcaagttactctctaaacccaaagttccccgcctataaaatgggaatagtagcttttaaatgttttttttttcaagccaacatatctatattgctaaccatgtaccaggcactagtctaattactttatagatattagttatttaatcctcacaaaagccttgtggggtaggtc

SEQ ID NO: 6957 - DNA, 6000 bp, Homo sapiens
tccagcaattgtgctccttggtatttactcaattgtgttgcaagcttatgtccacccaaaaacttgcacatgagtgttgatagcagctttattcataattgccaaaaattggaagcaacaaagatgtctttcaataggtagaatggataaactgtggtacatccatacaatagggcactattcagccacaaaagaaatgaggtgtgaagcctggaaaagacattgaggaacctgaaaagcatattgctaagtaaaagaagtcagtattaagagactacatactttctgatttcaattacgtgacattctgaaaaaggcaaaactatggagacagtaaaaaaatcagtggtttccagaatccaggaagaataggtagagaattggggatttttagggaagtaaaactattctttatttttttctttttttttttagagacagggtctcattctgttgcccaggctggagtgcagtggcatgatcatagttcactgcagcctcgaactcctgggctcaagggatcctcctgcctcagcctctgagtagctgggactacagtgcaccaccatgcctggcctgttttttgttgttgttgtttgtttgtgttttttggtagagaccgggtcttgctatgttgcccaggctgggaaactattctttttgttgctacatgtgtggatccatggcattatacattgttaagacccagaacttggctgggtgcattggctcatgcctgtaatcccaacactttgggaggccgaggctggtggatcacttgaggtcaggagttcaaaaccagcttggccagtatggggaaactccgtctctactaaaaatacaaaaattagccaggcgtgcacctgtagtcccagctacttggaaggctgaggagtgagaatcgcttgaacctgggaggcacaggttgcagtgagttgagatcacgccactgtaccccagcctgggtgacagaacaagactctgtctcaaagaaaaaaaaaagactcagaactgtgctgcagaggttaggcacagtggctcatgcttgtaatcccagcactttaggaggctgagatggaaggataacttcagcttaggagtctgagaccagcttgggcaatgtagcaagactgtctctaaaagtataaaaaaaaaaaagcctagtgtggtggcatgttcttgtagcccaagctactcagaaggcagaagcaggaggatcccctgagtccaggagttccaggctgctccagcctgggcaacagagtgagaccttgtttccaaacaagcaaacaaacacaaaacaaaacaaaacaaaacaaaaccccgagaaacagtgaaacaatgtatgctatggactttagtttataataatgtatcagcattataaggaaggcactacacactaatgcaagatgttgataaaagaggaaattttgcatgggggagagggatgtatgggaactctcagtactatcggctcaatttttccataatctacaatggttctaaaaaataaactctattagttttaaagaccgaaaggcttggaaacaagtaagcgtgttaggatataatgaggattgagcttatactgaggcaagacttgggaacccctagatgggggaacagaggttttactatcttggtgcctttggacctgctcccaggactgacggagcagtcacagataaagtctgggcatcttgggcaggaacttgaacagtgggactgtatgcaagaagacatttattatctctcttgcacccgagaacaatgccctgttttctttaactttgtaatttgacataatttcagactggcgggaaagttgggagaagagtacaaagaattcccgaagtctcttcccccagatttcctgaatgtcttagcctctgaccacagctgtgctttctttgcctgtcttctcaatgccacgttcatctccatttcacaaccaagcaacagaccaaggcaacaggcttcgactttgcttctttctcattttcatcctgataagaacagcaattgacattttgaatgcctaatccacgccaggcactattctaggcactgcgatacgtaccttgccatttcaccatttcatagccctatgaggtgggtctattattatccccattttacagatggggaaactgaagcacagggaggatgatctactttgcccaaagtcacatagtcaatacgtagcagagttggtatgccaatgccggcagtctagaggcaagcgaggaaaccgacgaaggatgacttgactgggaaaacaggatgggagcccagtttgggagtccaggaggggatatagcccaagccatacattcccaaaggacttcaaaggtagacttttgctgtcgtctcccgatgacatggggcacaaactcagaaacacagacaggacaaaggcagcttgcagggctgaactgcctgggatgaagcatcaaccgtgtgggtgtgcggatgtgtgagtaatgagtgtgagggagtatgagtgtggacgggagtggaagtcacacctaatccagaggattcctattcctcctgaaacccaagcttccaggaaagcccttcctgtggccttctctccctagtcctcttagcgtctgcctgggctgcccccagtacggggtttattacactcaattgcttacatctgttcacttcaattgcttacgtctgctcacttgtcagtgccccaaccaggtcctcagggctaggaagcaggggctggatctatttcttgctctccctagcccccagctcacgacttggcatatggaggcatccacaaacagatgccgaaggatgggagtttttccacactcccacgccacctccaggtatttgctcatgctgtcccttccacctgcatgtttttctgcattgattcaggcactggtcagaggtcacctcctccaggaagccatccctgaccccagggaactgacttatctttactgtcacttccgggggtgggttggtggctgtcttgctcacttggttgtaaggtctcagagggcagggattgtgtctgtttcatgtcttcaggtctgcgtcatcagcgcttgtcacaaggttagacacacagtaggaccaagacagaccaagtacatgaaagaatgattgacatatgggccaggcgtggtggctcacacctgtaatcccagcacttcgggaggcagaggcaggcagatcacctgaggtcaggagtttgataccagcctggccaacatagtgaaacctcatgtctactaaaaatacaaaaatgagccggacgtggtggtgcacgcttgtaattccagctactcaggaggctgaggcaggagaattgcttgaactcaggaagtggaggttgcagtgagctgagatcacccactgcactccagcctaggcaatggaatgagaccccatcttcaaaaaaaaaaaaagaatgattgacgtgcagtggcccctgccctgggaagccaaccctcaccctccaccacagcacttgatcccattgggcagtccttggcttccaccctcaaactgagagctccttgagggcagcagggggtcaaattactctctgggttctcagcactgcccagtgtgagtccaaatatctcccacctcccctgtctccgctctttcctcactcagggctccacagccatgccggccttcagcaattcctcctgcaggctgagctggttcccacagggcctttgcactagctcttccctctccctacacaagtcttcccccataggctcttcagagtctcagctcaaatggcctctactcaaaaagcctcttccagaccacctgccccactggtctaagaggtccctactttcttcttgggccctcctgacctgaaatactttgttgagtgttttccccccagtcatctggctgcatccgggttcttatggtgtccagacgttaatggtctatggggcctgtgttcgaatcccagctccacccctgctcctgcttacctgcagagtgattctgagtttctttcttttcttttttaaaattttataaatgtcaatttttgtagataggggtctcgctaacagggttgcccaggctggtctcgaactatggggttcaagtgatcctcccgcctcagcttcccaaagtgctgggattacaggcatgagccactttgcccaacccattttgaatttcttaaggactctgtgcctcagtttcctgatttgtaaaaccggtgatagtatcactcccttatagggtagttgccaggattgaacgagttaacatttgcagtgcccgacagattgtactagttactgattgaagggctgttttactatccaaatgtggctggagtaggagttgggtaaacatttattgaagaatgtgcaaccactctcacttggaagccgggctgttaggaaggggaggaggattccagtcgcccagccctcccccaccaaacgcaactgccccggcgcaaaagaggccgcggaggccaggcaggagcaggtcctggaggcctggtcggcgtgggcgttttattccgagaccaaggggatccactgcagagttctccgctgggcgtgacctcgggctacggcgtgggaggaagcgcgcggcaagacacccagcgaggtgctggggtcgcccccaggagaggacggcggctcggactgtccggcggcggcggcggggacagcgacaggggcgcgaggtggccgggacccgggccgggcgcgccgggcggggcggcgcatgcaaatctgccgggcgccggggcggggagcaggaagccggggcgggctgggtctccgcgcccaggaaagccccgcgcggcgcgggccagggaagggccacccaggggtcccccacttcccgcttgggcgcccggacggcgaatggagcaggggcgcgcaggtaggatccggggcccgcgcgcggatcgggttgcgaaggtatcgcccgggcacgccggctgagggcgttcgggaagggctcggccgccggcggggaccacggggaccaccccgactccgagcggggcccgagcccgcgactctcggtgcgcgcggagcagcgcccggttccgtccttgccgccgaacggcagcggaggcgcgaggcccggggtacgtggacacccagcgctccccaaagccggtgctggcagtgagacctccgccgggacggcctgcgggggtggggggcttggggttaggctgtcggaggccacgcagcccctcttctccgggcagtggcgcccagccctgcgctcaggaagtcagtgaggacttcggagagagaaagggtggggaaagttctgagaactgtaaatttgagtagtaggtcagtgaatcggggcggtctccgcctccgaatatcagatggacccaataatcgcgatcattgactgggacttgttttactgaaaggatgccaagtgaaacctcccactaacttctctgtggccggtgctgtgcgtcatggacattgtacagatgaggtcaccaagaccccagccgctttagtaacttgccctaaggtgccgcccacttgggagtccgtggggcagcaggactagagcccaggcaatcccacgccagagccagctgctctccatctctcaatcacgtttgaggagcccccacaataaccagaatctccgggagatttgcttaaaatgcagattcccaggtccttgccctgagattcagattcagtaaacccaggaatctgatctttattttatttttaaaaatttattttataaagatggtgtctcactatgttgtccaggctggcctcaagtgatcctcccacctcggcctcccaaaatgctgggatgacaggtgtgagccactgagccctgattttttttttaaacaaaatctggatttcttagacttaagcaagataggggaccactagtttgtctgcttctggggttcaaggaatgcccccaggccagcgctaaccctgctccagttctagtctctcc

SEQ ID NO: 6958 - DNA, 6000 bp, Homo sapiens
tctggtagagttggtgccatttaaccctttctttgcttccttcccagagttaaaggaaggctggaaccctcacctgctgcttctcctcctgcttgtcatagtcttcattcctgccttctggagcctgaagacccatccattgtggaggtgaggccaggggatgaggaaggcagggaggtggtcagcctgggccactgcccctgtatgatacatgcagggttggaaaacatgactgtcatcatggtaacaatgatgatgatgggataataaccaactcacagccaccatgtgctggacactgtggagggcactcccttcacccccatggctgccctatgagcttgagacactgcagttgcccttattttacaaatggagaaactgaggcaaggagatgtcaaggacaaagtcacacagctccaaggtggagaaattgggattgaaaatctgtgcccttaaacagggacctcagctgtgatcttgtccagtggattttaagctttgaggcttaatgggcttaaggggccactaggtggtggtgaagaggtggctgtaatagtccacacctctgaaatggcctctctgcgcacccctggttgcagataaagaagttgaggctcagaaggggcaacatttgcccagcacgcaacaggcagccaagaacataaccacgatatcccttcaggagcctgtgagggagacttacttctcccattttacagaaggggaaaccaagccccagggaaggagggaggcgcctgggctgagtcttgggatgctcggaagctcctgtaggatgaagctggggagcgtccgaatgggaggccaggctgccctctggtgatgtcagggtcctcacccctctctgccccctcaggctatggaagaagatatgggccgtccccagccctgagcggttcttcatgcccctgtacaagggctgcagcggagacttcaaggtgagctcccgaccctgtgatgagctcctcggagcccctcctcctcttcaggagccccacctcccctcaccccaggctccccagcctcaccccacaggcctagagcatccaggtctcagccaagccacaagccaggcctcagtttccccatgtgcaaagtgtagacagtcattcttgtggtgcagaattggcagaagaattaaacaagatttgaccaggtgtggtggctgacatctgcaatcccagcactttgggaggccaaagcaagtggactgcttgaggccaggagttcaaaaacagcctgggcaacatagggagaccctcaccaccactccgcctccccatctctaccaaaaacttaaaaatcattcaagtgaggtggtgcacgcctgtagtcccagcaactcgggaggctgaggcaggacgatcgttcagaggctgccgtgagctatgatcacaccactgccctccagcctggccaacagacagagactatatcttaaaaaaaaaaaaatcaaaaagaaaaagtaaacaaaataatgcagcattggcccagcccaaggaaccagactgggatagggggtgaggctggtggtctcctgagtcacagattgccccactggtcctttcttaggtgtccttaatctgggttggagagggaataggttctggaaagagcctggcccacggggcaaaacacactaacatttgccaagcctccaactcaccaccacccgccagcacccacaggttgtctgtgcccatttacagccgtgtcacccaccctgcagcagtgggagtggctgccacagagaggatgtggtgacagaggtgggagggccagccccacctgctgcagcccagcctgaaagtcagacagtgtagacctagaccattgattgagctcctgctgtctgcctggtgctgcgctggacacccttcctgcctcactcattctcatattcacagcagcccctgcagagtggatgttccactgcccccagggcacccatgaggaggccaaagagtgggcagggaggaacatggaccccaacccacataagacccaccctttcctcttccctaaagctcaaatatcacattgattttgggttgatttttaccaatactcatatagcacttgctatataccaggcagtcccctaggagcatcacaaacagtgactcatttaatcctcacgacggccctacgggtgggtgctattattaggtccattttacagatgaggaaactgaggcaccgagagggtaagtaattggcttaagggcacacagctgagaagcgactttgaatcagtggtggtggccacatcacagttctgagatgagtttttgaggaagatgagctcaaaacagggagatacccattcctggggattttccttgccaattgcatgaggattctggtgtcgtgagtgggagtcctggcaggggagggaaggggagggtccttcaagtttaagggccaccgcctcagccagcatcacccacatcctttatcctcaaagtgtacaaaggcctttccaagtggcttttcattgatccactccacccattcatttcgttaataaacatttattgagcacctactttgtgctaggcactggggctacagccatggacagaagagacaagacttatgtccgggggccaagtgtctgtctggtggggacacataaaccaggagagtgctaggtttcaagaagcatcaaggaggcgggaaagcaggagatggctcaggggtacctcagacctcaggccctcctgcccccatgtctccttgactcaggaatcttggtccctgcctggactatggggccaccagttgtctgactggtcacactactaagggtagcaactcccttctacaagtagggaaactgaggcccagagtaggagggggatccactagggtgggagcacattgtggtcctgattcctctctctctctctgtctctcggtgtctttgtctatcttcatgtctctgtctgtctctcttgatgtctctttgtcttgtctctgtgtctgtgtctgtctttctgtctgtttaaaccctcaccttggctgggcacagtgactcacgcctgtaatcccaacactttgggaggctgaggcgggtggatcacctgacgtcaggagttcaagatcagtctggccaacatggtgaaaccacgtctctactaaaaatacaaaaattagccgggtgtggtgacaggcgcctgtagtcccagctacttgggaggctgaggcaggagaatcacttgatcctgggaggcagaggttgcagtgaaccgagatggcaccactgcattccagcctgggcagcagagccagactgtctcaaaagaataaaagtaaaagaaaaataaaccctcaccttaccctcatcctgtgctatgactctctctttttctctctcacagaaatgggtgggtgcacccttcactggctccagcctggagctgggaccctggagcccagaggtgccctccaccctggaggtgtacagctgccacccaccacggagcccggccaagaggctgcagctcacggagctacaagaaccagcagagctggtggagtctgacggtgtgcccaagcccagcttctggccgacagcccagaactcggggggctcagcttacagtgaggagagggatcggccatacggcctggtgtccattgacacagtgactgtgctagatgcagaggggccatgcacctggccctgcagctgtgaggatgacggctacccagccctggacctggatgctggcctggagcccagcccaggcctagaggacccactcttggatgcagggaccacagtcctgtcctgtggctgtgtctcagctggcagccctgggctaggagggcccctgggaagcctcctggacagactaaagccaccccttgcagatggggaggactgggctgggggactgccctggggtggccggtcacctggaggggtctcagagagtgaggcgggctcacccctggccggcctggatatggacacgtttgacagtggctttgtgggctctgactgcagcagccctgtggagtgtgacttcaccagccccggggacgaaggacccccccggagctacctccgccagtgggtggtcattcctccgccactttcgagccctggaccccaggccagctaatgaggctgactggatgtccagagctggccaggccactgggccctgagccagagacaaggtcacctgggctgtgatgtgaagacacctgcagcctttggtctcctggatgggcctttgagcctgatgtttacagtgtctgtgtgtgtgtgtgcatatgtgtgtgtgtgcatatgcatgtgtgtgtgtgtgtgtgtcttaggtgcgcagtggcatgtccacgtgtgtgtgtgattgcacgtgcctgtgggcctgggataatgcccatggtactccatgcattcacctgccctgtgcatgtctggactcacggagctcacccatgtgcacaagtgtgcacagtaaacgtgtttgtggtcaacagatgacaacagccgtcctccctcctagggtcttgtgttgcaagttggtccacagcatctccggggctttgtgggatcagggcattgcctgtgactgaggcggagcccagccctccagcgtctgcctccaggagctgcaagaagtccatattgttccttatcacctgccaacaggaagcgaaaggggatggagtgagcccatggtgacctcgggaatggcaattttttgggcggcccctggacgaaggtctgaatcccgactctgataccttctggctgtgctacctgagccaagtcgcctcccctctctgggctagagtttccttatccagacagtggggaaggcatgacacacctgggggaaattggcgatgtcacccgtgtacggtacgcagcccagagcagaccctcaataaacgtcagcttccttccttctgcggccagagccgaggcgggcgggggtgagaacatcaatcgtcagcgacagcctgggcacccgcggggccgtcccgcctgcagagggccactcgggggggtttccaggcttaaaatcagtccgtttcgtctcttggaaacagctccccaccaaccaagatttctttttctaacttctgctactaagtttttaaaaattccctttatgcacccaagagatatttattaaacaccaattacgtagcaggccatggctcatgggacccaccccccgtggcactcatggagggggctgcaggttggaactatgcagtgtgctccggccacacatcctgctgggccccctaccctgccccaattcaatcctgccaataaatcctgtcttatttgttcatcctggagaattgaagggaggtcaagttgtttgtcaatgatttgtcagagaacctgttgaaatgtgaattaagaagctaagaaaatatttcttagcaacattttctttttcttttttttttttttcttttgagacagagtctcactctcgtcgcccaggctggaatgcagtggtgcgatctcggctctctgcaacctctgtctcccgggttcaagcgatttcctgcgtcagccccagagtagctggaattacaggcacacaccaccacgcctggctaatttttgtatttttagtagagctggggccaccctggcccggccccgtcttcctccccaaaggtcagactgcaggctgcagggctgtgctggaggagccagctctagctcacccatgcttttgcaacagggtcgggttggaagtcagcacaggtcagtcctgcggaaggttccttcgtgactcatctgtgaagtggggtggttgggagaggtagctgagagaatgcatgagagtcctcggtgcctggcaggaggctggaaggttctagaacactgatggttataagagtgggactgtgagcctgggatcggggggtgtgagacttggatgggagcacaagagtggaaacacagcttctgcacggagcaggcgcagccctcaa

SEQ ID NO: 6959 - DNA, 6000 bp, Homo sapiens
tctcgaactcctgacctcacgatccaaccacctcggcctcccaaagtgctgggattacaggcgtgagccactgagcctggccatagtgatataatttttaaattgcacacgataagacaacattcccattgttggggcaggagtgctgccccaaccccaccaccaggaatgttaggcaaccatcaggtgatggtcaggtggttgttaaacttgtctctaaaatagtaattggttgcagccagcaccagggaaaggcagtctccaaatagatggaaaacacttgaaactgatgatcagcagcttctcgataagatctcagaagttgggtaaatgggctcaagcttatgcaccaagaggcaaaatggcggagtttaatggtacatgcccttcctccaggaatgctagatctgtaagggaagaacgtcttaagtgagcatgtgcacttcagtatactgaacacactgtgcttgtggcccctccaagtgctggcaggccaccgtgcatgtggacagcccatgccaaggtaggaatcaggggagaagagatgcaaaccgtaaatccctggaagcatgccagcatatgaaaccccaagtcaaaggtcaaaccagggacttgaatctgtcaagtcattcacgcctggccctcttccaagtgtactttacttcctttcattcctgctctaaaactttttaataaacgttcactcctgctctaaaacttgcctctgtctctccctctgccttatgccccttggtggaattctttcttctgaggaggcaagaattgaggttgctgtagaccccatgcaaattagctgccactagcaagggcaaggcaagctatggagaaagaagtttcatggggctaaaactcagaatttgagtgtggagcaggatggggtagatggaagggggttagagtgctcagtgctcacaatctgtcaatgagggtagagaggtggcatggcatcaggtggtccaggtaatgccaggaaaaagctggactgtgtttgttagggaacccaggagacatgatgacctttaaaacaccatttgggctgggcgtggtggctcatgcctgtaatcccagcactttcggaggtcgaggcgggtggatcacctgaggtcgggagttcaagatcagcctgaccaacatggagaaaccccgtctccactaaaaatacaaaattagccgggtgtggtggtgcatgactgtaatcccaggtactcaagaggctgaggcaggagaaacgcttgaacccgggaggcggaggttgtggtgagccgagatcgcgccattgcactccagcctgggcaataagaacaaaactccatctcaaaaacaaacaaaaaaacatcatttggatccactcaccttacagatatttcattgagtgcctgcagtgtgctagagtactgcagagcaagaaataagtcaagatcctaacccttagggagctgacattagcaggaagacagaattaaaggagctgttagaatacagtgggataaattgctcggcgagcacacaggaggggaaactagcacatctgaaggcaggagcgaggcagggcgaaggactattacccaaaaagtaaggcagtgttgtagctaggtgtgcatgtgtttggtgcaggggctgggaagagttccaatgctaacatttagagcgaagagattgagacattgagagtttcgctgggattaagaccacatggacttaacagctccactccattctccacgttgcaaagagtaaacctttaaaaatgcaaatctgacctcttttcacttgtttttttgtttgttttggggggaaggagtcttgctctgtcacccaggctggagtgcagtggtgcgatctgggctcacggcaacctccgcctccttggttcaagtgattctcctgcctcagcctcctgagtagctgggattacaggcatgcaccaccacgcctagctaatttttgcatttttagtagagacagggtttcaccatgttggccaggctgatctcaaactcctgacctcaaacctcccaaagtactgggattacagaccatgcccagcctcttttcactttcttaaataagctccccactgctttgaggataatgtccgtgtctcttacaagacttgggagcctttaaaacctgatcccagattagctacctcttcccccctttaattttatgcttaggacaagctgagtttttcttagtttgtcatatcctatttccctgcctagaaacccatctccccctgccctcttatcagtttttttttataatttaaatttttttttttttgtagagacaaagtctcactttgttgcctaggctggtctcaaactcctggccttaaacgatccttctgcctcggactcccaaaatgttaggattacaggtatgagccactgcgcccggccctcctgtcccttatctgggtctcccaaaactggattaagattaggtgtcactcccatttgctcttgtagtcctctgtgcttcacctactagatctcgtcaaattctctgaattcaccactagcatgaactcctccagagcaggaagcagtttaattatccttgtgtccaaaacaactaactgaatactccaatgcccaactcattttgaatgaatgaagctgccttcattgcagggtcgggtggaggattttgaactcggaactttggccttcagtctttgttattacagtttaaagattcattctcgggcatggaggaacaatttaggtcaaaatcacaaaaatctgaaataatttaggacgaggcgtaaatttatctgcaaagatcaacacgctcaaacgaatcactaatgctcatcagtcttttacttaaagcaaacaaggtggagggtagctccttgcgaaacctaccacctgcctaaaagcgcagtggctcgggtggtccagtcccggagactttcttggcacttaaggctctgcccacgggccgccaagtggcggaagagcctcacgcacgacgtgccgcctcacactcccgcggaggcatcgcgacgcagcgacggcgtgggcggagaggccggcccttcctctggcgccttcggctcctccccctgcgcctcacacgctcattgtgaagcgacagcggccgccggcttctaaggcggtttgagaccttaagaccctaaatccttggcgcgcgtgagcgcccgcgccgctccttacccactcccagggctaggggtgcgaggttcaccgacttgattctctcccactttcccgccgggagctaaccgcgccggtgtgcgcggcacctcgcgccactgctcgctcctggccccccccccccccccccccccccgggagctcccacccgcgcgctcctccctctccgctccccggcgacgcgcacgcgcgccagcccggctcgcgccctctcgctttcctccagccgcgagaccccctccccttccgcctcgcggcgcttcctcgcgccgcggtcttctctctccacccccgacaccgcggggctccccccgcccgcccacggcgggccccggctgcccgatccccctcgcttcccgcgctctccagcggggccccagccccggccccctctctccctcccttctctctaattccccttccggacgctgccatcatgttgaagcctcagccgctacaacagccctcccagccccagcagccgccccccacgcaacaggccgtggcccgtcggccccccgggggcaccagccctcccaacggcggcctcccggggccgctggccacctctgcggctcctcccgggcctccagcggccgcctccccctgcctggggcctgtggccgctgccgggagcgggctccgccggggagccgaaggcatcttggcgccgcagccgccgccgccgcagcaacaccaggagaggccgggggcagccgccatcggcagcgccaggtgagaagggtgggctccgggcgagggagccgcggccacccagaggctgtggctcggttccggtggggcggaccccgacccggcaccgtcaggggcaccggctgggtggggagtccccgtgaagctgggggagggccccctcaggtccgaacaggtcggacggaaagggtccccgggcggccaccggagcactgaggggccgcgctcggctctcggggcctagtcagggctcgcagccccggccttcaggggaggcggggcgcatcccgccggcgccgtcggaacggggagttgggggggggcaaggagctgatcggggtccccggttccattaccacgaagggtctcgcggtccccggcttcagccaatggggagtctgctgcgggaaggggtccccggccgtagccaatggaggggggcgcgcggcccacagtttggccaatggggagggagggacttgggagcgggttgctgcctcccccttcccggtctggccagtaggaggggagcgaggtgggcggggggacggaaggagggatgactgggaggactgcgggccgggagcctctggcgcgcgcgcccccttcccgtacgtgcgcgtggatgctcggtctcatgacccgggcattcgcgcgccccgggaacacctagggcagggactagttcgtggaggggctcgtctggtggcagtgcatgagtagtggaggccctgctcagtttttcctgtgcgagtgtgtgtgtgttaatggaattaagagtggcagcacacgcaggcgcagtgggctctgatcgctggaggtgggggttcggaaagtcccgtgggttttagtgcgcaggcgcagaccgggcgaggcctcccggtggatggcttttgcggctgcgctgtcccccagccccgccagcggccccctcttcgccctcaaccgccggttacatcagccagcgacgagcagggttacctggcgattggtgatccccgcagagtgggtaacgggctgaatgagtcatgaggtcgaggggatggggtgtggaggggatacccctcctcccacagttttgaggcgtcaggctgctgaaaatgattgtcttttctgtttgggaggtaatgtacctgagctaggtagttccaaagctgcactcctggagcttttgccctcacagctggcgtggctttttggttaatactgtagcattgatctgttggtagcctgcagccctagcccctttctcgttggttcttagagcaattgacaaccattgttgattgagatctttttgctggcatttggaggaaatgtgtttgctggcttattaatgtctatttttttcttcctctacaaggtgacagtttgaaaatcttatttattggccgggcgcagtggctcacgcctgtaatgccagcactttaggaggcaaaggtgggaggatcccttgagcccaaggagatcgataccagcctgggcaacacagatgggaaatcccatctctactaaaaattaaaaaaaaaaaaagccaggagtggtggttcgtacctatagtctcagccactcgggaggctgaggcaggaagatcacttgagccttggaggttgaggctacagtgaactgagatcacgccactgcaccccagcctgggcaacagagggagaccctgtctcaaaaaaaatagaaaaatcttactgattaacaattttgtagtctaaatcagcatcatcaggtggtatatacttctaggatttaacattaatttcatagtggtctaagagggcttgaacagacttaagtaatttcttgttttcttttataggggacagagcacaggaaagggacccccacagtcacctgtgagtgtcttctcccaccctgtttaagatacatagacctaaaagatgcataatgtgggaatatagggcacattaggtctagatagagtctaatgtactcaggagggctgtgggcccggcacacacaaggcagaatgagtagagtgcggcgggcatttagaaaagaaaatgaggtgttgactgattactcctttaattctccctcttatgtt

SEQ ID NO: 6960 - DNA, 6000 bp, Homo sapiens
agccgcagcagccaaagagaggcaagagaaagagaaagcgggcggtggaggggtcccggaagagctggtccccgtggttgagctggtccccgtggttgaattggaagaggccatagccccaggctcagaggcccagggcgctgggtctggtggggacgcgggggtgcccccaatggtgcagctgcagcagtcaccactagggggtgatggagaggaagggggccaccccagggccattaacaaccagtactccttcgtgtgagccaaccccacccgctccaccctttttaaaccccccagccctgctcgtgagattgggctgggtagggacagaggaggccgaaatccctcccccatgcttcctgacccttgttggccaagggcatctttgatggtacaagcagaggctcgggagaggctcccgtcacacactacaggtcccctccccagggcaggggatttgggctccatgagctccttgaggggctcttctggtcagccccaccctgggggccatttccccattaactacccccagcccgaggcagggtgagggggaagggctgtcagttacattaaggtggttgttgttgttgttttaaacaaaatggagaagcataaataaataaaaaggtttatctcggttctatcgtgatggctatggccattgtttgctgtggggactggggacagttgggttgggaaggcagcccactcagtgcccacaggccagagggctggcccaggccagtccccatcattctgcagtgctgtgctttcggagccatccctgtgtctgacagccttgttcgtggagcactaaatgatgctcttggggtctcctgcgagtttttgtcatgggacagtgctgtgaatggcaggcatggtgatctccagcggcccttcctgagttatggctttgtaccctagagagagctggcagtgagagatgggaggcacggtggctgtgctggaagagattgaacgtggcagtcacagggtagccgcagaggggcccaatggcccccttctcaaagccaggctggagggatggcagagggcactagcttctgtcctggccttgccactcactggcctgggcaaggtgtagccacgccgggcctgagcatcctcatctgtgacatgtgaagtttcatcttgagtcagagctgctgacatggtttgcttggcctggacatggtgtccatttgagtttcacattaaaaattcagatcacaggccaggtgtggtggctcacgcctgtaatcccagcactttgggaggccgacgtgggtggatcacctgaggtcaggagtttgagaccaggctgaccaatgtggagaaaccccgtctctactaaaaatacaaaaaattagccgggtgtggtggtgcgcgcctgtaataccagctactcaggaggctaaggtaggagaattgcttgagcccaggaggtggaggttgctgtgagccaagatcgcaccattgcactccaacctgggcaacagagcgagactctgtctaaaaaaaaaaaaaaaaaaaaaaaaatcactggcttctcttaaaaatcagaagatccagtgatgtgggtccacttccacatctgccccatccccaccagctcactttgctccctgggagggcctggccctgtgggcatttgagtttataacaccacccccattgtggcacacccctccaccccgtaaaacacaggctctgctcttggaatcagtcttcctgatctgtggctgtgccctccaacagagggcacccctgggcttcccagctctgggggtagtgggtgccaacaaggaggggcctggggctgaagaatcccacccgctgagctcggccttctcccttccccactgtccagctccgcctttcagcatcctgcctcactccccgcccaggcagcaaggagcccacaccctcatgcccctcagcttcagcccccacctccaggaggccctacccacgctcatgaccttgctattctgggccttgtgtcctgtagggagatggacaggagacagctgggcttccaggccacccaggcggggggctagccgagggaagcctgctggctctcctgcttgctctaatttctggggctccccaaaccttggcctcaggagactggggataggaccggccttgaaagtgggggaagctttggagagccgggtgctgggttcttagtgagatggccagtgaaggctgtggtgccccgaggtaagcagggcctgatcccctcctaatcttccagcagcaactggtgctctgaggctccccctcccccagccctgccagccttcagggacctgccttccaaagatgggcaggggagggggacgaggacacccacccactcctcagaccagcatgtcttggctgttggggcctgagagactttccctctaagcctttctttacagatggttaaaccgaagttctgcactcatcagggactggccagggtgtctctgtgtcccatgcttttagctccagccctcaggtgtgacaggaggatcactttccatccctgggcgtggagacccctgtgggaagggatccccgagggcgcctctggctcagcctccctccatggcagttcacacccacagccttccctagagcagcccttctgcagctcctggcgggtggctttccctccctggcttgtttccccctctgggaagccgggggaggtagaaatgaataaccttaaaggcctgttggcaggaatgtgctgccaagcctgccccctgccctctgtctcaggctctcgactccctcgaagctgcccatctctccgtctgcccctctccatgtttgggcattcccactgctgtaagacagtagcccctgtcactcctccaggtgccggtggggagacgccggccagcgccaaaagccttggcgggtgtgagcctgagtccagcggagacggtgggtgctgggccgggtggaggtgccgggggctgtgtctcttggaagagaggctgctaatgctctcctgcacccccaattcagcccactgtcccccactcccctcaggtcacagcaggattctgcttcaggggaggggtttgttggaactgtgaaaaggaggcaggaaggagcaccttgtcctcaactcacccaggaggccgcgcctcacccaagtccaggcagaagggatgcatctgggaggctgaaccctcaagttccatccacccctgctgccatccccctccccaaaagtgggggcctcccttttctttgctctgctgtctcctattctgtcctctgcttcggagtttgagccccagaatggaaagcagccttaagaagccacacttaggaagtccacatgcctctgctcatttcaggaaacaggcctagacagaggacggacttgagcccagggcaccaggccccttcccctcactgacctttcaccctgactctcatccagcctttctgcctgcctgtcctccccttcctgcacccctggtaccctccctcggctcctccagcagctgccctggtggtaaccaagagacgcccccatcctggagcaggggtggggaggggcagctcagagcagctgcttctctgaggaagctgacaccaaggccagcattcagcaacaacttgtggctttgcacccagcgccggggtccccgcccacctggctccctgctgtccctcttccccactgctgctcggacttccctctgaccctggtggctctgtgtctctgctccctttccccctaggtctagacatctgtccttatttcccccagacctgtccccagaagtccacccttccccattcctttggtctggagcccctgcttggtccagcttccccaggccccgacacctttctgtggggtctgcctagctcctgcacgcacacagcatgggcctgatcctgttcccctcgtggacagatgcagcagggcagagtgcagcgcagaccacaggcctctggggctggccacagaaaccccgttggttagagcacagtgtgggatgaggtgaccctcagtgcacgacttggggtgacccctgcccccatcctgagacagttacccctccccctctgccatcagcacattctgtagcctcttgggttacttggctgccttggtgtcccattttcttgggggtggggtggggattccctatccaggatgggggggccctcagggctctgttcccagaggctgagttagagcgatggggaagggggggggcagttttggggagagacaggcagtgctggctttgctcaccagggcctggacactaaatcccttgttgatggctgtggcaacccctccctagggtagggttaccatcttcggccctgtccccttgactctctcccctcacttccccttgtccctctaggagccactcacttcctctagcccccaaaagatgttctcccttcatcagtcccccaaaggcttggggtatctctgccactgcttcagcaaatggggtgaggaggaaggagactgcggcaatggaaacaggctccgggcagatgaggcaggaaggggggtgtgaggaaagggacaggtgaggccggggatggaagagggctccgggaagaactggggggatgagtttggaatgggaaattcaatgcagctggggaagtcgaggcaatgggggggcagggtcagtagcagatgacagaaagtgaagtctctccctaccccacttccctggggctggggctacctttgcgtccctcatgagtgacatctcaggctgcagccccactgttccccctctgtcagcagaaatatctctcttttctgaccacctcctgctggagtctcagccagccaatccctgatctggtggaggggggagcccggcctccccctgctccctcataaggaccagctgggggccggggggtggccggctgctcaagtgggacgggggtcagagctttgtggagggaagaaaaacctggagggggcaggagagtaaaaagaagaaacccaggcagacaggcagttggacacactgaggaagaccccccacgagtgggaaccccctggaaggaacacaccggccccggcccccaggaagggagcacaatggaggccgctcatgctaaaaccacggaggaatgtttggcctattttggggtgagtgagaccacgggcctcaccccggaccaagttaagcggaatctggagaaatacggcctcaatggtaagtgtcccttggaagagcggctggtaattaatgccctcctgcacccccaaaacacacgcacacgcatgcacgcgtttctcccttcagggtttcttaaggaagagctgggccgttgtccaatgctcgcagggggaagaagatactgagaaaacagagtcccgagatccagagttttgggaggttttaatgggatgaacttgatgaacctcaaggtggcctgattctcttagccacaaagtcttgggtgtggggggcatgaggctgaaccccaaatgaatctgtccttttcttctttttcctgggtagagctccctgctgaggaaggtaagttactggaatccctgaactctcataaatgaccaccccccaccccgccctgtcccactccctcctccctgcctctttagattctttgagcaaatatcccttcccaaaaggcaaatctccctccctaaaggttagagtcctgtccggggcagaagtctcccaggcgctttctccttgaagcagccaacccttgaactgccccccactttgccgagtctgtttctggactccaggcgagcttcttagcccttctctgggcaccaagctgtctgcccaccaccctagagcctccccactgcaggccggagtccagggcgctccatcccagaccttcacccactagaccttaacccggggccctccccttgcctcctcccccagggaagaccctgtgggagctggtgatagagcagtttgaagacctcctggtgcggattct

SEQ ID NO: 6961 - DNA, 6000 bp, Homo sapiens
gagtatgtggagaaactaggtttctcatattttgttgatgggaatgtgaaatggtatagccactctgcaaaaagagtatggcagttttgaacaaaactaaacacgcacttactttttcatcaagtataaaaccaagtgttttccaccaagcttggagctgaggtctcggctcaaatgttacctcctcagtgaggccttccctgatcaccctaactaaaataaccacctctggctgagtgtggtggcttatgcctataatgctagcactttaggaggccaatggcaggaggatcacttgagcccaggggttcgagaccagcctgaacaacatagtgagacctcatctctacaaaaaattaaaaaattagctgggcatggccggacacggtggctcacgcctgtaatcccagcactttgggaggctgaggagggcggatcacgaggttaggagatcaagaccatcctggctaacatggtgaaaccctgtctctactaaaaatacaaaaaattagccgggcatggtggcatgcgcctatagtcccagctacttgggaggctgaggcaggagaattgcttgaacccgggaggcagaggttgcagtgagctgagatcatgccattacactccagcctgggcagcagagcaagactctgtctcaaaaaaaaaaaaaaattagctgggcatggtgatgtgcatctgtagtccaagctactcaagaggctgaggcgggaagatctacttgagccctggaggctgaggctgcagtgagcatgattgtgccactgcactccagcctgagggagagaaagaccctgtctaaaaaaaaaaaaaaaaaattaaatccagactccctgtgcatgcagcagggtttctggggaaggggctgaaataatgactagaaatcagcctccagtcagtttggggagggccttcctgacagctctcaggtttgagtttatcctgcaggccctgggagccactgaaggccattgaacaggggaagcacatgactaacatcaaagaagttctcttgacatgcggagtgtagatgggaaccaaaagatataggggacagggagcccaggagagaggctgttgaattgcttctgattgtgaaggaaggattcagaggggaaaattgattccatcaatatttaggatataaaatggactggccttgatgatagagtgcatgtgggggaagagaaaagaaaatttcgaccagatgcggtggctcatgcctgtaatcccagcactttgggaggctgagttgggtggatcacctgaggtcaggagttcaagaccagcctggccaacatggtgaaaccttgtctctactaaaaatagaaaaattagctgggcgtggtggtgcgcacctgtaatcccagctactcaggtggctgaggcaggagaatcacttgaacctggaaggcagatgttgcagtgagccgagatcgcattactgtactccagcctgggcaacaagagtgaaactctgtctcaaaaaaaaaaaaagaaaagaaaattttctttcagctaggtacggtggctcatgcctgtaatcccagcactttgggaggctgaggcaggaagattgcctgggcccaggagttcaagaccagcctgggcaatatagtgagaaaggagaataaaaggagctttcctcgcctctacaaaaaaagggagagagttttcttcctaacttcttttcctttttttttttttttgaaatgctcttgtctcccaggctggagtgcaatggcgcgatcttcactcactgcaacctccgcctttcaagttcaagcgattctcctgcttcagcctcccaagtagctgggattacaagcgcgcaccaccgcaccaagctaatttttgtatttttagtagagatggggtttcaccatgttggccaggctggccttgaactcctgacctcaaatgatccgccccgctcagtctctcaaagtgctgggattacatgagctaccttgcctggcccctaacttcttttctttcctttatccagcaaatacctattgagtgtctactagatgcctgtgcacatctagggatggtaaagatttctgttctcaaagaacattctggtgcaggaggcagatgagaagactagcaaatacacatgcataatttgagattggggcaagtgctgggaatgaaataggggcatgcgatcaaaaaagcatgtgagtaaagggaatttgagaaggttttctttttcttttttcttttcttttctttcttttttttttttttttttttttgagacagagactctgtcatccaggctggagtgcaaaggtgcaatctcggctcactgcaacctctgcctcccaggttcaagcaattctcctgcctcagcctcccgagtagctgggattataggcatgagttaatttttttgtatttttagtagatactgggtttcaccatgttggccaggctggtctcattctcctgacctcaagtaatccacccgcctcagcctcccaaagtgctgagattacaggcatgaaccactgtgcccagtctttttttcatattttttgtagagatggtgtttcaccatgttgcccaggctagacttgaactcctgggctcaagtgatcctcccacctcagcctcctgagtagctgagactacaggtatgcaccatcatgcccagatacattttttttggtatttttagtaaagacggatttctccattttgcccaggctggtttcgaactcctgggctcaaatgatctgcccacctgggcttcccaaagtgctgggattacaggcgtgagccaccgcgcccagccgagatatatatatatatatatatatatatatatatatatatatatatatatagagagagagagagagagagagagagagagagagagagagaaagaaagagagcaggctcttgttgcccaggctggagtgcagtggtgccatcttggctcactgcaacctccatccccctgatcctcccgcctcagcctcccaagtagctgggaccacaggcatgtgccaccacacccagctaattttttgtatttttggtagagatgggttttgccatattgcccaggctggtctccaactcctgagcacaagcaatctgcctgccttggccccacaaagtgctgggaggtgtgagtcacctcgcctggcctgagatatatttttttaaataataatatatagatttttgaagcactggggggcacagggaaggcctctttgaagaagtaccatttgaactgagacctaagtgatgaaaagaaccagtccagcaaagaaccagagcccccagcagagatccaggaaaaagggctgcaagtgcaagggccctgaggcagggaagcacttggcaaggagagtggtggaggcacgaggtggaaaatgtaggtaggtcagcaacactcggcctactaggccttgggttggagtttttattttagctagatgaaaagcaactgacattttttgttttttaaaaaatttctatagagatgggttctcgctgtgttgcacaggctggtctcaaattcctgtcctcaaaggatcctctcgcctcggcctcctaaagtattgggattacaggcatgagcctctgtgcctggctgtaactgacatgttttaagcaggggaatgacatgctctagtgaaagccagtctgggcagctgggtagctaatgaggggattagagagattttgttgaatgaaaggcagattgagtcctgctactcgcccccttcattccccttcattcatgcctcattcttccgcctcccagccgcctcaactggccaaagggaagtggaggccctgccacctgtagggagggtcccctggggcttgcccacagcaaacaggaagtcacagcctggtgagatgggcctgggaatcagccactgagaaagtgggtctcttgggtccctgaattctttttctgagtccctgcagcagtgaaaaagacacagaggcacatagagagtgacagagaaagagagagacagagaggagaggcatggggcagaataagaacagatttaggagttagaactcctgggttcttttaaaacaatttttcttttagagacagggtcttgttgtgttgcccggactggagcacagtggctattcccaggcataatcatggtgcactgcagccttgaactcctgggctcaagcgatccttctacctcagcctcccaaggacctgggaccataggcgtgtaccactgtgcctggcttttgcctggttttaaactgaggcagtatgacttgagctcttaggcattaattgaagctgtatctcattaactgagggcttatgatgtgctggacactgggctaatagtgctgaacatattgtcatttttaatcttcacaaacaatatttgtataggactgttttcttttcttttttttttttgaaacagagtctcactctggtgcccaggctggagtgcagtggtgtgatctcggctcactgcaacctccgcctcctggtttccagtgattctcctgcctcagcctcctaagtagctgggattacaggtgtgcgccaccatgcccggctaatttttttttttttttttgagaaggagtctatgtgcccagcattgttctagagcacttgcaattagtggtgaacaacacggtctctactccaaggggctcacattcttgtgcagaaaacagaaatgaacaaataaacacacaagatcatttcccgtggtagtgagagctgggatgaaaataaaacagcgtggcagggaggaggcaagtgttgtgagtctggagggttcctggagaatggggcctgaggcgtgaccaccgccttcctctctggggggactgcctgccgcccccgcagacacccatggttgagtgccctccaggcccctgcctgccccagcatcccctgcgcgaagctgggtgccccggagagtctgaccaccatgccacctcctcgcctcctcttcttcctcctcttcctcacccccatggaagtcaggcccgaggaacctctagtggtgaaggtggaaggtatgtccaaagggcagaaagggaagggattgaggctggaaacttgagttgtggctgggtgtccttggctgagtaacttaccctctctgagcctccattttcttatttgtaaaattcaggaaagggttggaaggactctgccggctcctccactcccagcttttggagtcctctgctctataacctggtgtgaggagtcggggggcttggaggtcccccccacccatgcccacacctctctccctctctctccacagagggagataacgctgtgctgcagtgcctcaaggggacctcagatggccccactcagcagctgacctggtctcgggagtccccgcttaaacccttcttaaaactcagcctggggctgccaggcctgggaatccacatgaggcccctggccatctggcttttcatcttcaacgtctctcaacagatggggggcttctacctgtgccagccggggcccccctctgagaaggcctggcagcctggctggacagtcaatgtggagggcagcggtgagggccgggctggggcaggggcaggaggagagaagggaggccaccatggacagaagaggtccgcggccacaatggagctggagagaggggctggagggattgagggcgaaactcggagctaggtgggcagactcctggggcttcgtggcttcagtatgagctgcttcctgtccctctacctctcactgtcttctctctctctgcgggtctttgtctctatttatctctgtctttgagtctctatctctctccctctcctgggtgtctctgcatttggttctgggtctcttcccaggggagctgttccggtggaatgtttcggacctaggtggcctgggctgtggcctgaagaacaggtcctcagagggccccagctccccttccgggaagctcatgagcccca

SEQ ID NO: 6962 - DNA, 6000 bp, Homo sapiens
ctgtagtcccagctactcaggaaggaggctgaggtgggaggattgcttgagcccaggagttcgagactgtagtgagctgtgattgtgccactgcacaccagcctgggcaacagagcaagaccccatctcaaaaaagtctcttgcttggtgtctgacaccttgacacagtagtatcctaacaaatgtttgttgaatgattaaactcctgtctcaaagaatcccagcatcatccatctctgcgtgagccagaaaagcttcactcttgatcccttttcatcccccacacccactgcatcacccgttcaacttaatagccccagctccctcccaaatcagctccctctgcccgtctccatgctgtcctaggccaagccaccactgcctgcagcctaggctagtgccacagccgcttcacgggtggctgtttcccctctggcctctcaaatccatcttccatgctgcagccagaatgatattttctttggttttttctttgttttttttttttgagacggagtctcagtctgttgtccaggctggagtgcagtggcgcgatcttggctcactgcaacctctgcagtgaggttcaagcgattctcctgcctcagcctcccaagtagttaggattacaggtgttcaccaccacgcctggctaatctttgtatttttaatagagacagggtttccccatgttggccaggctggtctcaaactcctgaactcaagtgatcctcctgccaaagtgctgggattacaggcgtgaaccaccactcccggcctattgtagtttaattaatatgcctaaacattgactcattttaagcatacagttcagtgaattttttcaaaaaattatttatgtagagacagggtcttgctctgtcacccaggctggagtgcagtggcgcaatcatagttcactgcagcctcaaactcctggcctcaaacatcttcccatttcagcctccctaagtgctggaattacaggcatgagccaccatgcctggccttcagtgagttttggtagatgtacacggttgtgcaaaagtttccttctcttgcccatgaccccaggcaaccactaatctgctttctgtcaccttacttttgccttctctggatgttcatataaatggaataacagtatgcagtgttttgtgtctggcttcttttacttaacacaatgtttctgcgtttgtatcagtagttctgttacaggacaggggtcccgatccagaccccaagtgaaggttcttggatctcgtgcaagaaagaattcagggtgagtccacagtgtgaagtaaaagcaagtttattaagaaagtaaactgggccgggcacagtggctcacacctgtaatcctagcactttgggaggctgaggtgggcggatcacctgaggtcaggagttcaagaccagcctggccaacatggcgaaaccctatctttactaaaaatacaaaaattagctgggcgagatggttggggcctataatgtcagctacttgggaggctgaggcaggagactcacttgaacctgggaggcagaggttacagtgagctgagatcatgccattgcactccagcctgggctacagagtgagactccgtctcaaaaaaaaaaaaaaaaaaaagtaaactggtgaaagtacagctactccatagacagagtaggacattcctgaaagtaagaaggggaaggcatccaccttatgtacaagactcatatatatggggagatgtgctctgctacaagggtttgtgataaaggattttttttttttttttttttgagatggagtctcgctctgtcgcccaggctggagtgctgtggcacgatcttggctcactgcaacctccgcctcctgggtcccaatttaagcaattctcctgcctcagcctcctgagtagctgggattacaggaacacgccactatgcccagctaatttttgtatttttagtagagatggggtttcaccatgttggccaggctggccttgaactcctgacctcgtgatccgcctgccttgacctcccaaagtgctgggattacaggcataagccactgcgcccggctaattttcttaattactatatttagcaagaatcaatattgttatctttaaagcaaaattaggaatgctttgttctccatatattgggatatctggacactcccaagtctgggtctgtttagtaaacattatattattattatttgagatggagttttgctcttgttgcccgggtgggagtgcagtggtgctctctcaactcactgcagcctctgcctcccaggttcaagtgattcttctgcctcagcctcctgagtagttgggattacaggtgtgtgctaccatgcccggctaattttttttttttttttttgagacggtgtctcacacggttgcccaggctggagtgcagtggcacaatctcggctcactgcagcctctgccccctgggttcaagcagttctctgcctcaacctcccgagtagctgggattgcagacgcccaccaccacgtctggctaattttttgtgtgtgtttttagtagagatgggttttcaccatcttggccaggctggtcttgaactcctgaccttgtgatccacccgcctcgccctcccaaagtgttgggattacaggcgtgagccactgcgcccggcctagtaaacgttattgtttccttaaccataaacatgtcgagtctaggaatgccttactttctgtaattcagtccagcaagtcccagccttattttcctaaccgtcactcaagatggagtcactctggtccgaacgtctctgacagttcattcctttttcttgttaagctattcccgttgtatgaatagattatgcccctgttgatggacatgtggattcttttcatttttgggctattatgaataatgcatttatgaacattcatatacaggtttttgtttggacacgttttcatttctcattggtggttacctaggagtggaattgctgggtcatatgggaagtgtatatttaatttttatttatttagtttttttgtagagatgagtcttgctttgttgcccaggctgatcttgaactcctgggctgaagtgatcctcccacctcagcttcccaaagggctaggattacaggcatgagccactgtgcctggccaaaaacacaatttttaaaatggacaaaagagctgggtgcagtggctcacacctgtagtcctagcattttgggaggatgaggtgggaggattgcttgagttcaggagttccagactagcctggacaacatagcgataactcatctctacaaatataaaaattaaaatgacactgggcatggtggctcacccctgtaatcccagcacggtgggaggctgaggcgggcagatcacttgaggtcaggagttcaagaccagcctggccaacctgctgaaagcccatctctaccaaaaatacaaaaaattagccgggtgtggtggcacgtgcctgttatcccagctacttgggaggctgaggcacaagaatcgcttggaccccggaagtggaggttgcagtgagccgagatcccgccactacactccagctccagcctgggtgacagagcaagcgtctgtctccaaaaaaagaaagaaagaaaaaaaaaaagagttctttacatggatacaagtcctttggcagatagatgctttgtaaatattttcattcaacctgtggcttgccttttcacttcagaggtgcaatttacaatgcgtatcactctctagataagctccacgagggaagggagtaagtctgcctttccctgaaacctggtaaaatgccaggcacatacatgttcaataatatcttgttgagggaattaaatgcctgcaacctgaagttcctgtccgccaggggaaaccaagcttaaggttctgaaacacgaggcacctaatatggggggggggggggggttaaagccaattatgggtattcggactcgaaatagtttctaacaaggcgttttggggttgggggatgctctccccacgagattccaggatttcagtagagggcctttaagggctggttgaaagatgggtcttgaagctgtatttgcacagaactatactaattttacttagagtgctttattagatgtagcttggagattatagggtgccactaaagaaccactcccaagttatccctttgaccctagtcctgcagctgggagtctccttaggctaggagctcctgcctgccctacaaaagcccaccggagggcgcaagggctccaatcccgattggagtgaggaaaaatatgctccaggagcggcgggtggagacgcttcctttaataggtatttaagtgtccacggtgaaggctcaggagtttacaaggctagcagggttggggaatctcaacaaagggcggggcgttgctcaagctccatccgtccgtccgtccatccctccgtccctccaatcctccatccatcgcgctgctcaagctccatccatccatttatccatccatccatccatcctttattgagagtaaaaagccgccaaccagaccctgggaggaagacaggatggttcccgagaactagggctgctccttggcttttagaggtatctactacttccaaaaccttttgagaccccattatcccgtttgatgaagatggagtctgccacgtgggggttccagataagacagctgagattcggaagggcaggcgactccacctagtcacggggacgctctttttgacgctccagggaccgcagggtctgggaaagttcctggttactccggcgaccggccggccgtcacatgacatgtgagcccgggcggaacgcccaagaggcttccgtagtcgggtggcaggtcacgtgtcgaaggcttgcccgcggggaccccttccaccctggctcccgcgtcacatgaccggctttaagcaacatggcggctgccgtggtgcagcgcccgggctgagcgacagcaagtgcagcgggctcctaccccgggtgaggggtggcctccgcgtgggatcgtgccctcttcagcccgctcctgtccccgacatcacgtgtattccgcacgtcccctccgcgctgtgtgtctactgagacggggaggcgtgacagggcccgggtcccttctcagtggtgctctgtgcttcagggcaagctccccgtctccgggcgcacttccctcgcctgtgttcggtccatcctcctttctccagcctcctcccctcgcaggtgggatcgtcggtgggaccggagcgcgggcgggcgcggccccccgggaccatggccgggtccgacaccgcgcccttcctcagccaggcggatgacccggacgacgggccagtgcctggcaccccggggttgccagggtccacggggaacccgaagtccgaggagcccgaggtcccggaccaggaggggctgcagcgcatcaccggcctgtctcccggccgttcggctctcatagtggcggtgctgtgctacatcaatctcctgaactacatggaccgcttcaccgtggctggtagggactcacttctgggaggaagatagtctaggagaggggagccagggtcccgagggtggcgctgctttgccggaccatcctgaattttctcctcaggcgtccttcccgacatcgagcagttcttcaacatcggggacagtagctctgggctcatccagaccggtgagtggggaccactcctggtcacacagccgctcctccttctgttctgtctcaagtggggccacgcgctggcctgtctaggggctcattaatggaggttttgtggccagttaggggaggtgatggccctgatgttgctcgggggtcagcgggacaccacatttaaagagggagtcagtttagtataactaagtataacttcacccaggtgaagacagacctgggtttaaatctcagctcttccacttattgtgtgatggtaggcaaggcactcaacctctcta

SEQ ID NO: 6963 - DNA, 6000 bp, Homo sapiens
aatctcagctactcgggaggctgaggcaggagaatcgcttgaacccgggaggcagaggttgcagtgagcagagatcgtgccattgcacacacaaaattttttttttttgtagagatggggtctttgtatgttgcccaggttggttttgaactcctggcctcaagcaatcctcttgccttggcctcctaaagtgctgggcttacgggtgtgagccatgcgcctggctccaaataccccttttttggggcagctctcattctgctgagcctgcaggagactggctgccctcacctggaagccatgtgctagacagaattcttgcgtgcaggtgacagaagcccattgtaaaactgtaagccccctagaggccgggtgcggtggctcacacctgtaattccagcactttgggaggccaaggtgggtggatcacaaggtcaggagattgagaccaccctggctaacacagtgaaatcccgtctctactaaaaatacaaaaaaaaattagctgggcgtggtggcaggtgcctgtagtcccagctactcaggaggccgaggcaggagaatggcgtgaacccagtaggcggaggttgcagtgagccgagatcgcaccactgcactccagcctgggtgacagagtgagactctgtctcgaaaacaaacaaacaaacaaacaaacaaaccgtaagccccctaaaggggctgtcttggctttcttcctgaaagtcccaggtgagcttcagtcaggtaaagctggatccagggctcccacactgcccttctcttctgagctttactttcctttgtgttaacatcattcttaaggacgtgagaactccagatgattacctttccatttagcaacattggcaccttggaccctggggccgtgtttccaggatagcgtctgactagatgaacatgcatcacgtgccctctgcggaatccgtcaccgaggctggggtggttaacagtcctcttgttggccaagcctgggatcctatttaaaccaagtggattgagagaagtaggggtactggtttcccaaaagaaaattaccaaagaggagacaaagctaggcttgcaaaaatagggtggcccctagtggcagcccccttcccccagattgcaggttcggcttcttggagcaggcacttaactgggtattttaggtctcaggctggagttatctgtaccccacactctcctccagcccagggcttgagtgtgtctctccctgtgcctatcctgaagccctctgtctcccaggtgacaccgggtctaggagtggtggccgttctgctgctgttcctggtagtgcgggagccgccaaggggagccgtggagcgccactcagatttgccacccctgaaccccacctcgtggtgggcagatctgagggctctggcaagaaagtgagtttattcccaccctagaccaccatctgaggccccctggcgtctggtttgaggtttaagtggggatgttcctgttcctggccacaccccaaggccagtaattcggtcgatactgtccccttgtggcagctgcttgaattacaggcccagatcctgggagccagaaccacctctgcacggtgttgtgaccttactaaaataagccaggaagggagaagagaggtcccctcctgcctcgacacctccgtggggtcttactctctccctcccaactatctgcagtcctagtttcgtcctgtcttccctgggcttcactgctgtggcctttgtcacgggctccctggctctgtgggctccggcattcctgctgcgttcccgcgtggtccttggggagaccccaccctgccttcccggagactcctgctcttcctctgacaggtgcccagatggggctatgctggggggcctgcgggtggcagggctggagtgaagagcatctgtggctcagacccaggcagggagtttgactcctgacttcacaagctgcctgctctcctggaatctccgtttcctggtctgggaaataagtgatgggatgatgtctgccactcagggctgtgccaaccatggggtgctgtgtctgtagggaccttggttgtgagggtggctaggatggacagcgtaggggccttggcaggcacagggacaaaccccccattcccttccctcacccctagtctcatctttggactcatcacctgcctgaccggagtcctgggtgtgggcctgggtgtggagatcagccgccggctccgccactccaacccccgggctgatcccctggtctgtgccactggcctcctgggctctgcacccttcctcttcctgtcccttgcctgcgcccgtggtagcatcgtggccacttatgtgagtagccagcaggtgtcaagggggatggcgtgggtccagggtggaggagcagtcagcgtaatggccactcgaggtggaatgcctggttttgaatcacagctctggctcttcccagctgtgtgacattggacaagtgacttaacctctctgtgctcagtttcatcatgtgtaaaatggggatattagtagcacctgtctcactggggtgtgatgaggattaaattagttaatagatgagctgggaacatggtcaactttccatgtgttagcccttactgtcatgaacccccgaccctctcttcccccagattttcatcttcattggagagaccctcctgtccatgaactgggccatcgtggccgacattctgctggtgagttgctgggcagctccagggtcagcgcagaggctgatgagagcagagttggggtcaggagtgttgcctctacccctcaaagcccagcctcaacctaccttctgcaataaataacatctgtagcagacccccggcctgccctgcgacctcaaccccaggcacacctctgaccccggcctaggcggatccttggtggtctcctggccccctgcctcctgccccctggagcccagagcatccactgagctccaccaactcctccacagtacgtggtgatccctacccgacgctccaccgccgaggccttccagatcgtgctgtcccacctgctgggtgatgctgggagcccctacctcattggcctggtgagcattatttcttggctggcatggggtggctggtgtcctgagcctgggctggatcagaaggcctggccctagtgaagtgtctgtgtcctgcgtgctgggcacttctcaccttccattgtcaactggaggagaaagattttgtctttgaatatttctaccagtaaggccagggacctcaccctggtggtccaaactcctcctttcttttctcttttcttttcttcctgagacaagacctcactctgttgcccaggctgcagtgtagtggcacgatcatggctcactgcagcctcgacctcctgggctcaagcgatcctcccacctcagcctcctgagtagctgggatgataggcatgagccactgcatctagctcaaacctccttccctttcctgggctccacttgtctttctccctggagctcaggggcgtgccctccctggttcatccatgaggctgactcccctggctttcctgtctcctctccctgcagatctctgaccgcctgcgccggaactggcccccctccttcttgtccgagttccgggctctgcagttctcgctcatgctctgcgcgtttgttggggcactgggcggcgcagccttcctgggcaccgccatcttcattgaggccgaccgccggcgggcacagctgcacgtgcagggtcagttaggagctgtgcccggcccagcttcttgatctgcctgtctgtctgtccatctgtctgcccactcctgtgcacctggcagctcagtccacagccctccccttgtttggcctccagtctgtctgcatccacccctggggtggctctgtggctgccccatccatttcccgctgcctgtttgcccttctctggctttgtctgtctgtccatccagctcaccctggctctgaccctcccccctcaggcctgctgcacgaagcagggtccacagacgaccggattgtggtgccccagcggggccgctccacccgcgtgcccgtggccagtgtgctcatctgagaggctgccgctcacctacctgcacatctgccacagctggccctgggcccaccccacgaagggcctgggcctaaccccttggcctggcccagcttccagagggaccctgggccgtgtgccagctcccagacactacctgggtagctcaggggaggaggtgggggtccaggagggggatccctctccacaggggcagccccaagggctcggtgctatttgtaacggaataaaatttgtagccagaccccaggtgcctgctctcgtctttctctgggtggcctctgatcttgcaccccgtcttcaccccagggctcctgaagactgtgggtcattcctcagggctctgggtgagtctctgcccttctgggctgggcgactgagatgggggactgctcttctccgagtgagctggctgagtgtgaccgtgagtcacgcccctgcttccctggagcctgtcccttgcctcacaggcctggctgaggtgggggtgggcactgccctttgtaccccagaattcccactgtcagggcctccctgctcgctgcctccccgggtcctggatatggaggccacggctgccagctggcaggtggctgtccccgtcttggggggggccagcagacccttggtgagtgcctggggtggctcccgggcctcctcctgccccctccccactggcgggtggggtgggaagggggcgggtgcagccggctgagagcttgatgatttcctgccctcgcccggcgctcaccacagcttcctgccgcaggcgggcgggagggcgggcacggagaggcgggcgccgaggaggggcaggtagggctgggacgcaggggtaactggatcccccgacttcagcccaggccctggtctgaccaccctgggagcagggactttccacagtcagctggacgcacactcagcccagtaaaagaggggacccatcccgggagccccggggagggcacagctgcctcctcccgggctcccctgccacctggtgcctacctgccccctgctccctgccgggtccggtcctcaccccatcttcatctggccttgactctgcccttgaggggcctaggggtgcagccagcctgctccgagctcccctgcagatggaggaggccatcctggtcccctgcgtgctggggctcctgctgctgcccatcctggccatgttgatggcactgtgtgtgcactgccacagactgccaggtgagtgggaaactggtgggggtacccagggcccagggacaccgacgggatcctcatccactcccagcccctgtgtctgtcctggctctgtccctgcctccgtcctgatcccagcgcctctgagagtccctggatcccagcaccttctgccctaagcaccccctgttcctgcctcaccagccctctctttcccaggctcctacgacagcacatcctcagataggtgagtccgccccagccgccctgggtctccctccacaccccatggcggggcagggctggggcttccatcctccatcttccagccccatccccaagctgtgtctcctttaccagtttgtatccaaggggcatccagttcaaacggcctcgtgagtacaaggagggtcccctaccttgggtgccagggagagggtcccctggtgtgggagtgagcgtgaaccttcagacttcccctgccaccttggggctgcccacatggccttgacctgagctgggagaggggagatggctcccccaggcctgtccagggtgtggggctttcaggggcttagtctgttctttgaggccttgacgatgtccggagtccttctttcaacttggttctgtgtcctcagacacggttgccccctggccacctgcctacccacctgtcacctcctacccacccctgagccagccagacc

SEQ ID NO: 6964 - DNA, 6000 bp, Homo sapiens
gccccggtcgcgtctgccttggagaagaagacaaagagcaaggggccctacatctgcgctctgtgcgccaaggagttcaagaacggctacaatctccggaggcacgaagccatccacacgggagccaaggccggccgggtcccctcgggtgctatgaagatgccgaccatggtgcccctgagcctcctgagcgtgccccagctgagcggagccggcgggggagggggagaggcgggtgccggcggcggcgctgccgcagtggccgccggtggcgtggtgaccacgaccgcctcggggaagcgcatccggaagaaccatgcctgcgagatgtgtggcaaggccttccgcgacgtctaccacctgaaccgacacaagctgtcgcactcggacgagaagccctaccagtgcccggtgtgccagcagcgcttcaagcgcaaggaccgcatgagctaccacgtgcgctcacatgacggcgctgtgcacaagccctacaactgctcccactgtggcaagagcttctcccggtgtgcacggggcctcggccgcccgctaggccgtggggagggagggacgcgacggaggtggcctggccgtggctggcggggagggaggcggctgctgaggctggggaaggggagccactcccagggcggagggaggaagcctctcccggttaccagggagcaaggggtggtcctttgtcgaggaggtgggccttggggttgacggaagcttcgcgtgggaggaggcggcggcggcggcagcggctgctgggctccaggggagggatttcctgcttaagtgtcgctgtgacggcctgggctccgggaggaggcgcagggatcctcggaaaggcctgtggtgcggtttggtggatttggggcgcaccacctccgccctaaccccaaccccaacgtgtccccaggccggatcacctcaacagtcacgtcagacaagtgcactcaacagaacggcccttcaaatgtgaggtaggaagcccgcctcctcctgtcttggttttcatgattttgatcctcatggtagctgtctgagtcagtctctcagaccccctttttctctctcttctttttgcctttttgctccattttctcatcccttcttcaaggcctcatcatgtcactcccatttcctacagatcaaagatccccaaggctctgattcctttaatctcttgctcccccctccccagcccaccaagctttaactctcctgtgacaccccccacgcccctcccccctcctcagaaatgtgaggcagctttcgccacgaaggatcggctgcgggcgcacacagtacgacacgaggagaaagtgccatgtcacgtgtgtggcaagatgctgagctcggcttatatttcggaccacatgaaggtgcacagccagggtcctcaccatgtctgtgagctctgcaacaaaggtacatgccgagggctgccgggagggccaggggcagagggtgggcgcctggccagacgccttgccacggatacgggttaagggtgctgtagccaagagctcgtggcgtctagattcctacaagaggtcaagggagcagcggggggacacctgaatgaacatcattagactctaagaagtcctggttggaagagatgatctgccagagaggttgaacctcctggtaatgtgtggggaaagcgggagtggaacttggctgctctggggaaggagtagtcaagaaagccagttccaggggtcacaaggcaaggtttccgctgcgcagccacaaggtcttgtctccagctcctggggcaggtggagtacacgggccgggctttaccagcacgcaccctgcacgggtagcagagaaagctgccttcagtcagactcaccggttaactgggttgagaccgcggggcactggagggaaggggacacagccgtctctgctgagggtcaaccctgcaagtggctaggagtcagtgtctcgtcatcctgggagaggtctcccggccatggagaatgagttctgtaggtaccaaggctgagaagcgggcaccacacaagccaggccccaggctcagggaggggctgtgtctaccagccccaacagagcagttggccccaggctaccaaggataccgtgggaggaggacagggccatctgaggagggcatcccccgcctaggagatcagccccgtctctggggtctccgcctggctgacccccgccccatcccaatccaccccccaataggcttcaccacggcagcatacctgcgcatccacgcggtgaaggaccacgggctccaggccccgcgggctgaccgcatcctgtgcaagctgtgcagcgtgcactgcaagacccctgcccagctggccggccacatgcagacccatctggggggggccgccccccctgtcccgggagacgccccccagccacagcccacctgctgagggggacccccgcacccaccaggcaaggcgtggggcatggctggggggcgggatggggggtgtgggggacaacggggctcaaagggcccaataggggatctcaggaaggcgagggatgcccatgtaccactcaggctagggagacttctgggcacagggaggatccttgagaactgctctgtctgggtgaggatgcaggctgaggcctctggggtccagataggaagtgagcaacggctgtgtcccaggggaagcaggctgggaaggtgtggggtgagggcaaggctcttgccattcagatcgcgctgtgatccgtggtgtttctcctgtgcaggtactggtgaggtttgtccaatggcggcggcagcggcagcggcggcagcggcagcagcggcagcagtagcagcccctcccacagctgtgggctccctctcgggggcggagggggtgcctgtgagctctcagccacttccctcccaaccctggtgagctccaagttggttgcgggggagaggggagaatggagtagagtcccttggtacaagctcctctcccccctcttttcccaccaactcctatttccctaccaaccaaggagcctccagaaggaaaggaggaagaaatgttttcttaggggaattcgctaggttttaacgatttgtttctcctgctcctcttctgtcagacctgaccccacacaaacctgtcccctcggttgtgttgaagtcccctggacagtgggcaggggtggcagaggacacgagcagccactgcccgtaccccctctcctctctgtaagcccatgccctgtcttcccagggacttgtgagcctcttccctcgacggtcctcttctctccttccagtcctctccccctgctgtctgcagcccctccccggggagttggtgctttcttttccttttttttttttttccagggggagggaggagaggaaggagggggatcagagctgtcccaaagagggaaagcggtgaggtttgaggaggggcagaagcagggccggcaaaggttgtaccttcataaggtggtatggggggttggggtcaggccctgaacatcgtcctacttgagaatctgtcaggggaaaaagtcaaggggagcaggaggaagagccaggagggccagaggcagagaagagatggagtcttaggggccagggtgagcgaggggtccagggcctagaggtgcttcctgggggcgggggaatgcagccagtgtccccctcccctcttccaccccagctccagccctggtcttgtcttttcatccctcttccccacgacagaagaagttgtggccctggccatgtcatcgtgttcctgtgtcccctgcatgtaccccaccctccaccccttccttttgcgcggaccccattacaataaattttaaataaaatcctgtttctggctctggattgaatgaattgccctcactaagaactgccgccaaccccaagggtttcttctcggcctggtgtccgtcaatccagccttgctctgccctgtgaggctgtgaggttctggctccgccctccccaggggcagccttactggcggcagcacagatacagggcggggccaaggctgtggctgtggagagcaagttccaggtctctggggaattcccaactcggacaggcccagaatagcccctggaggtttgaagaggccccgtcagaaacccaaacagagctgccagacgggaatgccgccctcccccgtccacactcatggccgctgctcagcccccagccgcatccctccccacgcgcgtcacggccctgaggccatggtgggtggatgcggctgcggaaaggctggggagtccgagccctaggactgggagcagcgaggtagagaatgaaagctgcacctgtccctcatcctgggcatgggccactctgtgtttacacgggctcctctgcccagctcctcctgccccttggaattccctttcctgtccccgctccgtcctttccagggccccttttttgagccttccagcgccagtttctgccgctcctttctgcaggctccattctctccaaaccccaccctgctcctcctctgcagcctccccgcgtcttgccccatcttccttgccctcctgctcgtagagacgcctccacccggtcctgcctgtctcactggtcccgtctcctcgcagaaccctctccgtttcccccaaatccccgtctcttccaggaatcccggtgaccgttggcgggaggggccggggacttaagaaggaggcgtctctcctggaggcgcgcgtgagaaggggcagggagggggcgcgagtggtccccgggccggttgcctgggtaacgcgtggctcccttgggctggcgggaggggccggaggctcgcgaggggcgggggcggcgacggcggcggagcgtaggggaggggaccggagaggaggggatgagcacacgggagaggagaagagggagacccgccgcctccctccctccctagctgacttgctccctcccgggctgcggctgctgcaaaagccagcagcggcagcgggagctgtccggaggccggcgtcgaggtgagacccgggcagactgaggctgcgggtaggagtggaccgaccgacggctgacgccgggcggactgcacgggaatgcgggtgtctggagggctggtggtggtgctgggcgggctgaaccatcgggaggaggcgccagcccaccgaaggcgagggaagccccgggagaggggctgacaggggatcgaaggagataaccaggtcccccagaaaggggcgggagcgtcctcgccctaaacgcgcagcaagaaaacccgcaccgcctgggagcccagggaggaggggaggatgcagagggagtggaatgcgaatgtcgggtcctctgcccagtcggcctgtcggagtgctatttgcacagctcgttgattttggggtgctgggatctgagagtctggatcttgttggatggacccagggagagaccctggagaaggtcctgtttacaaaagggttaatcttccccagggctctccaagcagaagactttgagtagagcactcctcccgcagggatgtcccaccctaaggcaaaggaaaccccaacttttcttcctctccctagaggcagtgcaaggctggccctgagacaggaatgtggcccaattgggcctgcagtgctgagcgccctcttccctcctcaccccaagcctatctcctcctcttccagggtttgccgctgtctctgctattccatcctccccataggggctctctcccctctcccatctcaagatggcagccagcagctctgagatctctgagatgaagggggttgaggagagtcccaaggttccaggcgaagggcctggccattctgaagctgaaactggccctccccaggtcctagcaggggtaccagaccagccagaggccccgcagccaggtccaaacaccactgcggcccctgtggactcagggcccaaggctgggctggctccagaaaccacagagaccccggctggggcctcagaaacagcccagg

SEQ ID NO: 6965 - DNA, 6000 bp, Homo sapiens
cccacaggtgcacatcaccatggtgagacaatttttaaaactttttgtagaaatggggtcttgccacatttcccaggctggactcaaactcctggcctcaagcgatcctcctgccttggcctcccaaatcactgggattacagctgtgcgctgctgtgcccccctcaccatcttttatttttttatttttatttttttaagatggagttttgctcttgttgcctaggctagagtgcaatggctggatctcagctcaccacaacctccacctcccgggttcaagcaattctcctgcctcagccttctgagtagctgggattacaggcatgcgccaccacgcctggctaattttgtatttttagtagagacagggtttctccatgttgctcaggctggtctcgaactcccgacctcaggtgatctgcccgcctggcctcccaaagtgctgggattacaggctagagccaccatgtccatcactatctttaagcaatgctccctctcccacctgagccagaactccctttcccaactgttatatagctgaaacaattggaacactgcctggtacatagtaagggtacagaaatgctacctttgttattattattctcccatctgtacccaggactccttccacagttcccagcagcctctctcccatccatccccagcgtgtacctctccggtcctcccacccccatccccttgctgtcgcctcacctgggctggtcaccgtagtggtaacagttgtcgtggtgatgatggtggtcgtcgtctcctcctctcctccctcaggcccaaggggaggccctggggaggcagggctgggtgggggtggggctgtggttcctgggggcggggtcagcagttctggcgcagtggggcctgcccccctgaccccgttaggggtgacggctgttgtcagaggccctgtccccggctcagtggcccgtggcagggagggcactgcgagagtctggccggccggaggggtggctagcgtggggtcccgatcagatcctgggacagtgcagggaatatcagagcacaggaggagcacatggaggaccttgggtggggagcagggctgagggaagctaggggttcccctgccataccacaaaagcctcccgcacaaggtacagcaccccccacctttcccttccccaccccagcccctacctcctcccaaggcttccacagcctgagtcccccctctttctcttctggtcccttctctccacccagccccttccaccctgatactcctctccctgagcctctctctctgcctcctcactcagatcacgttctctctctggttatctcctctctcctctgtctcattctctctcgaactctttatttccccatttccctgtttagtattctgattgcactctgatttcatgattcgagatccactagtttttgtgtttcattctctctgtctctgtcttccaccatttctctgagtctggttctctgaatttccatctctgtttctatgtgtctgtttttctgtctgactgtcacctaatcattctgtctctgtctctctggttctgtctgtgcccaggtttgactttctctgacagtctcgttctgtgttccctgaatctcacaggaatgcaggctctttcctctgcagtctctctctgcctgctcttctctagcctggctccccatctccctgagcccatatccctccctctgcctctaggccactcctgccactctgggggcctcacctggcaggtagcccatctctgggcccctcctcagcagggccccatgaagcagttcagccagggcctcagaggccaccgtgggggtctcacttccaggctctggcaatatctcctcctccttcaggggcagacctaggaggtgaagttgtgtgagcttctccacttccccacaccccttccttctccagagagatattttctagaactcttcctccctcctccatcagctgggcctgcaggggctcagatggtcccaggctcgactgagggccaagatcggaggaggggctcccagctgccctcatactcccactcccacacctcttctctcccctcccctctcccttctccctgggctgtgtgggccttcattgaacaccttagctcttatggaccctggacagcgccagcaaggcagaggggtcgccggtgctgccttccctttcacctcagtggtgatctccccccaaccctggggctctgcagaggatctggccgcacctcccagcccttgcttccgcagtgcctggctttctctctgggtttctgtctctgcagtgtggctgtcttttctctctctctctctctctctctcccccccaccctctctctctctggtcctctgcagtctctgcctccttccctggagtctggctgggggtcagagtgggggactgaaaatctggtctttgagccctgcctctgctcatctgtctttgtccattcatccaagaacagttgtgtgtacagcgcctggcatctctctcagcacctccatctcccacccaggtccctccatgcttctgccgcctccgcagacatccccccaactttcccagccctccttcttggatctagcccctgagacactgctaaaagcttctctcattcatttctctgccttctcaatattgagggttaaggggcttcgggttcaagcctgaaagctctggcttgccccttccccatcagctgtgcctctcccctcccccatgtgctcggaagacccaggatattaagagaaaggagggtggaggaccccgctggacgccttcctggggcccacccccacagtctcatgtccttaccctggatccagggacagctcagcagaattaggaacagcagctggggaggcggcgggtgctgggccctgggagtccccatggcgactcaccccgatctctctcctctgtgcctctctaagtaatctggctgccacctttcctccgtctccgtttatctttccctttaattgttttttttttttttttttttttcctcgtaggagtcagcaaagaaagacaatttctctgccccttgggatggaggggcagaattgggctaggggtcgcctggagcccacccccctttgctcagtctcctctgtcctcttctcgcggctctgtggtggagggggcgcggctccggctgcagggggtggggccgagagggccgaaggggccgggtggcctgggttaccctcctgctcaggcgcctgggtccactgggctgtctggaccccaagctaggggactggggaggagaaagacagcttctgggggtttagggtggggtcgaggatcgagggggtctccactgggctctagcggggcttgtcggggaggggaaggggtgggttggggaactgggagagccgaagctcgggcactggagctgcgggagggagaagctgagaaaggtatcgagcccacgtcagatcctggggacgggcggagggaggggcctgggatttatttgacggggagggaggaggaggaagtgcagatggaggagggagggatcatacgagccagggccgtaatcctcactcccgcggcccctaggggaggcaaaggaaactctctggtcccagcagtaattagccccctccgcctgccattccagcacatctggaatctgaatctcctcttcccagggtgccgaggggctgcatagcttggttcgcgcctgctaggcccccaattatgccccctgttcacattcagacctcccaaggggcttcccttccccttttacagtagctcgggtggaatgggctctccctcctccaggggaatagagagcttccacgattgtgacaagtctcgtgggtgacgggccggggtttggggaggagagacagacccctcctcttccataaaccctgaccccggccagctaacaggcggcctcggctctgattttccctccggagcgcccttttcagcaccagcggcgcgcggacagctcccctcgccccgccggggcgggcccggcccgacgccgcccgcgattggctgaggccgctttcggtgtttgccaggctcgcgggctcccgggctgcctagggccagcgggagtcacaggccgaccgaccgacggaccagccgcccgacggactggcctcagcatccttgcccgcagtcccgggcgcctgcccagccgtcagtccgcgctcgccccgcccctcaggccccgcccctcaggccccgcccgatacgacccgccccttctttcgcattgcgggacggctggaggctggcaccgtggcccctgcgccccacgtggcgccctttccgggcggggggggtggggaggcacctccagcgacaactctcccccctcccccggcacccggctgatttgctgtgccactgggagggttcgggggtggctgagctgagagggctccgggaaggagtgacgtcagggtgagtgggagcccaggaaggagcgagtaggagagagggagcgagagccaggcaggaccgcagggtcggggctagtgaggagcgagggcaaggagagagcagtgaggccggagagaaagaagctgccgcggaggaagacaggctgcgggttcccgggactgcaggtccaggcagggtaggaaccgctgcccaggggagctaggaggaagcggggagagagagcgagcgaaaagcgggggtggggaggaaagggggagattgaggtgggagagagaagcagagcgagagagaggaggctgctggaaggagaaagaagagggtgaggaggcgacagagggagaggaggaagaagaggtagaaggagagagaaaggggagagaaaggagagaggagggttggaggtgcatgaaggaggggagagggagcttcagcgtggagagaggaccgcggaaggagagagagacagcccagagtggaatgtggaagggaaacagtccagcggggagccagggggcagccatggaagggacaggtggggagctggggggacaggggaactggggtccggaggacgccccaggcctcttggccagggcctccctgatcatgctcccgtggccactacccctggcctcctcggccctcaccttgctcttcggggccctcacttccctgttcctctggtactgctaccgcctgggctcccaagacatgcaggccctaggggctgggagccgagctgggggtgttcgtggtgggcctgtgggatgctcggaggccggcgggccaagcccagggggtcctggggatcccggggaaggacctaggacggaaggcctagtgagccggcggcttcgggcctacgcaaggcgctactcctgggctgggatgggtagagtgaggcgggcagctcagggtggcccaggccctgggagagggccaggggtcctaggtattcagcgcccaggcctgcttttcctaccagacctgccttcagccccctttgtgccgcgggacgcccagcggcacgacgtggagctcctggagagcagcttccctgccattttgcgggacttcggggctgtgagctgggacttctcagggactacccctccgcctcggggctggtccccacctctggcccccgggtgctaccagctcctgctgtaccaagcaggccggtgccaacccagcaactgccgccggtgcccgggggcctatcgggcactgagggggcttcgaagctttatgagtgccaacaccttcggcaatgccggcttttccgttctcctgcctggggcccggctcgagggccgctgtgggcccaccaatgcccgggtcagatgccatctgggtaagtagctgccgcctactgacaacctccttgcctcgatgatttcccccccagacccttctctccgccagagccgtctgctgtctggttctcattgtgcctctcttcttccatggctccctgttgccacccacagcagcatttcctcagcctcggttatctgcacaccaccttcata

SEQ ID NO: 6966 - DNA, 6000 bp, Homo sapiens
tttgtaatttcagagcaaaacaaaagaatttggttggaactgctctacagagaatcaaagaaatcagcctgaattatctgatcttaactgaattttcaaaagactgtctaataccttctaattaccacaagccagcttgtccttttccagccgcctggcagtacagatgatagataatccgtctgaaaaaggcttcctcagggcagtgacatctttccaggttgaacgggatttcttcaccgcacagggagagtctgaagatccttcccaatttcttgtaaacgaatatagttccttcactctgttgtgttttaaatatttttatgttttggtttgtttgtttgtttgtttgtgtataaggatagggtatcactctgtaacccaggctgcaggacagtggcctgatcacagctcactgcagcctctacctcctggactcaagtgctcctcctacctcagtttcccgagtagctaggactacgtgcgtgcaccagcacacttggctaattttttatttttatttttagtagacacaagggtcttgctaagttgcccaggctggtctcaaactcctgagctcaagcaatccgcccactttgacctcccaaagggctgggattacaggtgtaagccaccatgcacggccaatattttttgttttttaatggtagtttaatttttttttttttgagacagtcttactcctgttgcccagactggagtgcaatggcgtgatcttggctccctgcaagctccacctcctgggttcaagtaattctcttgcctcagcctcccgagtagctgggattacaggcatgcgccaccacgcccggctaattttgtatttttagtagagatggggtttctccatgttggtcaggctggtcttgaactcccaacctcaggtaatccacccgccacggcctcccaaagtgctgggattacaggcatgagccgtggtgcccagcctattttttatttattttttattttttgagatggagtcttgctctgttgcctaggctggagtgcaatggcgcgatctcatctcactgcaacctctgcctcctgggttcaagctattcttctgtctcagcctcccaagtagctgagattacaggcgtgcaccaccatgcccagctaatttttgtatttttagtagaggcagagtttcaccatgttggccaggctggtctcgaactcctgacctcaggggttctgcccaccttggcctcccaaagtgctgggattatacgtgtgaactactgcgcctaatttttttaagtggtaaagttatacatcctcattgtaaaaaaaaaaatgcagaccatatagaaatgtataaatctcattttacagagctaaccactgtttaaagtatggttgtatatcctttccaatttaacaaatatatacatatatataatttcatgtttattttttattgagatacaattcacataccataaatcaccattctaaggtatacaattcaccaggcacagggctgtaatcccagcactttgggaggctaaggagagaggatcagttgagcccaggagtttgagacctgcctagacagcatagtgaaaccctgtctctacaaaaaatacaaaaattagctgggcatggtggcacacacctgtagttccagctacttgggaggctgaggtgggaggattgcttgagtcagggaagtcgaggctgcagtgagccatgattgcaccactgcactccagcctgggtgacaaaacaagatcctgtctcaaaaatttaaaaaaaagaagtatagaattcagtgatttttaaatagattcacaaaattgtgcaatcattaccacagtctatttccagaacatttcatcacctaaaatgaaaccctatgcccattagtactcgctccctagcctccatttccccagcaagcaccaacttgctttctgtctctctagatttgcgttctggatatttcacttaacggagtcagactatatgtgacttttttttttgctggcttctttcactaagcatattttcaaggcttactcatattgtagcatgtaccagtactctactttttttttttttttgagatggagtctcactctgtcacccaggcaggagtgcagtggcacgatcttcgctcactgcaacctctgtctcccgggttcaagagattttcctgcctcagcctcccgagtagctggaattacaggcgtgtgccaccatacccggctagtttttgtatttttagtagagacggggtttcaccatgtcggccaggctggtctcgaactcctgacctcagctgatttgcctgccttggcctcccaaagtgctgggactacaggtgtgaatcgccagcctgattcttttttacaggcaaataatattacattgcatggctataccttattttgtttatccatttatcagctgatagacatgtaggctgtttccagtttggggctagtgtgagtcattattcatactgctatgagcatacatgtataagtttttgtacgaacatatgatttcaattcttttgggtatatacctaggaggagaacttctgggtcatatagtaactctatgtttaacgttttgtttttgtttcctgagacggagtctcactctgttgcccaggctggagtacagtggtgtgatcttagtttactgcaacctctgcctcccaggttcaagcaattctcctgcctcagcctctcgagtagctgggactacagggcgcaccaccacacccagataatttttgtacttttagtagagacgggattttgccatgttgcccaggctggtctcaaactcctgacctcaggagttctcatgtcagcctcccaaagtgctgggattacagggatgagccaccatgcctggcctatgtttaactgttttaaagaactgttgggctaggtgcggtggctcacgtttgcaatcccagcactttgagaggctgaggcgggcaaataatttgagctcagaaattcaagaccagcctgggcaaggtagagagacccccatgtctacaaaaaataaaaaagtagtcaggtgtggtggcccgcacctgtagttccagctactcaggacgctgaggtgggagaatgactcgagcccgtgaggttgaggctgcagtgagccgagatcacaccactccagcctaggcaagagtgagaccctctctcaaaaaaaaaaaaaaaaaaaaaaaaaaaaagaaccatcaaaatgttttgcacagcagtcacgccattttacatttctgccagcaatgtgcaccaggcttccagtttcttcacatcttcactaactcttatttcctttgctttaaactctaaccatcaaagtaggtgtaaagggtatctcactgtggttttgatttgcatttctctaatgactaatagtgttaagtatcatttcatgtgcatgttggccatttatatgtcattggagaaatgtctactcaaaccgtttgctcatttagaaacttaggtaggttggtctgagtgcagtggtgtttaaaactaatttttttttgagacaaagtctcactctgtcgcccaggctggaatgcaatggtgagatcttggctcactacaacctccatctcctgggttcaagcaattcttctgcctcagcctctcaagtagctgggattacaggcatgcgccaccacgcctggctaatttttgtatttttggtagagacgggggtttctccatgttggccaggctggtctcgaactcttgacctcaggtgatccacctgcctcggcctcccacagggctaggattagaggtgtgagccaccgcaccaggccgtttaaaactaatggagcacaaccagttaccaatatctttgttccttctccactccctctgcttcacttgactagcctaaaataaataaatttaaaaaactgggcacagtggctcacacctgtaatcccagcactttgggaggccgaggcaggaggattacttgagcataggagttcaagatcagcctgggcaacatagtgaaaaaccatctcaaaaaagaaaaattagccaggcatggtggcatgcacctgtggtttcagctacttaggagcagaggtgggaggatcgcttgattctgggagttcaaggttgcattgagctgtgatcgcgccagtgcactctcgcttgggtgacagagcaagaccttgtctcaaaaaatttaaaacaaaacaaaaaaaactggttatttgtctttttattgttgaattataagagttttaaaaaatatattctggaaacaaatcccttattagagatatgatttgcaaatattttctccaattttttttttttttaaagacaaagtttcactttgtcgcccaggctggtcttgattcctggcttcaagagatgctcttacctccacctcctgaagccccaaagggctggaattacagccagtgagccactgcacccagcctccaattctttagattttacattttagaaccaaaatgggttaaatacactgttctgtaatctgctcttttctttaatagtagttcatgtacatctttcaaggtccagagaaagctctcactttctccccgttttatttttccttccctcattctttttcactgctgcatagcattccattgtaattttgccactgtttattagaccagtcctctgctgagctttacagagcccttagttgggatgttagtgagaaaccatgacagcagtggagactgtcatctccctgacatgctgtcagcttttggatgatgtgaaaatgcaagcaggcacaggaaatgtctctaacttgcttacacttcctccctgaacccctgcggtttcacaactcctgcaggcacacctccctccccgcctgccagtgtcaccagcctgttgcctctgtgagaaagtaccactgtaagaggccaaagggcatgatcattttcctctttcaccctgtctaggttgccagcaaatcccacgggcctcctgacgctgcccctggggccacaggtccctcgagtgctggaaggatgaaggattcctgcatcactgtgatggccatggcgctgctgtctgggttctttttcttcggtaggcaagggaggaggcaggggaagggacatgtgtctgtgaccagagaaactgcagggcttggtgcagctggagtaaacaaggagctgccccctaaaagtgggattggccttagggatatggggcccagggatcttggaaggagaaaggggagagtggggaaataaaagaaacaaataagcaaggggtggaggcaaagacagagaagggagcataagaaggggcagtgggttctttaaaaagacagatagggccaggcgcggtggctcacgcctgtaatcccagcactttaggaggctaaagtgggcagattacttgaggtcaggaatttaagacagactggccaacatggcaaaacctcgtctctactaaaaatacaataaaattagcttggcgtggtggcacaggcctgtaatcccagctactcgggaggctgaggcatgagaatcatttcatcccatgaggcagaggttgcagtgagccaagctcgtgccaatgcactccagcctgggtgacagagcaagactctgtctcttaaacaacaaacaaacaaaaggcagatagttattgagtagctagagctgggaggagggtgctgggttctggggccacctctgcgcgttttaggcaagtcctttcccctttccagccccacacccttcatctaaacaaatgaaggcccagcctccatgacattctaggatgctctgaactaaactccatgcggggagagaaagcagggcggaaaggacagctgggtgtgccagggcgcctgggcaggctgactgagggggaagggagctgggatctacagatgctccgaaagactggcccggtggggtggggaggcagccccccagggatcaggggagctacaatctgagactgtggg

SEQ ID NO: 6967 - DNA, 6000 bp, Homo sapiens
cacctgcatctgtgccccactctgtctgcctcccctctggctccaagccatcttttctctcctcctggtgcctcttttctgccttccaaagcatttctggcaggaacgatggggctggggcttcctcccctgtccctcacctgggtatgctcagcggcgtgggccccgccctctcctttggctgggacgcaggtggccagagaggagccgttctcttccttaacaccctgcactcaccaacctgaccaccccaaaacgcaagcggcggccccaggatgggccccgggagcaccagacaggctcagcccgcagcgaaggctactaccccatcagcaagaaggagaaggacaagtacctggacgtgtgcccagtctcggcccggcagctggagggcgtggacactcaggtgggcctaaccccgccgccgcgtcctcctgccactcacttccctgccctgctcacctcctccctgccgtgtgtctcacaggggacgaaccgcgtgctgtccgagcgccggtccgagcagcggcggctgctgagcgccatcggtacctccgccatcatggacagtgacctgctgaaactcaaccagctcaaggtgaggctgggctgcaggaggggctgggtggggtggggtggggcaggaaggggcagaggccaggggaccacccagcaggctcctgtggttccctcgggtggagttggggggtaagcagccagaacaccctctgcccaggaagtctgtgggaagagtgagggtctggggtgtgggaggtgtctggcagttgagtctcccttctgccccccagttccggaagaagaagctccgatttggccggagccggatccacgagtggggtctgtttgccatggaacccattgctgctgacgagatggtcatcgaatacgtgggtcagaacatccgtcaggtgaggctgcactcccagccccgccccggcttctgatgcaacaagacagcatgggggctcacacacatgctgtttgtccggttaaagccttgcacactccctaaccccggtacctagccagtgagaccagcctccctccggtgtggtcagcaggtgtcagtggtccagcaggaggcatggctgatggcactgctccctttctttttttgttttgagacatagtctctctctgttgccaggctgtagtgcagtggtgcgatcttggcacactgcaacctctgcctcctgggttcaagcgattctcctgcctcagcctcccgagtagctgggactacaggcgtgtgccaccatgcccagctaatttttgtatttttagtagaaatggggtttcaccatgttggccaggatggtcttgatctcctgatcttgtgttctgcctgccttggccactcacaagtgctgggattaacaggcgtgagccatcgcatccagccaagcgctgctccctttcaaagggcctgggaagcgggaggacaggcactgaacaagtatccacacagaaggatggtgttccagcctgagcaatattgccagaccccgtttctgcaaaaaatacaaaagctagccgggcgtgggggtacatggctgtggtcccagctacccaggaggctgaggtgggaggatcactcgagaccacgaggtggaggctgctgtgagccaagattgcaccactgcactccagcctgggcaacagggtgagaccgtgtctctagaaaaaacaaaagccaaaaggatggcatttggtattaacaagatcttaacaagatctggggagttgggctatgggaacacacacctggggggcctaagaccttccagagaccatggtgcttgagtaaagctgaaaggagctcgcaggcccagacaagtggtagtgtgtgtgcgcttggttgcgagacaccatgtgcacaaacctggaggcacggtcgtcttgtgagagtgtggaggtcagcttggctcattagaaaccagggccatggccaggcgcggtggctcatgcctgtaatccgagcactttgggaggctgaggcaggcagatcacctgaggtcaggagttcgagaccagcctggccagcatgctaaaaccccgtctctactaaaaatacaaaaattagccaggcgtggtggcaggcgcctgtaatcccagctactagggaggctgaggcaggagaatcgcttggacctgggaggcagaggttgcagtgagccaagatcgcgccattgcactccagcctgggcgacagagcaagactccgtctcaaaaaaaaaaaaaagaaaagaaaaaacagggtcagtggcagcgacgtgtggctggagggaacagagagcccagaccgcacgggcttgggagcctgtgaatccacttgggcctgtggtgagagaggaggaaagtcccggagctttcttcaggagagggtccttccgcaggagagggtccttccgcaggagagggccccatggctagtgagctccatgtctaggctgacaccagtatccaggcaaaggcaagggtggcccgacccaagcagtggcagcagaggtgacagagaggaggctttgggtgcaaggtggttggctgggctcagcagtgagagggtgagggggacgggaggccctctctcggtgctgctcttagctgctgggagtatgatgggagggccagtgagatgggtgtgaggaggaagaacaaatatatggtcaagatgagctccagtctggacatgtggggttgcaatgccccagggacatctaggggatgacgcccagcagctccactgaggtggcttttggctggaaatggaagtttgggaggagtccccaccacatagctggcggctgaggctctggaagggagtgaggtcacccgaggagggcgtgcagaggctcctcactgtcttctgggaagtaagggttgctcctcacacggaggtgcggggcctgacatgggcggcctgccatttgcattagccggtggcagccaacaggtgcctgttttggagagaggtccagggaggagagatgagcagggtgccgttggtgacatggccagtcatttcaggagctgccccaaccccagacttgccccagcagtccgggaccccactgtgaccaggcagatgctcgaaggagtcagtggctctcttacccagtgcagatttccctggagttccctgcgggtgacttagaatggccaccagaggcttaggatgctgccccaaagagggagggctcctggaagcagagtcgagagagtcagtgccgggttagcgggagctggaggcagagctgcagctccaggcctggtgggcgtggacctggggtgctggctggcaggcgtgctcaggggcaggaagtgggggactcttccctgaccatcgcatctcaccctggcagatggtggccgacatgcgggagaagcgctacgtgcaggagggcattggcagcagctacctgttccgggtggaccacgacaccatcatcgatgccaccaagtgtggcaacctggccagattcatcaaccactgctgcacggtgcgccaggggccagccggggcaggagttgggggtcggtgggggtggccacggctcacacgcccttccatccgcagcctaactgctacgccaaggtcatcaccatcgagtcccagaagaagatcgtgatctactccaagcagcccattggcgtggacgaggagatcacctacgactacaagttcccactggaagacaacaagatcccgtgtctgtgtggcacagagagctgccggggctccctaaactgaggtggggcaggatgggtgcccacacccctatttattccccctggtgccctgagctcccagcacccccccagccttagtgggctcagcagggcccacatgcccccatctccaagcgtggggttgggggccccaagcccagcgagggagcctcagtccctggaggcagcttctgcctctcctgtcacccctgcccaccaccccctgattgtttttctttgcggagaagaagctgtaaatgttttgtagcagccagcagctgtttcctgtggaaacctggggtgccggcctgtacagattctgtcctggggggctacacagtcctcttgctttgtgttaatggggacttccccttacgccctgcgtgtacccctccccagtttaggggtctctggggcagtggccatgttctccccctgggggggctctgcacccccagtcctggggactccgtgcctggaaccctgcctcatctgttcctgccagaccctgagggtcacccttccaccctggtgtcactccccggctcagccaggccaggatggcggggtgggtcccttttgctgggctggactgtacatatgttaatagcgcaaacccgacgccacatttttataattgtgattaaactttattgtacaaaagtgtttggtcggtgtatttgggcaggagcgaggggttgggggtagagggcacggagggttgtgcaagttgaagagagggaaaagtgggtacctgaagtgtggggcaggtaaaggggccttcaggcaagagcccagacctgcagagacagtccgagactgtctcggaccccctgacaggctgcagcagccgcacccgcaccaggaataccccaccagtgcccgccagggtggtgccaaggtcaggcctccccttcctacaatcacagctgcagctggacctccggcctcctgggaagcccagcaggagggaaggcctgaggtcacactgtgggatgaggtcaccgctggctccacccacagccccagaccccttcagcccactctgcaagttcgagcttcatccccaccaagttctccgctggacccagatgccagtggagcacagagcggccgccagggggcgccttggggcaagagtggtgggggttgtggctgggcgggtctctgttcctggaatggggcaggagggagaaggaggagccagcggaaggacggtgtgcgggccggccagccctggacgaaagaagagggcccctccaggccagtctgggcaccctgggatagcggctgcaggtaggcagaggcgctgccagtgcccaggtggcctttccctccatccggcccttcccaccttcctataaccttccctccacctccctcaactcctggcctccccacccttttactgccttcaaatctctctccctaaaccctgaccccttcctgcaccccaagcccgcccctctctccgtaactcagccatcagcaggggcagacggcaggtggcctggttgctgcagctcccaggatcagctctgccctccccgcaaacgccagcctcgtcaccgctccagggcacctccagcagtaacaggtggttgcagcaggtggcagccagcccctggatgagccaaggtctcttccccagccaggcatggccgactctgcacaggcccagaagctggtgtacctggtcacagggggctgtggcttcctgggagagcacgtggtgcgaatgctgctgcagcgggagccccggctcggggagctgcgggtctttgaccaacacctgggtccctggctggaggagctgaagacaggttcttgttgggggagcttgtggtggagagggtgtggacgcttccccaacccttcccaagctgggatccccacccctgcagtggaacagatgatgctggtttctgtccacatggatgggtcgagtgagtcacattgggaacgtgactccagggtggaagatgaacccagcctctggcctctggccccagctctgacatggcctgtgtcctccaaccccggccagggcctgtgagggtgactgccatccagggggacgtgacccaggcccatgaggtggcagcagctgtggccggagcccatgtggtcatccacacggctgggctggtagacgtgtttggcagggccagtcccaagaccatccatgaggtcaacgtgcagggtgaggagctctggacactcctggccatcttgcctgtttgttcccca

SEQ ID NO: 6968 - DNA, 6000 bp, Homo sapiens
gcccggctaattttgtatttttaggagagacggggtttctccatgttggtcaggctggtctcgaaccccggacttcaggtgatctgccagccttggtgagggccgggaacggtggctcatgcctataatcccagcattctgggaggccaaggcgggtggatcacctgaggtcgggagtttgagaccagcctgaccaacatggagaagccccatttctactaaaaatataaaattagccggcttggtggtgggcacctgtaatcccagctactcgggaagctgaggcaggagaatcacctgaacccaggatgtggaggctgcggtgagccaaaatcacaccactgcattctagcctggtgacctggagagactctgtctcaaaaaacaacaacaaccaaaaaaacaaaaacaaaaacaaaaacaaaaaaaaatgagaactgaggtatagaaaggttatataacttgcctcctagagttattacagtgggtgaatgggctgggattccaacccaggtcatctggctcccatgtggataggtctggacccacaggtagaggggacaagacaaattgccaagcctcaggactgggtagagcaagacaggatcaacaacctctccagtagttggctccaacctagcaggtgtgggagaggacctgtgacaggggcgggagaaggcttagtggggccggcagtccacccactcctcccccaagacagtccaaagcaataggtgacagcaagcccccaagggtgggtggaacacgggaagccaccccagctggtattttccttggatcatagtgtagaagttaagaaacacaccccaccccccaacagctgcacagtctggagcgaatatacacgcccaccacccacacacccaagacccaatacacttttttaaactttatttttacttctatttatttatttttaattattttttaaaaatctaattagagatgaggtcttaggctgggcacagtggctcatgcctgtaaccccagcacttcgggaggccgaggcaggcagatcacgaggcgggaggatcacgaggtcaggagttcgagaccagcctggccaatatggtgaaaccccatctctgctaaaaatacaaaaatgagctgggcgcggtggtgtgcacctgtaatctcagctacttgggaggctgaggcagaattgtttgaactcaggaggcggatgctgcagtgagctgagatcgtgccactgcactccagtctgggagacagagcgagactacgtctcaaaacaaacaaacaaacaaacaacaacaacaaaaacagagataaggtcttggcatgttgcccaggctggtctcaagtcctgggctcaaaggattctcctgcctcagcctcccaaagtgctaggattacaggcgtgaaccactgcacccaccctacttttttttttttttttttttatacaggatctcactctgtcacccgggctggagtgcagtggcaagatcactgctgactgtacccttgacctcagggactcaagtgatcctcctgcctcagcctcctgagtagctgggactacaggagagcgccagcacacctgggtaattaagattttttttgtagagacagacgctatgttgcccaggctgctctcgaactcctggcttcaagtgatacacccttggcctcctaaagtgctgggatcacaggcatgagccactgcacctagcctaatatagttaatatccccgtcaaggctgctcagagggcctgagaggaacaaagggctcagctctggagagctccacccccagcgccaatctctctaaatggcctctttcctctccatattccaccacaaggcttggagtccagcttcctgtgaccttaagtcaccattccaaagccctgcgatctcacccagagaccacaagtgaaataatattataatcctgagaagtttagtggaccaagatggcatgccatcaagacgctgagaaacaaagaggaagatgggaccagggggcccagaagacgctggaacccacagtattaaaagctcagagaggctgggcacagtggctcacacctgtaatcccagcactttgggaggccaaggtgggtggatcacttgagcccaggggtttgagaacagcctgggcaacatggcgaaacccagtctctaccaaaaaatatacaaaaattagccaggcatggtggtgcgtgccttagtaccagctacttgggaggctgaggcaggaggattgactgaacctgagagcacaccactgcactccagcctggatgacagaaccagacctgacctcaaagagaagaaaaaaaaaaaaaaaaaaaagcccagaggggagggtaccctcaacagttttccagccccttccacatccttcctaacctcacttgatagtgttcaagtcctaccttaggcaaggcagaaattataggaccaagccgccaaatggggaaattgagtcccagagagaagtaatgcattatttaagatcccatgcaggactatgagtcaggggtccaagagcccttccaccgtgtgccactcagagacacagagtaggagggggaagggggtcgggtggcaggggacaaaagatgcaggaggcaagcagcagtgactgaagaggcagaggctgacatgaaagacccaggagcagagaatctttccttatcatctccaggggacaccactgggcagggcttggcctccggaaaaaccctgcattccctctgtgggttcatcagggcaccactctcctactagctgggttttttttttttgttttgttttgtttttgagacagagtcttactctgtcacctaggctggagtgcaatggcgtgatctcagctcactgtaacctccacctcccatgttcaagcaatcctcctgtctcagcctcccaagtagctgggattacaggcacctgccatcatgcctggctaatttttgtatgtttgtagagacagggtttcgccatgttggccaggctggtctccaactcctggcctcaggtgatctgcctgcctcagcctcccaaagtgctgggattacaggcatgagccaccacaccctgcctgagctgggttttaacaggaagaggagaagagccaaaactcctcacatagaatcacacagcacttgacagtttccaacctcatcatcactgaagtttagagcagccgatacccataaagatgatctccccatccccctacagttacccactgtgcagagggagatccacacttagagacaggaagcgatttccagaagtccatagcaactcagtcccaggaatctaggtttcctgaccagggcatagcagaaagggtccattcctttccttgcttgtaccttcacagaagcttcctggacagagccctggggtccaggagacctgttattcattcccggctatgctgagacttgctgagtgaccttggggactccttctagagaatataagttccacgagtgcaggaatttttgtctattagtccttgatgtatctccagccctagaacagtgtttggcccatactatgtgcccaaaaaatatccattaaatgactgaatgttgctgtgcatggtggtgcatgcctgtaatcccagcactttgggaagctgaggcagaaggattgcttaagcccaggagttagagaccagcttggacaacatagtgagaccgcatctcgtaaaaatttttaaaaataaaaaatgagtgaatatctagatagccaggattagagaagtgtcacagtcagaaagcctgaagcctaaagaagaccaaggaaccaggggctttatcctcagatacatgaaagcctgaaattctgtccacaagtatttatagagggcccgtaatgttcttggtactgggctaggaactccccagattcagttaagaacaaagtcattacctggcctcagatgcaaggcaggggctggggggtgtgagtggcagggaggcagcgtgatcaatacaaacacttttcttagcctgagctgccctgacatggtctgacggctcacaaggtggtgagtgcagccgggctgcagtgttcaaggagggcgccggctggccgcccacctgtcagaggctgcgccagaaggatgcggaagaagagatttctgccttggctgaggtcacttcccacccccagattccctgcccacacaaccctgcaattttctgacgctgacgactcggatcctattatttcccgattttcaaggtcccatgatgctgacagccccaaatgctaagtcgtcagtccgcccacgccctggacccgaaagcaataaaggcgaggtcagcaagggtcctaccacccactgcctcgaaaggcctctgggggtggtcggcgcgcccctccccacctcgcgggggccgtgtgggcgtcgctcggtcgttggggtgccggggacgtcgtgatgagaacggcgtcccagagacggcggtgacagagccgggacacgtgacagtcacagggtcacattctgcggtccacgagtttgggaccgggctggtcacgtgacgcggtgggggcaccatggggtgatgtgagatgcgggtgtctcggattacgtacaaatgacgtattcctaccccttttggcaaccagatttccgttggaagatgcaacggttccggtgacggtagcaagttctcgcgtccaggcatctccgcttccgctcggggcgcaacaacttccgactccaccttcccagcctcgggcaaggaagagacgcgaccatgtgcgcatgccccgaatttatcacggaggggcggggctgaggctgcgggagctggagcggggaagaaaagggaattccaacctgtggaaccttggggggtccccggggtcggcgccttcccattgactgtgggcggtgcaagggacggagcctctggcggctcgtgggggtgttggggtccgcagggggagggaggggagtgtcagagtgtgagcggggtacgggaattccaaatttgagggcctcccggctctggcgccggggagggagagctcaggccgccatgcgggacaggacccacgagctgagacaggtgagacgccagggcagcggggatggggacgggcggacgaactggaacgcaggacttctggtcttcgggatagggaggggtggctgatggccaggaaggaaagtcccggaagcctgtgggtcctgcggggtaagagccgcagcgaaacggtggtgccaatgactccgggcctggcagggggatgacagctcggacgaagaggacaaggagcgggtcgcgctggtggtgcacccgggcacggcacggctggggagcccggacgaggagttcttccacaaggtaaggggctggggtctccgcctggattcgcgagggtgtaggaggacccgaggagtagcgtggtctggagtaccccatatctctttcagccctctcggtcaccctccccaggtccggacaattcggcagactattgtcaaactggggaataaagtccaggagttggagaaacagcaggtcaccatcctggccacgccccttcccgaggagagtgagtgaaaccccggctgcagggcgcatgctccgccccagggattgtgggggttgtagttccacgcaggtggtggccagagtggtttgttgaggtgggggctgctgtttgggagtcttggccttctcttattcaggcatgaagcaggagctgcagaacctgcgcgatgagatcaaacagctggggagggagatccgcctgcagctgaagggtgagctcctgggacctcagacagatccttccctctgatcctgccctgttgttggtatatctggggagtgtgtggcccagagaagccagtgatatatccaggtcacacagcaggcctgggtctagcatctgtctcctggcctccaggccattgtactctccacagcacaagtccgcctctcaggttcttttatttacaatgaaaccat

SEQ ID NO: 6969 - DNA, 6000 bp, Homo sapiens
gatctcaggtgatccacccacatcagcctcccaaagtgctgggattacaaacgtgagccatcatgcccggccagtaatttgtttaattacatatcttttataagctctttctttcttccttctttttttttttgagacaaggtctcactctgttgcccaggctggagtgcagtagtgtgatcatggctcactgcagcctccaacacttgggctcaaaatgtccaagggacattttgcgaagtgcgttttcagggagatagtttgatttcccacacctgtttgatacatattaatgtttaattaattaattatttatttaattaaaaaaatttaagagacggggtcttattatgttgcccaggctagagtacagtgtatggtggcatgatcatagctcactgcaacctcgaccccttgggtgcaagtgatcctcctgcctcagcttcctgagtagctgggactacatgtgcataccaccacactagataattaaaaaaaaattttttttaagagacagaatcttcctatgttgcccaggttggtcttgaactcctgggctcaagcgatcctcccactctggactcccaaagtgctggtattacaggcagtgagccattgtgcctggcattagctccttcttttcctcactttcccaccagtgtttccggaatcaccttccagataaattacttacacttgaagccttgtctcagagtccacttataggggaaatcaagctaagattttatcaagagtggggatgggggacaggtaggagggaacagccaacagcttatagatatgtccccacccacggtcaccaggtcaggtgcacacttggtggtggctcattgagaaagcctctgcaggttggacagccagtctgagatcttgcctatgtttttacagagagtggacccttggccactgttcagggcaaggaggggcctccacgtctgagttcgagcagcccccatagtggccagagtgtgaaaacttttcccaaagcaaacccagctgatctactaaactcctccccgggcaccctggttggtatcttctcatcttgggctcatgacttcgttcgtcctttcctcagcttctttacctgctaacaaatacaggtaacctgttgttttaaattatctattggtattttttatgattatgagtcttttttttgtataaaggtcttttttttttttctctttgagacatggtcttgctctgttgcccaggctggagtgcagtgttgaggtcatagctcactgtagcctcaaactcctgggctcaagtgatcctcttgccttggcctcccacagcattgggatcacaggcatgagccactgcacccagcctatataaatattttaagtacaaatgatatagaaaagaatattaaagtcatcttgtagcagattgaatacaaccacaaattcctcccattgggaggtgggatctgtgtcccctttgcttgaatgtggatgagctctgtgactgcctgatcaatggaatgtggtgcagatgacttggcgccagtttccagatcaagaccttagtagcctggaaatttctgcttcctgtctgttggaacacttgctcttgaagtccagccaccatgctgcgagaagcccaagccacatggagagggcacgtgggggtgcccaggtgacagccccaactgagctcctagcccacggccaactgccagctgtgggagtgacccattttgggagcccagcccaactgagctttggattactctagccctggttgtgatccgactgcaatcatgtgagagaccccgctgagaactgctgaggccaggagattcacagatacgcgagagattataatatgctgctgtttttaactatgaagttttggagtagctcgctctgcagcaatagatactggaacatacctgtaatcctcctatcttggagataacgactattaacatttggttttcctgcatatatatatatatatatatatatatatatatatatatatatatatgatttatttttgtatgtatgtacttatttatttaattttaattttttattttttgaaactgagtcaagctctattgcccaggctggagtgcaatggtgcaatctcagctcactgcaacctccacctcccaggttcaagtgattctcctgcctcagcctcccaagtaactaggattacaggtgcctgccaccacgcctggctaattgttgtatttttagtagagatggggtttcaccatgttggccaggctggtcttgaactcctaatctcaggtgatcctcccacctcagcctcccgaagtgctgggattacaggcgtgcctgtatatattacatgccctgcctatatatattttagagacagggtctggctctgttttccaggctggagtgcagtggtgcaatcatatctcactgcagcctcaacctccttggctcaagcgatcctcccacctcagcctgttgagtagctgggaccacaggtgtgcatcactatgcccagctaatttttaaacatttttttgtagagtcagggtcttgctgtgttgcccaggctggtcttgagttcctgagctcaaatgatccctctgccttggcctcccaatgtgctgagattacaagcaggagtcaccacacctggctatatataaaaattataaacagataatttttaaccaaatgtacataattttaattgcttttttttttttcagccagcaagcatttttttccatctagttatcgggaaagtagaactagaggcaaaagaaaatgtgttgaatggtgaaaccctgtctctactgaaaatacaaaaaattagccaggcgtggtggcaagcacctgtattctcagctactcgggaggctgaggcaggagaatcacttgaactcgggaggcagaggttgcagtgagctgagatcacgccactgcactccagcctgggcgacagagggagactccgtttcacaaaaaaaaaaaaaaaaaaaaaaagaaaatgtgttgagaaagagtgaaaaaaatcattggcttgagaatcacattggcggtcacataaaggtgaggtttgtgttccatgtatgtgtggaaggatacctattttcctgtgcctttgaaaacagaattaaaagtgacagacacaggggagggtaaggatatatcacagagtgaagtatcattgaaccattcctctgttgaatattcaggtttttttagcttttcatattaacaataatgctgcaatgaacaagcttgcaaatatatatatatatatatatttttttttttttagagataagagtcttgctctgtcgcctaggctggagtgcagtggcacaatctctgctcactgcaacctccgcctccagggttcaagtgattctgctgcctcagcctcccaggtgggattacaggtgcctgccaccacgcctggctaatttttttgtctttttagtaaagatgaggtttcaccatgttgggcaggctggtttcaattgctgacctcaagtgagccaccccgcctcagcctcccaaaatgctaggattacaggcatgagccaccgcacccagccaagtttgtacatatatttttgactacacttcttaactattcttaggataaattactagaagtgaaaattcttgggtgaagagcttgaggcctttacacacacacacacacacacacacaaaaataggctggatgcagtggctcacacctgtaatctcagcagtttgggaggctgaggaaggaggatcacttgagtccaggaggttgagaatagcctgaacaacatagcaagatcttgtctctacaaaaaatttaaaaaaaattagctggccatggcagcatgtgcctgtagtaccagctactcggaaggctgaggtaggaggatcgcttgagcccaggaggttgattgaagctgcagtgagctgtgattacaccactgcactccagcctgggcaacagagctagactctgtctctaaaaaaagcacaaaataatatttaaaaagcaccaggtatgcctgtacttgagttgtctttgttgatggctacaaatgaggacagctctggctgaagggcgcttccatttccatgggctgaaggagggacattttgcaaagtgtgttttcaggaagacacagagttttacctcctacacttgtttgatctgtattaatgtttgcttatttatttatttaattttttttttgagacagagtctcactctgtcacctgggctggagtgcagtggcattattgaggctcattgcagtctcagactcctgagctcaaacaatcctcctgcctcagcctctggagtagctaggactacaggcatgtgccaccatgcctggctaattttttaaatgtatttttttgtagagtcggggtctccctatgttgcccaggctggagtgcagtggtgtgatcctagctcactgcagcctggacctcgggctcaagtaattctcacacctcagcctgtccagtagcaggggctacaggcgcgcaccaccatgcccagctaattaaaaatatttttttgtagagacagggtctctctatgttgcccaggctggtttcaaactcccaggctcaagcaatcctcctgccttggcctcccaaagtgctggcattacaggcgtgagccactgcgcctggcccgtattaatgtttagaacacgaattccaggaggcaggctaagtctgttcagcttgttcatatgcttgggccaacccaagaaacaagtgggtgacaaatggcaccttttggatagtggtattgactttgaaagtttgggtcaggaagctggggaggaagggtgggcaggctgtgggcagtcctgggcggaagaccaggcagggctatgtgctcactgagcctccgccctcttcctttgaatctctgatagacttctgcctcctacttctccttttctgcccttctttgctttggtggcttccttgtggttcctcagtggtgcctgcaacccctggttcacctccttccaggttctggctccttccagccatggctctcagagtccttctgttaacaggtgcatgggggtggggtgggggactctgggtggggaggagggtaacttttgggtctgtcataaatagagggcccagaatatgtaggagtcagtctggggagaggcaaaggggatttggggaaggagaaagggttcaagaagaagcagggagaacagctagacccagacaggctggccagggaagcctggatgaatgaccacattcatggactgtgcaaggctgcttgccggtccccttgcttcacacatgaggagacggaggcccagggaggagaagtgacatggctcagggtgcgcagcaggtgtgagacccctttcctgagtgcttcctcctggatcccctctcaccatctccactttgcctccggttctattttccaaggtcccgggtgcaaatgtttgttgaatgactgatgaatgaaaatgatttgagtttgttaccttttatgcttatatgttgtggaaaatgaaattctcctcaaaagggaaggaaatacttgagagctgcataggaaggaaattatctaattaagaatgtatagaaacttcactgttgggcaaatcatcgttgtgacaccgggggaagaagccatttaggtgctcagaagggaggctggaattcagagcaggactggacgtgccccacgacggtggttcttaggtcaggagtcagcaaacagtggcctgggggcccgatatggcccacgacctgtttttgcacaacctgccagctagagattgaagatgaacactgataatcgatttgatgatagggagcaccacccccaaagaattctatttgtctcatttgtaaacccgtattacaaacaaattgtactcaatcattatgtttgaaatttccctaatgacaaatttgtggaaaagtattttctgtcttgttatataagtacttgtac

SEQ ID NO: 6970 - DNA, 6000 bp, Homo sapiens
agtgtgtggaagccagcagtccctgcccagcccctggagcaccaggcactgcctaattcatctcaagcctctccctctgcgattcatcaagcagagtcactgtgctgtctagtaaaacttctggggtgtaatctccttctggggtgtgactccttgagggctgagaccctttcctgtttgtcttgcttctcacagtggccagcccagagcctatgtcatgtgggcagcccatgcgtgtgggatgagtggttgagggaacaaatatgacacaggcagcgtttagggcagagaggaggaagtaaagtcattagccaaatagtcaagactccagcaccttgagtcctgtcctcagcccacactagctgggtgacctgaggaggatgacccaacttctcagggcctcagttttgcatctgtgaaacaggggtgacagcagtccccgtcgcggggctgctgtgagggttcaattagctagtataaataaagtgcaatagcaaagacgtagaatcaacctgggtgcccatccgtggtggattggttaaagaaaacgtgctacacacaccacggaatactatgcagccatgaaaaagaatgaaatcacgtcctttgctgcaacatggatgcagctggaggtcatagtcctaagtgaattaatgcaggaacagaaaactaaatactgcacattctcatttgtaagtgggagctgaacgttgggtacacatgtacataaagatgggaacaacagacactggggtctccagaaggggagagggagggaagggagcaagggctgcaaaaccacctatcaggcactctgctcactatttgggtgacaggatcaacagaagtgcaaacctcagcaccccgcaatatacctgtgtaatagacctgcacatgtacctgctgaatctaaaattttaaaaaagaagctgagtgagatggctcatgcctgtaatcccatcactttgggaggccaaggcaggtggatcgcctgaggccaggagttcaagaccagcctgagaaaccccatctctactaaaaaaataaataaaataaaaaggagagaagaaaaaaattgtttttactaagaaaataaataaagtgcatggtgctataaatgtcatcatggcagctcctgtgtcggccgcccgatatcactatcccatgcccgcttcttctttccacctcctgagcttcccagacagtgctcccaaactgtcaccacaccggaacgccacgccttcagggtgggtttttggagcagagcgtcttcccgagtacctctgtatttgtgtatttttacactttagaattaaaataaattgtattttaagaaaatgtgggggtacaacagggattgtccttcaaagagagaagtgagagtgactgcaggcagggagaggaagggcagaaactttagggtaactccactcgggccccgtgggtgaagatggggcggaaacggacccagaaatccgagggtttctgcccaccaggtttctgttctcttctttccacagaaaacaaaggacacaggagacagaccccaaatttttcagtttcacttaggcaaatcagatccgaattaaggcagcagcgtccgatctggtttctccatgtccacctcctcccctgtttgtgccagaaccacacccccctgacctgctgccctgctggaacctttttaaaccagcgctcctgggttcagggacggagcagggatggtgaggatcagcccaagacaggctagctgctctccagactcccccagaccctccctctgcccttgacctcttgccatgggctcagcctgggctctgagcaccccaggaggctagacggggagctgggctctgctgactcagggtcccacggggctgaggagatgggtgacgggcagcaccctccttcctcacttacatcatttccccagcgccatcctttctctggaaacatcatagtcatgattcactgaagtggggctatgagttttagacaccctgagttccaggctgcagtcacacggctctcatttgtaaaaggggtgggttgagttgaggacacgtcctgtcttcctctttgctgagcctgagttgtctgttctaaaagcgagtggtctcaccatggctttcttccaattcgagttcaccttggctgagcccggggcaccgtggaagtcggtgggcagcttgagaggagacggggtctttcatatgtccagggtcctcctctcctgcctcctccgccagaggtggacctcaacccggggaaagggggtgtcctgaaggctgggattgtggcctcctcgaaggcgagggctctctggccctcaccctgcccacaagaccagccctgcatccccaattgccagttcctcttctatcctctccagaccctgcactacttcctcttttggggggattttctgttgctgtctccttcttggcgttcaaccctccatcttctctctctgtagttttctttgtctccccctttctccagggccctctcctacccacgcggcttggaagtgtgtccgaggctgtcactccaggtgacagcactgccgccttcctcacgccggcccctcctctgcccatgccagcctggccttcccgccgccccagcatggcccactcctgggtctctgatggcctctgtgaccagagccggggacctcctcatctcctgcctcactggatgtctggcaggctgtgccatggttcatgtcccctgtccggcctgcccgtctctctcccagcctcctcctgcctctctgtggggcctcctcagtcttcagcatctcctgctctgcggccaccgctgctgtttccatggcctgcatgctcctccctcatcacactctcaccaggaccttgcccagcacttctgctgatgggcccagaatccaggctgttcctgaggtccagacccacacacccagctacctccgacctctctctcggaggctccacagatgccctcttcccaccaggacagctgtcacagcacagcaatgatcacagctgccagcccaggtttctacccactctcccgagccctccacactactcaactctcccagcaacaacagggggtgtggactttcatgatcactcccattttgcagatgaggaaactgaggcacaaagaggttgaaatagtccaagctcttaaacactgcactctggtttcctcaaaactgaggttggcctaacccctatccttcctcctccatcaccttcgtcctccctgcagcgaccgatcagcctccagcccatccccacagccaccagcccaccccaaagacccccaacatctctctcctgacaaatcagtctccagctgcttcccaaagaaaccatgccccggccgggcgcggtggctcacgcctgtaatcccagcactttgggaggctgaggcgggcggatcacgaggtcaggagatcgagaccatcccggctaaaacggtgaaaccccgtctctactaaaaatacaaaaaattagccgggcatagtggcgggcgcctgtagtcccagctacttgggaggctgaggcaggagaatggcgtgaacccgggaggcggagcttgcagtgagccgagatcccgccactgcactccagcctgggcgacagagcgagactccgtctcaaaaaaaaaaaaaaaaaaaaaaaaaaagaaaccatgcccccatataacccactttctaaaatgaaaatgtgaagatctcagtccccatgaattcccttcaatgctgtcctccactctcaggacaaaatcaatgtgtcttcaccaggtgtggtggctcacacctgtgatcccagcaatttaggaggctgaggcaggaggattgattgagatcaggagtttgagaccagcctggccaacatggggaaactctgtctctactaaaattaaaaaatatatatatataaatatatatatatattcaggtgcagtggtgcaatcctatagtcctggctactcaggaggctgaggcaggaggatcccttgggcccaggagttcgaagcagcagtgaactatgcacccactgcactccagcctgggtggcagagcaagaccctgtttctgaaattaaaaaaaaaaattgatgtacattaggggggcttccacggcctgaggcctgcttccccttgctttcctcccagtggccctgaccttgtctcttacaacttcccaccctgactgtctggttcccattgctgatttcacacacagaccctcctgtcccctgcctcatccatgtctggctgctctgtcatctcccaactttggttgctttcaatgctcagctcaagcaccacctctttcaggaagccttctcagaaagccacaccttcacaacccgggtgaggcaccctgtggtctctgtgcttccccctcacagcaatgaacttgctgtttatacatctgcctctccactgaccccagggctggtgctttgtggtttatattttcttccccacctagcagagggcttgcatctccaggctcaaattaggcttcttgaataaatgatgaataaatgagtgaatgaatgaatgaacaaatactcgctctgtgctcctcctagggacccggatgccccactccttggcccagactttccaggtcagagtggagggctcccaccagggtttcctttagggtcctgaggggttggcatctgcccaaaccccctccagtctggctgaaatttcaaggtcaaggggtgccttctggcagtcaagggtgagcctgggaggggcagggcagggatttgcatccatctaagcaaagggcatcaagccaagtcatctgatgagagtgactccggttggggggtgggggcgtgtgggaggccgagcctgtcctcggatcagttgcgtactctgcccgccccctctgactcatgctgacaatcttcttccttcccctggccacctctctgcccacttgcttcctcagtaccttggtccagctcttcctgcaacggcccaggagctcagagctccacatctgaccttctagtcatgaccaggaccagggcagcactcctcctgttcacaggtgagcctggaccccaatgaagtagggctggggacccaggcccaagggagccagggccctgaactgggggctcaggctggggggttaggatctgggtaggaagagagactcagtcaagcctgagggggaggcaggcacatagggtctgagatttggagtttgtggagggagaggatattgatgaaccaattttgggagagttccagagatgctggaagagaggccagttgtctctgtactgcagagatttttaaaataggcagaatgcgccaacttgtgctctgtggacaggatgctttggtccgcaagttttcctggactcactctcatagcgcccgaggtgcacgttggggaaagatcctttttagagcctgggtactgctctgcagaaatggagaactgcaactcgatagtggatggtgggcaaggggcatccctggaccctgggaaggagagaaggggatgagttgggtgtccagaagacccaggcaccccgggcatcaggctcggaggggagattgggacgctggggccgggggtggagggcagccaggcagaaggaagacccttctccaaagctctcttcccacctctttcccagccttagcaacttctctaggtttcaacttggacacagaggagctgacagccttccgtgtggacagcgctgggtttggagacagcgtggtccagtatgccaactcctggtgaggcccaggtggtgctggcctttggctccatccatcctctccctgctcagggccccatgcccccggccctgccctgttatttgcaaactctcctctctgtctggtgtagcgactgccctggctaatgaagatttgccttgaaggcaggcacggtctcacagctaacatttacagagcagtaagtgcagtgccaggctcatcacaggtggatgctgattt

SEQ ID NO: 6971 - DNA, 6000 bp, Homo sapiens
aattttagagatggtgtctcactgtgttgcccaggctggtcttgaactcctgccctaaagtgatcctcctgcttccgcctcccaaagtgctgggattacaggcattagccaccatgcctggcctagctaaattgtctttaatgtcgcatgtctgcaaaaaacacatctataaagctagaaaagttgagcatccaactttttatgatttaactctcatgacctggcaatttttctagcaaggagcctgggctggtggttttaggagaactgagtgaaaaaaagaaatacattaactagattggatgcaaagtgcctgctggtcatgggtgttttctgctggcccctgttcatctgtgcctgttagcccacccatgggtgagtggggcaaagtggccaaactgattcttaagagaggcatacatgcagaatccaagttagtcatgatttcgtttctagtctgagtgaatgtgtgtccagaatattttataaactttatcagctcagaggggaaaacctgtctccatactacgtggtttatacaaagctgtcaggaattcagcatgatgaagaaatgcacaaaacaagtgtgaacagataagtaaaaggatctactgaaaatcttcagggtagtatattgtgtgacaggaccaagaatttgaagtcaacatctgtatttgtgccctctggacaaaggtattatccctgatgatataaaaattaattttgggctgggtgtggtggctcatgcctgtaatcccagcactttgggaggctgaggagggtgaatcgactgacgtcaggagttggaggccagcctgtatcgactaataatacaaaaaaattagctggacatggtggcgtgcacctgtaatcccagctactcaggaggctgaggtgggagaattgcttgaactcgggaggccgaggttgcagtgagtcgcaccactgcactctagcctgggcgacagagtgagactccgtctcaaaaaaaacaaaattaatttcgaggccaggtgcagtggctccaggtgcggtggttcatacctgtaattccagtgctttaggaggccagaggattgcttgaacccaagagttcgagatcaacctgggcaacatagtgagactccatctgtagaaaacaaacaaacaaacaaacaacaacaacaaaaaaaccagaggtgggaggatcacttgagcccaggagtccgaggctgcagtgagctatggtcacgccactgccctctagcttgggcaacagtgccagactctgtctcttaacaacaacaacaacaaaaattaattctactttaactgtcagtttcatgatatccttctattaagaaaaaccttttctatctgatgaactattggctaggttttctttctctctgcttttgactaatgcatttaattactttcatttgcaaactctatccttctcatcaactttgtattttagatgtgtctattgacagcctggcttccctcagcgatcattatgatgatcaaagtagatgaataggtaaaattcaatgcaaatattccagggcatctaatccataccccaaatggaaaaggggagaattggaagccagcaatttgaacacattactatggatgtatttttctcatgcgggggaaaaagtgatttggagagagagaattatgaatgcatgtgaagaataaagccaaatttcctgggaggaggggaagaccaggagaaacaaaaccaaatcctggctgtggcctctaaggcatggggacctggagttatgctctccaggcagacacagctcattctggagaaaggctgcaaaaatattctccttcacattgatttgaaaacaattattaaattcttgttttcttatttatctaagtgtaactttttaaaacttactgagagaagacgggcacggtggctcactgctgtaatccagtactttgggaagtcaaggcaggtggatcacctatggtcaggagttcgagaccagcctggccaatatggcaaaaccccgtctctactaaaaatacaaaaattagtcaggtgtggtggtgtgtgcctgtaatcccagctactcgggaggctcagacaggagaatcacttgaacctgggaggcagaggttgcaatgagctgagattgcaccactgcactccagcctgggcgacagagcaggactccatctcaaaataaaaattaattgattaattaattaaaaatttactgagagctggtggttcctttaagggtggagccgccatcaagtccccagaggatgccctgaatttgggggcatcaccttcagctgctgtggactctgagccttggcagctccagctccaggcctgggagaaagatgatttcctggcagcgtgcagtgattgtgagcatttgactaccttactgcattttgcccttatcattgctctccaaacatgagtggaaaacaaaaaattttgctgagacaagcgataatacgagttagggaaagttggagaattttatagttgctgatatcagcaaatcgtgagtttcaagcactacttacagaaggaagtccaaaattaaaggggatatagaaatgtgtaaaagatgaggtgtggtgaagatggagaaaatgaagagctctttaaatttctgaattatgaagaatcaccaacaaattattttgtggttccaaatacagggagaagttcacagatccacagaactgatgacagggtgcggccagccacaaacctttcagcacaagagggagaaggctgccgctccactttgcctgggcagtctttgtaaggcagtagataagtcagcctcgaagttagcaatcacagccctcggctcggtttcctgcaagggcatcgttaatgcatcacaattaatttcttctgtccattaaatgtcagctctcaagtaaattgatgtaaaatttttgtatagaaaactatttcatattatttgcacttgatgtttaattacattttaaatgttttgtttgtttcattttgttttgtttttgagacagagtcttgctctgttgcccacgctggaatgcagtggtgtgatcttgactcactgcaacctctgcctcctgggtttaagcgattctcctgcctcagcttcctgagtagctgggattacaggcgtgcaccaccatgcctggctaatctttgtatttttagtagagatggggtttcaccatgttggccaggctggtcccgaactcctgacctcaagctatacacctgcctcagcctcccaaagtgctggaattacagacataagccactgtgcccagccaaatgttttaaataattgtcacatatatatacaaaataatttatgttataggtagggatcttgttatattttaaccttcaaagtatattcctaagctttttatttattttttattttttatttattgagacagtcttgctctgtcgcccaggctggagtgcagtggcgcaatcttgactcactgcaaactctacctcctgggttcaagcgattctcctgcctcagcctcctgagtagctgggattacaggtgcgcaccaccatgcccagctaatttttgtatttttagtagagacggggtttcaccatattggccagagctggtctcaaactcctgacctcaggtgatccatccacctcagcctctcaaagtgctgggattataggtgtgagccactgcgcctggcctattcctagccttttatatatagacctttttctttttcacattttaaaggaacttttatgtttaatcatggaatatttcaaacatacagaaaaatcacagaaaataaataacaaccactcatttatcttctccccaaccccatgtaataaatattaaaatattgtgttaaatgctaaatttaacacatgctaaaggttcctggctggatgtggtggctcacgcctgtaatcccagtactttgggaggaggaggtgggaggattgcttgagtccaggagctcgagaccagcatgggcaacatagtgcgatctcgtctctacaaaaaacaaaaaaattagctgggcatggtggtgtgcatcagtaatcccagtgactgggaggctgaggtgggagaattgcttgagtctgggaatttgaggctgcagtgagccctgatcatgccactgcattccagcatgggcgacatagcaaaacttgtcaaaaaaaaaaaaagtttcctctctgccccaccatagacaaccactcttctgatttctatcttcgtagatgaattttgcccattctcttgtatatgaaaggaaccagacattaggcattctggtgtctggtttctttcacttaagataaaattgagttaacctgtattgttgtacagaactgcagtttgttctttgttatttattgtaaagacagggtctggctatgttgcctaggctggtctcgaactgttggcctcaagcaatccacctgccaagctctgggaccacaggcatgagccatggcatctgatctgtagtttgatcttatttcttgctgagtagtagcccatggcatgactttattattttgggtgtccattctcctctggaggggctctgctttttgaaaccacaccctggcctagctccccttctccctgcctctctgccggctcacatccacatgccaagacctctgcagccattctgcttcctgtccttccactcctgtgggacctcagagagctacggggctccctgggtaccaactggctcctgaggcctgggggagggtggtcttctgggagaaggaagccaggtccctgcaggttgtggagggggacagaatgagggtttttccccagggtgttgttggcccctgcccccacttctgttccataattaaccacgcccctcctacccactgtgcccctcttcctgctgtgtggaggccctgaatcattattttaactaccccctgggagggtgagcaccttctgtgctctgtccccaaccttccacttcccctcaacgcgctgctcagggatgaccttcggcactgtgcttcttctgagtggtaagtggggccagggtgctggggagaagcttggaggagttctgaggggactccatctgggagggcaggctgggggctggtggtcggctccaaccactcttatgaggagctgaggcaggggagtgcttcatgtgcgagtggcccggagtcagtagagtgtgacctgaatgaagaggggctcaggggctgtgctcaggtggcgactaagctacctctccagctggctatgttgtcccaggcttccctgctcccactcatggagtccctggtgtgggtgacagaggtctccccagcctcccccgggagtggaaggccacagaagccaccagggagggggaaaggttggacatcacctccctgggcctgtttcccccaagtcctgactgcacgtagggaagaggccccctgctgaaaactgcatcagagtcacattcacgtgccatcaaaaatcaggcttggctgggtgcggtggctcatgcttataatcccagcactttgggaggccgagatgggcgtatcccctgaggtcaggagtttgtgaccagcctggccaacatggtgaaaccccatctttaccaaaaatataaaaattagccgggcatggtggcgtgcacttgtaatcccagctacttgggaagctgaggcaagagaatcgcttgaacccaggagacggaagttgcagtgagctgagatcgtgccgttgcactccagcctcagcaacagagcgagactccatctcaaaaaaaaaaaaaaaaaaaagaaaaaaaagaaaaagaggctgggaggtcctagggattggggcttctttaactcccagcctccccgcccaccaaatattcctcagtcctggcttcttatcatggattcaacctggatgtggaggagcctacgatcttccaggaggatgcaggcggctttgggcagagcgtggtgcagttcggtggatctcggtaggc

SEQ ID NO: 6972 - DNA, 6000 bp, Homo sapiens
cagatgagcctgaggctggaaagtgtggcgactcgcgcaggactgtacagatagtggcagagccaggacaagagctccaactggggccccaccgaatattcccgccctcattactctttcttcagttctatattttgttttgttttgttttgtcctaagagatgaggtctcactttgtcgcccaggctggagtacagtggtgccatagctcactgcaacctcgaactcctggtcttgagcgatcctcccgccttggcctcccaaagtactgggattgcaggtgtgagccactgtgcccgcccttccctttattcttgaaataagcgcttacagtggttcatgcctgtaatcctggcactgtgggaggccagggcgggtgaatcacttgaggccaggagtttgagaccagcctggccaacatggggaaaccccgtctctactacaaatacaaaaattagctgggtatggtggcacacgcttgtaatcccagcttctctggaggctgaggcaggagaatcaattgaacttgggaggcagaggttgcagtgagccgagatcacgccactgcactccagcctgggcaacagagcgagactccgtctcaaaaaaaaaaaaaaaaaaaaaaaaaagaaagaaaagaaaggaagaaagaaagagaaaggaagaaggaaggaaggaaggagagagaaagaacttaatctgctcccctcctgcactgcctttggttcccagattttttctcctattaaagggccttgagggatggagctctattcagagtgccagctgtgctcaccttttggttctgggcactaaggtacagcttccctcttactattgacccacaacatcttggatcacctgaatgtttcatgtagttacggcctcagcttaaccctttctcactcccacccccaggtgtcccagtcaaggcagaacaatcagcgcactcagagccattacttactgtccctgctggcctgtctgccaccacctgaggcttctcccggcctagccctgtgctgggtggtgctgggtccagagatgagtcaggctcactgccctggagagccccaggctgaggaggcagatacctggacagaggatgacacttggtgtggccaggttgtgactgagggaagcactgggggctgtagaagccagaaggtggcttcttaacccagactgggagtcaagggatgcatcctggagtaactgacacccaagacctgagccaagtcctagcagagaaggatggggccaggggttttcaggtgtggaagatggagccaagggtttcaggtgtgaagaagttcaggttccatctgagtccctaagtcccagggtggtcccctgggtctagactctagggacctctggtgctggaaatgataggtcctcagagccctttccagctcatcaggaagagctagaagccgcagggagcatgtatgggcacaaggaaaaggtgaggcgtccatggccccagcctctcccaggcccccagatctcttcctctctaaggctcctctcccatggtcttcccaggtctcctgctcttccccttccacatattctccccaaagaatgtacccccaaccccagcctgtaatcacctccctatcttgaggatgcccaaattggcattcattcattcaccaaatatttattgagcactcctgtgccaggctctggggagacaatggggaaccaagcagctatgacccttgctttcagggagctgaagtctagtagcggagacagatgacagccaagtacaaaggtgacatgcgtgatgaaggagcggtaccttcccgaccgcctagctaaagccaatgcttccctggtttccgtgccacggcccctccctagttccttcctagcatgcagtgctcttgcaagtaggagtttttgtttttgtttttttgagacagagtttcgctctgttgcccaggctggggtgcagtggtgccatctgggctcactgcaacttctgcctcctgaggttgaacctctgggttcaagcgattctcttgcctcagcctcctgagtagctgggattacaggcttgtgccaccactcctggctactttttttctgagatggagtttcgctcttgttgcccaggctggagtgcaatggcgtgatctcagctcactgcaacctctgcctcccgggttcaagagattctcctgcttcagcctcccgagtatctgggattagaggcatgcaccaccacacccggctaattttgtatttttagtagagacggggtttctccatgttggtcgggctgatctcgaactcctgacctcaggtgattcacccgccttggcctcccaaagtgctgggattacaggcgtgagccactgcacccagccctaatttttatatctttagtaaagacggggtttcactttgttggccaggctggtctcgaactcctgacctcaggtgattcccctgcctcagcctccaaaaatgctgggattacaggcatgagccaccacacctggaccttattgtttctggcttctgtctgattctgcaaccggaacagaagctcccgagagcaggcagtgcatttgttttgctgaccattttctccctggtgtctagaacaggtccagtacatagccagtctccatacgtgtttgttaatgaaggaaggaaccaggaaggaaggaaagagagagagtacaatggatgaaatagagaactaagttaggggaggtggggaagagattactttcaccaggtagtaaaatgtaaggtctcagctgagagccgaacatggagaaggagccagctgtgcaaggcgccaaggagagcattcccggcagacaggaagcaggtgcaaaggccagggaggaggagagagtctgatgccttggaagaaagaaggccactgtggctggactggagccagcaatggggaggccaaagaggaaggagatgtcacatcatgaaggcctttgacggccgtggtgaagggaccttatctgaaatgtctgtaacacacacgtgtcctctgacacttggcactggatttctctcaggcactttaaactcatcaccctctgaagcagacactgtgggtgccccacccatatacctgcatggcccaccttggaagtcatatactgtgacagtttccagataccctgacttgcagctccttctggagtttcttgtctgaggctgttcttgggaggagggagtgtgctccgtgttctcagcaggcctgaagtgtgtggacatttctgcagcttttagccagtgacagacacaaatcagggaatagataccccaaccacctggcccctcaaggaacattgctatggggtgttcttcacagtgtctcagagtgtcctttttgggatgaggctccaactgctctttgtggtaacctgacaaatgacacacccttacgccaggcgtggtggctcacacctgtaatcccagcacttcgggaggctgaggcagtttggctcaggattttgagaccagcctgggcaacacagtgaaaccccatctgtataaaaaatacaaaaattagccaagtgttgtggcgtgcccgtagttccagctatttgggaagctgaggtgggaggatcccttgagcccaggaggtcgaggctgcagtgagctgtgatcacaccactgtactccagctttggtgacacagcaagaccctgtctcaaaacaaagaaacacatgctttgttggtttttctccttgtttcatttctcttccctacaccatcacagtccatactggaatcacctcctcaggaaagtcgttgcacacaaattctcatctcagggtctccttttagaggaatacaagctaaggaactccttcatccaaactctgtcatattacactcaaagcatttttctctgttccccatctccgggatgaccatcgctgccataatcaggcaggactttccttcgactgtctcctgacatccaagtctggtcaattcttctagaaaggtagacatacagatattaaccagcctctcccttcttgaatccagtcctgtgctgagaaatgagactccagggatgaatcagatcagtcctgctctttttaatttttatttatttattttttaagagatgaggtctcactccgctgcccaggctggtttcaaactcctgagctcaagtgagcctcctgctgcagcctcccaaagtgctaggattacaggcatgagcccccacacccagccagtcctactcttgaggagacactagtttgttgggaagacagacctggacccaggcaagggccacacagtgtgctcagaactacatcagaaatgtcagagaagtctttcttgaagaggcgacacaggctgggtactgaaagctgagtaggagttggccatttgggagacagggaagtgctctaaacagaagacacagtttgtgcaaggatttggtggggataaaatatctggtcaaaaaaagcaaaaagcaaaaatctgggctgggtaggttaaaggagtgggaaaggatttctgatttcctctagatttggtttggagaagcagggggaaggatgagcgggaattggggcatgaccaggattggaaatcaggctgaagagcttgtactaagagctatggagggttcctgaggagggcgagtgaccctgtcagacttggatttgaaaatgattcctctggattagttaaatccaggggtgctagcttagctaaggaagcgatgcatttttagggagtaaaagagtgattttgagcctggagcacaggggagagggcggatgctaaggcccaggaaagagtgctcttgaacttggaagggcccagctccccaagaccagccttcagccttgatatgacctgattcagctaaacaaagctggggagcgggaatgagacctgggggacttgtcggctcagtgcccctgaggtaaccattaatccttcccctgggggaatccaggggctggttcctggatggggcagatcctggggagaatggaggagcacacagaggcaggctcggcaccagagatgggggcccagaaggccctgattgacaatcctgctgacatcctagtcattgctgcatatttcctgctggtcattggcgttggcttgtgggtgagaagttggggggtgtgctgctggtggctgctggctttgggggcctgggggaaaagtctcagggggaccctaggtgggagaatgatgcttggatctttgaaggagaaacctaggcctgggggcaagcaggtctttggaagttctcagggagacccagccaacattcctcccttgtcttcccactttgggactgtgctagctgaaggggtccgcggattttcatcagggtcgacattctaaatggggtctcattcccctggccacattgtggctgaccagcagaaaatattcaaggtccccaggaaggtcaagccaaatccacaaatgataaatcctggggagttgggatggaactagtggctcacacctgtaatcccagcactttgggaggccaaggcagggggatcactgaggccaggagtttgagaccagactggcccacatggtgaaaccgtatctcttttttatttaaaaaatttattttaaaaattatttacttttaaagagagaggggtctcaccatgttgcccaggctagtcttgaactcttaggctcaagcaatccttctgcctctgcctcccaaagtgctgggattacagatgtgagccactgtgcctggatgagaccttgtttcttaaaaagaaaaaagaaaaaaaaagaaagaaaggaaaaattagtcaggcatggtggtgtgtgtgcctgtagtcacaactactcggaggccaaggtgggaagattgcttgagcccaggagttcaaggctgcagtgagctatgatcatgtcactgcactccagcctaggagacagagcgagaccttgtctctaaaaagaaagacagatgtggggctgggtgcggt

SEQ ID NO: 6973 - DNA, 6000 bp, Homo sapiens
accatgtgccttgtcggcatttctcacagccccccacgggctcccagcagagtgggccacatctcctgactttacagagggactccctgagccaccagggtcccctagctccgccaaagtctctccctggagcccctgactccagagctctcagacaggaataatagcaggaccttcctgaaggctcctcttcatcctgccaggacgataggcgaggttggcgacaagtggccagcccaattgctcagaccctcccagggctcctcccggtgccgtgaacccccgaccttaggggaaggaagaggtgactgtggcatggacggtggtttttgttctcatatcccctggcccctacagagacgtgcccagagttccaagcccactgggtgctggggctttccttcccccagtaagggctcgacatctaggtttgtgtggcagggccaagctgtttgctcagcactcagtgttatttgtcccttggctgactgacagcttgactgtctgcttcgttttggctgcagtttgagtctctcctactgactgtttcatggcctcatcttgagcccccattgttgcccagggtaggaagtccttctcccctaaactctgggccacatatgcctggaccctgctgggtacttctcctcagatctctttttttttttttttgagacagggtctcactttgtcacccaggctggagtgcagtggtgtgatctcagcttactgcaacctttgcttcctaggctcaagcgatcctcccacctcagcctcccgagtagctgggattcaggtgcccgccacaatgcctggctaatttttgtattcctcccacctcagcctcctgcgtagctgggattcaggcgcctgccctcaagcccggctaatttttgtatttttattagagacggggtttcaccatgttggccaggctggtctcgaactcctggcctcaagtgatccaccctcctcagcctcccaaagtactgggattacaggtgtgagccaccatgccctgccggcttctccccagagctttatgccatgcctttgatgggcacctcttacctcctcccagcctaggaacttgcatgaaagggaactatgtccaagtcagttttgtgtccctagcaccagggaagaggatgggggttgctgagagggacaggaaaggattggggttgtgctgtgtgccctggcgcctctaccaagcagaaaccagccttccctgtctgctactgtgaaagcccaaggttgcccttctttgggggagttgaaagaaagcgggtgtttgttcagcacacttgggagcactgtgtgccagggctgggagatcttgggtgagggtactcaccatgctcattaccttgtaatggggttaggggtagcctgtccctatggaagcttgtccttgttcccagggagggtcaggagcatgggttgtgaagtcaggtagatctgagcttgaatcctggctctgccttttcatagctgtgtgtgcttgggccagcaatgtggtgtctctgagccttggtgccttattctacagagggatgatagcagggccttcctcagtggggctgccagggagtgccatgaggctgtgtgtgtaaagtcctgggtgatgcctgtgtggatcccagggagcattgacctgtgtgtgctcagatcctgcctgccgggacctcctagacagcgtgaggggtggggtgtcaagtggtggctggtggctgcggctgcggggagcagctggtttgaggcagtgctgaggctgcagcagggaagagactcaccgccacatcttccaaggagaaagctgggcgggcagcctgggagggcaggaggtattgctcagtgggacaggaaccttgattatcaaacggcagggtttactgtgcccctctcattatcaaactgcagggtttgttatcatacagcctctgctgtatggccagtttatcttcacacactccctgctctatggccggtgctggaaagcccagggccccataagctcccagcaggcagtggggaacccccctcctgtgtccaggcatctacatgtgtcctctccaagctgccccttttctcaagccgagatcatcttgcagaaatgttggtcagggtgggtcgctccccacctgccattcccctggacttgccctgcctcctatgccccttccccttggcccccgatatctcccccagcggctccatctccacgccgcgctttcctcagggtttgagcatgtgtctcatcagcctctcgcccactgggccaggtcagatctgttctttttcctgaatctactgagcatccagcaccatgccctcctgcatacgcaaacgggtatccctcaatacccatttaaaaatggacgggtaatttacatacaggcaagtgcacaaaccttcaatgtacagggtaatgagtgtacttaggcactcgcctgtataaccagcacccacagggagatttagaacctcctcagcccccagaagtttcctgtgtgcccctttccaatcagcggcctccctagaggcaaccgctgtcttgctgtctgtcactgtagattagtttcatcatttctgaagtttcatataaatggaaacgtgctgaatgtgtcttttgtgggtgggtctttcactgtccttgccatcttggatattcattcatgttgtgtgttagcagtgatctgttcctttttactgctgagtaattttctgttgtgtgaatatatgaaaatttgtttatccatttactcattgcaggatgtttgggtttgcagtttgactgttaggatgaaagcttctctgaacacttggatagaagtcatttgtggacacatgtactcatttcttttgggtaaatacctgagattgaattgctgagtcattggggaagcatatggtttgcttttgtccacactgccaggcagttttcatcatggtggctccattttacattcccactagcagtacatgagagtgaagagctgcttctcctccttgtcaacacttggtattttcattttaattttagccattctagtggtacagtggaatctctatatggttttaatttgctggtggctaatgatgttgagtatctttttcatgtgcttattggtcattttggcatcctctttgttgaagtacctgtgtaagtctcttgttcatcttttaattgggccatttgtctttttcttattggtttgtgggaggtctttttttttttttttttttctgagacagagtctcactctgttgcccaggctggagtgcagtggtgtgatctcggctcactgcaacctctgcctcccaggttcaagtgattctcctgcctcagcctcccaagtagctgggattacaggctcatgccaccacgcctggctaatttttgtgcttttagtagaaacgggattttgccatgttagccaggctggtttcaaactcctgacatcaggtgatccgcccaccttagcctcccaaagtgctgggattacaggcatgagccaccatgccaagcctgggagatctttatatatgctagggaggagtcttttgtcagtcatataggatgtgactttctcctagtcagtggcttgtctttcccctcttttgatgatgatgatgtctgttccttctctgctctgggacatttgctagggagacatttgctgataggagggcgaccctgatggggaggatcccctgaggtctcccactccctcctgtggcctctggagcagcctggaaccctgtgtgagtcctatgcctgtctccaccagatggcagaccttagatcacctgctagttccctgcatggggcctggcacagagacagcacctaacatgttcagttcctcctgatcagtatgtgtgggatgtctactctgtgaccagctggggctggacgctggggacacagctgttgatattacagctgccctcccatctctgccctcctcaaggatataacctaggaaagacagaccagcaaccagtggtcacagcacagaggtgctgtgatggaggaaggtgcaggggttagaagaccagaagaggggtgtctgaccctggatgtgggaggtggaggaggtacaccattgctttgaggagctcgtaatcccaggatgccagtcacatgctcagaagggctccctgaggaccaggtgctgctgtggccagcgggctggaggcctccccctctgttttgggagtctccactctctcctcttagcctctcctgatctgctccctcgccactgagcgccccatgatcccagtggggaaactgaggcctggcatagcagaaggggtgctggggtttgattcccagcctcatggtgcccagggatgttgggggctctccagggactctgattttggaataggagccccaaggatgggcctgcccctgccctgctcccagcatgggagcgtaggtgagatggagaggcagtgggctgggctggaagatctttgacctctcctgggcccctctcagaggtggacggggccaccttactacatagatagggaaattgagtcccaggaaggcgcggggggcctgtctgtgagcgtcagagcccacaggaggctcaggccaggccgctaattgctaattgctcactaaggatgcatttgctccccactttgaacagttgtcttggggcttctaatggaggtttttggtgcttgttttattattattttttcaaaattgttccagcttcaagcttcaaatttccatgaagtcattggagcccgacagctcccaggcctggcagctcccaggctgcggagagcagcactgtggctgggggagggggccctgcacaccccgagaggctgggctgtgggctgtgccttagccttgctgccgccgccgccgctgctgccgctgccggagcaggaagtggtgggtcccagatgtgactcactctcattaggtagcgtggaaggagccttcggatgggtgagcctgggcgcgtctgaggaagggcaggcgggggccgggccacctccctgcagaccctggccggctgctggggccggggaggagagccaggtaaaagtggggtgtggggatggagtgtcaccagtcctagtggcttgagccccaggggacggggctggacagtgggtgggaagcagctcacccggcagcctggcctgggagtgcactgggcagggtctgggctgggggagtaggaggctccgtgagcctactgggcagatggctgggagaggcggcccttcaacaggggaccagaggcgacttgtcactggcttttcccagcctgacaagaaagtgcggttgtgaccacaatgttgtacatgtggcccgttccatctggaattctaggaaccacagactctcaaatgtccacactccttctcgagggtgtaattttacatttacaagcacacatgacttttctcaatgaaaggaaacattggcaagggaaggccaattcaactaattttatgaaattataaaacaaaaaacaaacaaaacctctgaaaggagtgcatgcctgagggtcaggaaaccaagatgcctccaaaaagcagactggtttccctttccctgcaatgcctctcctctatcccccagggaccgcatgggccatctggagtgggtctttctggagcgggtctttctggagctttctatgcattcatctaaacatgtatgtacagagggtgaggcagttgcctcttctctgtgtcatcacatcagggtcaagggcagggacatctgtggctgggggcttcctccctggacagccattgctggagaggagaagggagggccgggagggggaagccaagggcctggaggtaggggccaggccgagccacctacgacaggggccctgggtccaaggcctggacgggcagccagtgtgggctggatgtgtctggaagggctatgtgaccgtgggccttcactagcatcaccatcttgcagatggaggctgtgagggg

SEQ ID NO: 6974 - DNA, 6000 bp, Homo sapiens
ctaaaaatacaaaaattagccagtcgtggtggtaggtgcctgtagtcccagctacttggtaggctgaggcaggagaatcgcttgaactgggaggcagaggttgcagtgagctgagattgctccaccctactccagcctgggtaggagtagtattatctcaaaataataataataactgcttcctgggctgtgcatggtggctcacaccaggaatcccagcactttgggaagccaaggtaggtggatggcttgagctcaggagtttgagaccagcctgagcaacatggtgagattctgtctctaccaaaaatataaaaaattagccagacatgatggcacacacctgtggtcccagctacttgggaggctgaggtggcagaatcacttgagcctgggaggtggaggttgcagtgaaccaagatcacaccactgcactccaacctgagtgacagaatgagaccccgtctcaaaaaaaataaaataaaataattgcttcctgggatttttggaaagagtcaatgagacagaatcagttcatctgctattacacttcataacacctgacagggtttgcaggtacaatccaggaccagaatgtgaccagtcttattcctaccaatcatagacacactgtgacctcaagagttaagttgccagtcagtccacaagccagccttacaagaccaagtgtccttctgggacgggtacccaggccctttccctttggtctctttggcatttctccctctttccttctctacgccttctgctggggacctgacaccatcttgcccatgactccagtgccaccatttctagctccatccactttagaccacagaggatcctcaccctcttttttttttgagacggagtctcgctctgtctcccaggctggagtgcagtcgtgcgatcttggcttactgcaagctccgcctctcgggttcacgccattctcctgcctcagcctcctgagtagctgggactacaggcgcccaccaccatgcccagctaattttttgtatttttagtagagacagggtttcaccgtgttagccaggatggtcttgatctcctgacctcgtgatccgcctgcctcggcctcccaaagtactgggattataggtgtgagccactgcctctggcctgatcctcaccctctttaatggagactcactctagaagataaatattccctttcttactaaaaattaggtcacatctcataacataattttatgaatttattttaaaaaacaaaagtaaacaaaattttccctttgaagaaaagggtgaacagaacaagaaagcaaaagggataaaaatgagtaaatgtccaacaatgatagtctggattaagaaaatgtggcacatatacatcatggagtactatgcagccataaaaaatgatgagttcatgtcctttgtagggacatggatgaagctggaaaccatcattctcagcaaatgatcgcaaggacaaaaaaccaaacaccgcatgttctcactcataggtgggaattgaacaatgagaacacttggacacaggaaggggaacatcgcacaccggggcctgttgtggggtagggggaggggggagggatagcattaggagatatatctaatgtaaatgacaagttaatgggtgcagcacaccaacatggcacatgtatacatatgtaacaaacctgcacattgtgcacctgtaccctacaacttaaaagtataaatatatatatatatatatatatatatatatatatatatatataatgagtaccttgcctatcctgttccatatataaagcacagcgtccagcacatagtaggtgcttagtaaacagtagtgaggtgttcagggcatgtgccttggaataagataatccagattcacgttctgggtacattacttgctaactcctctacctagggcaagttacttaaacatcgcaagtctcagtttcttcgctgagaaagtggggagagtaacagtgcctactttgtaggattactgtgaagattaaactaaattgtcaatctaaaatccttagtgcatgagccaggtatggcagcttgtgtctataatcccagctacttaggaggttggggtgggagaaatgcttgatgctaggagttctagaccagcctgagcaacataaaaaaaaaaaaaaacaataaaccccatctcttaaaaaaaaaagaaattaaaatttaaaaattagccaggcatggtggcacatgcctgcagtcccagctacttgggagtctgaggtgggaagatcccttgagctcgaatttgtggctgcaatgaacaatgatcacctggatgacagaacaagaccccatctcttaaagaaaactgttagtgtctaacacgttataaatattttattattgttatttacatacttcagcctaccaaaactcctgttttccatggagaaaacagatctgttgataactctgcagtttccagaaacactgtgattagcagaatgagaaaaatgccaggagaactcagaagagaaagtcactaggaagacttaatctcatcaggtgatgccagaatccagaggttgtaatctaggactttgcccaggcatgctttggggcacagtggtggggagggagctgttgcaaagatggggcaagaatggtctggacatgactcagacactttaaagtgaaagaatgggaaattgtctggcagctggtacttaccatgggcagtcagcactcctctgactgattcaccttcaccagggcaccagcctgcagtgaagtagctggggctggttccttttagtgacacccaccaccccttgcccttccaggtattgtccacagatgacacctcctcctcctcctcctgctcctcctcctgctctgcctcctcctcctccccctgctcctgcttctcctcctcttcctcctgctccttctcctcctcctcctgctcctcctcctgctcttcctcctcctcctgctcttcctcctcctcctcctgcttctcctcctcttcttcctcctgctctttctcctcctcttcctgctcctcctctccttctgctcctcctgcttctcctcctcctgctcctcctcctccacctgctcctcctccttctcctcctcctgctcctcctccttctgctccttcttctcctgctcctcttcctcctgctcctgcttctcctcctttctcctgctcctcctcctcctgctcctcctcctgctcctcatcctccttctcctcctgctcctccttgtcctcctctgcccttgatattcactttgaccagattacaccagtacagagagtccaaaggttaaataggcacacactcacacacaaactcacactgggctagaacaatgacagagcgtcctgggggagcagagtgggggccggggggagggggaaaggaggattgcaggcctaactttcacaaatcacctgaaatttccactgaaggcattatctccaaatgttgccacagagataaactgccaggattacaagaaaacgtgaagacgttcccatagaactctgtaatgcttatatccatcaccaggaatgtctgcccttggcgccctaaacatagattgattgattgattgattgattgattttgaggcagagtctcactctgtcacccaggctggagtgcagtggtgcgatctcagctcactgcaacctcctccttccgggttcaagggattctcccacctcagccttggagtagttgggattacaggctcctgccaccacgcccggctaatttttgtattttttgtagagactgggttttgccatgttggctaggctggtctcaaactcctgacctcaagcgatcctcttgcctcagccttccaaagtgctgggattacaggcgtgagctacggtgcctggccctaaatatagatatttttaataaatcctctacttatctcacaacgagctcaatcgctttgcattagatcgttgggtgtgttaaaagtattcatgtgttacattaaatgtgaattcaacaaaagcagagatttttgtgttttgttcttcattgtatcccttgattgtagaaaagtggcacatagtaggtgctcagttaatcgttgttaaatgaagacataaatgaaatataaaccattaaatgtccaccatatttgtaagcgttttggcatgtcttcattgaaagaataccaggcagctgggagccatagtttactccggtaatcccagtgctttgggaggctgcaggtgagaggatcgcttgagaccaggagttcaagagccaccagggcaacatagagagaccttgtctctacaaaaacaaaacaaaacaaaacaaaaaacaaaaaacacaattcccttaagccgccccttccccttccactgctcagagaaggccttccagcagagcagagcacgaggtcgctggcacacacccatcctccaccagtcctggcctctgtagagcaagccagcagagcaggctgtttctctcattcagggacggtttagggggtggcaggaaaaaatggttgctgataggcgaagggcctccctgggttggagagaaccccagcctcggatggtcccagcacatttaaaagagaagcagtgccaaaggtggggtgcactgaaagctgctggatgaagggaaagatccttgtgctcagcccggaaaaccggaggatggataccaggccgaggggtccctccgtgccccaagagaaagttcaccaagtttagatcccagtgccccgcagcgggtgaaggtggtcccgccccaggccggatctggccacagggctggcggcgcgctggaaaaccgcccacgtgggaagaagccctggctgcatttccgccctggactgcgctcccgcctgccagcgcggtccctgcgcagccgccccgcgcccactaggtggcgcctgcgctctagtgggcgcttcacaggcgcagcgacagcgacagcgacagctcgaacctgagtcccaggattccggggactggagggcagcgccggcagccaaggtaggattcctgagccccgggcgtctccctggagcctctgaggtcggggtggacagcggggcggccgctgggcaccgcttgcggtctgcagagataaccggaggagtcggggcggcagcacgtgttgtagccgtgggggggacccagagacccgcagcctcggagctgggcctagagcaaggcagagcaccaggtcgctggcacgctcgcatcctccccagccctcgcctcccagagcatgcccgaatccccaagccgggcgtcctcgaagcggaaagcagccactgtcgcccagagccactccagggtggcagccgagtgctgataaggtccagagcaccacttcttaaacttgtctgcccgttggcgttgcttgggaagcattaaaaaaataccgatgccctagttccacccccgcccccccccagagactcagatgtgattggtctgggtgggggactggacatctgggtattaaaatgtttgcaagagattccagctggcagccaaatttgaggacccttgatctaaggagttggagaaaaacggaggacatttgtttgttctaacccagaatgctgatgattccctcctcctcctattcctccagttcgccctcctcctcctttctcatgtgccttttaagcaggaaatgcctctgcctttgtactgtcaaacccaagataacaaactaaccatcccccaccccccacagtagggctggttctgaaagggttgaactcgaaagtggacaaggaacagaaagacaccagtgtggaatgtgagcgaagactcttaggggtttatgggtaggaagggggttcctccccaccctgatcccagagaagatcaggagactggctggagctgtcttcctcattttggcaaacctagctgattaggcagtgagaggccttataacgagccttttttacaactagtaaaagggcccttttacaact

SEQ ID NO: 6975 - DNA, 6000 bp, Homo sapiens
gaggccaaggatcttactttggacatagtgacttccaggtgcctttgattatccaggtagtgatgtccagtctgcagtttgataaaggcacatgaagttcaggggagcagcccagggagaggatgtgaatgtgaagtcagcaggcaacagatgctctttaatgccagtgcctgaatatggtcagctgggctaggaattaagagaaaaatctaaggactgagccacaccgcacagatcggaagtctcaggtatcccaagggcactttagtgggtggtgtcctgaaggaggcggatttcagttcatggaggtcttatgctattcgtaaatccagcacaacttatgccaatgatgaatgaattcagggcaggtcagctgcagtgtaatatatgcctattgtcccctgatcaagacagaaagacagaatgaaaaggaagaaggaaggaaggaagggagggagggagggaaaaaagaggaaggaaagaaatcagggagagaaagaaggaaaggatggaaggaaggtgggaaaggagagagaaagaaagggactaagggagaaagaaaaaaggaagaaaggaaagaaaagagaaagaaaaagaaagaaagaaaaaagaaaagaaaagaaagaaggaaggaagggagggagggagggaggaagaggaaggaaagaagtgagggagggaaagaagcaaaggaaggaaggtaggaaaggagagagaaagaaagggaggaaaggagaaagaaaaaaaggaagaaagaaaagagaaagagaaagaaaagaaagaaggaaggaaggaaggaaagaaaagagggatggaggaaacaaatatgtaggcaaacctctcctcctttttttccttagtctcctcattggtgccatggaggtgtaggttctgatagcgtcctcagcggacacaggcccttggattctaaatgtgtcccagcccagctgttgtgtgtcagggccccagtgtctgtggggagatggccagagatggactcacagcatcagccattgccttttaccccatggcctgtgtcaccaagtgccatggtaagtggaagtgatggctccccagagatcacattagctctgataatgctccagcctcccatgcacaacttgccctcaggccacctggctgggcaggaagaagggctcccagagaagccacatggccccatggcggtgagtctgggcgagagatggagagagacgccttcccttttagcccagtcccagcctagtgtcctcactgctgacccccggtagtctctgaaaccacagatggagctcccagacttgctgattggcccccgtgatggcgtgcgcattaggaggaaatgcctccctccacccttgtagcaaacacttccagctccatgcccacaccccttatcatccactgttcctgccagtgcagacccaacccaatggcttcctgctgccagtacctggggctctgctgttagcctttctctggcagcaggacaggctcatccctcttatcagacaggctggacttgctgggaagttgacactctgggggcggccttcatggataaatactctagttttcttgcccctcaagtgagacaaccccaaggcgtgctctgtgcagtctcccgaggcccccaccagggctgagcacctgtttccccagcagcaagtgctccttaatctactttctcctggtttccttccctttgctgtctcacttctcctctccccaacgattgcttccaggattatctcctaaataaattacttgtattctaatctttgtttccagttgtttcttgaggaatccaatacaaaacgaaaccaatcaaagacaccaaacccaacaaaagaaagagaactcttctggttctgtattgtacatgtttctggagcaccatttaagtaacagaatacatcacgcactgtctttgacgctggtagggaggtctcacaaataactgtacaggcaaataaacagcagtataaaagaggagtttgactctgttgtaggaggtggttatcagggaaggcttcacagtgagggtgactggaggttttggaggatgggtaggagttctccaggtagaaaaaagaatgatggaaacagcatattaaaaaacccagaagtgtaaaaaagcacaaggtactcagggaaccactagtagtttagtatctctcatactactggagaataaagcatattttggaagtgataaaggatttgtaggaaaaatgaggagagaattagaatagcaggaggtgtggttaaatagccagagtcttgtctatactcctcaaagtgtttaggcattatcttggaaaggttggaggattttttaaaattgtgggttatctttttctgattgcataaatatcaaatgctcattgtggaaaagttggcatatacagagaagtatagagaagaaaataaaattacctcaaatccagagttaattaaatcacatttatgtgttggtgtgtttcagaggagtttcaggcagaggagtgaggtggtcgcacttgagttctaggtagagctctggcagctggtgacgatcatgcagctggaaagatactgaacgtggggtgaccagctaggaggctgctgcagtgaggggtgatgagggtcctctgttgtggctttgcagggtgtttcagaggtgggattctcagcacttgaaaactagttggatggggtgtggggtagaggagagaaggggaccatgactactagagagattctgagtgtctccaccatgacttggtggagggagcagaggctggaggccaggagacttgggttctcatttccactctgtgacttccaatctgtgggaccttggacaagtccctttagtccacagagccacagtttcctgacctgatacgtggaaagatgattctcttcctgctttccttacaggattgtcatgatcgtccaatagatcaaaggagataaacacctttcatgtgtggaaacctacagttctgagctcttgtcctcaaacctctgctcaatcttttccctcacctgccttctgtcatcttccccagaagccaggggaacccatacccctctaggtttcccttcctctcccctctgcatcctgcccagaggacatttgtcacgattgtccctctggtacagatgctctaaacaccgccacacaccaccattctttcattcattaactcattcacttcataggctggttgatgctctagtacgttccaggtgccagaacacgtgctgtaaaagacagacaaggtccctgtgctcatggagctcacataccacccaaggggggacataaagttaaacaactaggacaaattcggatagcgatgtaacaaatgaataaatagggtgataggatagagtgagcgtgtattttcgatttgagtcgtcgggaagggacctctggactgagacctgaacaactcaggcagagaaaacagcaagtgtaaaggtcttggggtgggtttgagcttaggatgtttacagaatggaaaggtcagtgtggctgggctgatccaagccccacccaacccacttagcacggccacctctctgaagcctccttggatcaacaggatgcttcccttgctgattcagctccaccctacttccacacatctgtggtcacaacacatcctgaccacactgggttgtgatagactctatacactggtctgggagctccttgaaggcaggggctatctcctctctagccagcactgttcacgcacacagcagatgatcagcatctgctaaagggattaatacattaatcaatagatgagtgaatgaatgagaaaacgactctcaggtccaaatggctcactcctttacttgtctaattgttaccttctcaaattccctgaccccgtatgcaaactgcagccccactgtccccccattccctcacccatcatataacgtgtgtatttattatgtttcccgtttcctctgtctccgccagcagaatgtaaactccatgaggtcaggaatctccgagttatgttgcgccagtgtaatccaagagcccggaacagtgcctggcacacagcgggcatatggaagaacaaatgtgtgaaggtgtgaatgaatgaataattgaaagaataaatagtagttctcagcctcacagaacacgggtcacaacctcaaatgacctgctaccctgcccataaataacagagatgcaggagtaagtgctgggctgtgacctgtcaacatgctaagccgctcaaacaaaactgcccaacagcccgctggccgcctatttgcagcactgggccctgagccgcacattcccatttcgttgataaagaaactgaccagatagtttaagtggcctgctgcggaagacagagctggtgctgcaccggtcgctgcttccccagtccttttttggcctcctttctgacgcgacgcagaccccagttctggagagtctgtcactcgctccccgtggtgggagatcagaggcctggtgtccttgggagcggcgagcggtgctcggcgcaggatagaaagggagtgcgcgcccgagtcccccagatccctgggaacccgcgccaccctcccgcccctgcccatccccggccgcgctgtcagtctccattagcgctaacaggctccagacggagcgggccgggcgctgggttaatgcaatcggcgcgttacctggggcgcaggctacattaccagcccggcccccgccaggcacggccagaaccagtcagcccgcgccctgccggccgccccgcgcctccagctcttccccggccccgcccgaacgccacacggcggagcccagccccagcccgcgccctagagcctgccaaggcgccgccggtcgggggccggcagggcgcaaggcaccagggatcccctcgccgccggacacgtgagtgcgccctgagcgcgggacagggctaggtctgcctgggaggcccgggccgagacgcgccagcagagggctagcgagtttgtagtgcagtgacgttaagtgtccgagaaggctcctgtggctgttgaagtgtcgcggacctgagctggggagggggtcggcacgctgccctcagcctcggtgagttcaatcccagccatttggggcaggcgagagtgggtgaacgaggaaaagtgctgcagggtcttcagccgcccccagagggctgtcagaagtctccaactcttgagttccggcgtgccccaacctctgtttccaaatttttccagcggacgcgcgcccttttctgggaaccctgcgtccgctcagcgcgcgctcatcccagtgtctaaggcgctcccgggtggtcttgggagttgcaagtagggaggaacggccgggtaaccacctcttttccctttatccaagcagagcctcggcgtgcccccaggaccggtaaagttcctctcgccagccgcatccatgcttctggcgcggatgaacccgcaggtgcagcccgagaacaacggggcggacacgggtccagagcagccccttcgggcgcgcaaaactgcggagctgctggtggtgaaggagcgcaacggcgtccagtgcctgctggcgccccgcgacggcgacgcgcagccccgggagacctggggcaagaagatcgacttcctgctgtccgtagtcggcttcgcagtggacctggccaacgtgtggcgcttcccctacctctgctacaagaacggcggcggtgagcgtggggtcgggctgggaatttgaatctgggaggtccactgtctgcagcggtggctgggacaggagctggaatacacacggaagggaggcgaggagacaggggcaaatctggggcgcagaaagaactggacagggctaacgggaaaaaaaaagattggagtcctctggaaggtcattttcccaggctctttgcagagtacctcgagctcattccagcggaagtgtcaggattgggcaccctggaagcaaaacagcagaagagtgaaatcgagtcatgaccc

SEQ ID NO: 6976 - DNA, 6000 bp, Homo sapiens
ctccccctgcaatgaccacacccctcctgagctcctttccctcctctcccctgtcatctcccctccatccttacccacacacctcccttcccctctcccctctccttcctctggacagccttcctcctctgctggccagttgcatgatctccttgctggtctgtctgccaggttaggctgtgaggtccagtgcttggtacacaggaggagcacaataaatgctgagttgcctctgtagccgcaaagacaggaggccctgagattctgaggttgcagcagggccttctgtcctcaccatttcaggacctgcatctggggtttctgcttctctggggtttccgcatctgtggtttcctgacggctgaaagtttcagtttcttcactgctcctgttctgtctgagagccaggagatccgaggggcccactgcactcagccaggggcgagggatgcctggtagaagtgtcatttctattttgctgctgcaaagctgatgttcacccaggtcaatttcacgctcaaagtcatacagaaacggcgagaactgagactctgcggccaaatcaagggctttgctccaggtacacagaacctcagatcagaaaggcctggcccatgggttctcctggaagccagagtcctgaaaggtagggactgtgtgtgacctagcactgtgtccccaccaaccatcaaaaagagtgcctctgtaaacatttctgaaattgattaaattccatccaaatgcaggcttccccttcctgggggtctgtgctttgggacaaggtgtctgcagtctcttggcatgtcctatgatgagtccttcgaggggacctgctaaaaccctctcttaccccatagagaggcagaggggcagaagaggtttcttgaagcagcaaatgtacccctccagagcagaaagggactttggagctgtctaggccagggttttctggagggaggagcaagtgacttgcccaaggtcacccttggcaagcacagtcagggcccctcactctgcccaggaccacagcactgctggaaaccagcccaggccccctcaggctccttcctctgtgagatcttaatcaagaattttccacagctgcccagggacagggtgtgtaggaatggtgtgagcagataaagggcagctgtgattttcgccagtcaaatggcagtttaaaaggcagacgagtgataagatctaccccgagggcccagtgggaggtaatgagcagagagaggcctccacaaatcctctcccctaacaaagccagggtggggccctcaagccttcagccccactggcagatgcctctctgaggaggggctgggaatccagggaagtgggtagggaggcctgtgggtcattaagaggcgccctgagaagatttaaaaattaacacatatggtaaatgtataagctttgcaaaaaaaaaaaagtgcacagtgatcgtaacatttggggtttgtcattgaggtcctgttatcctcagctcacctctagatgcgaaactagaggccgaatgctgagctgggagggcctgtggagtggccactttcatcagccccgcttggggtcattctgtcagccaaggatttccatggaatcaccctttgccctctttgcttctgcgtccccttcataattcaacaagcgtttgtcgaatacccactctctactgttttgttgcttgggatcatccctgaacaaagcagggccagatccctgcgcttgtgagtctaacaaggtggatgaaatttctgtctcctccctagaaaagtgcactgacgtatgaaaacttatccatgattttgtgggactcctagacactcatcttggaggtggattccccaacagtgtttgctgccctaacacaggctgagcatttcatctaccccttctgcctggccctacagctgggtgggtacacctgtccccagcacctctggaagaggagtaagaggttagcaagagggacagagtgagccagccaggccttcctgtgagttctcaatcatccagtgctgactggctgttgggggtcatggagccctaaggatttcgagcaccatggagccagtcctctgggggacctgtgtgaactctgtgagcccaagcccgagaggcagggctagggagggagaggaagtatgtccctccatgtccctcccaaggatgaccagagctacagcataagccaagctcagatgtctacagctggcaatagcctttctatcccctgcctccaggaagagcaacttattctctaagaatcaggtcaggggtcccctcctccagaagccttccctggttgtccctaccctgaccctcctccagggacacctctcccattgctaccctcactacacagctgggctgatctgtttccatgctgatttcctgaacgaactcagcagcatcatgagcacaggcgcagtgcccaccatgtgtgtccttggctcctatcgcacccacctatggcatggtgggtggtcaataaaagtttgttgggtgaatggctgcaagatggaaacctcagcagaggtgacaaagagatcagtgattttctggtcagccgctagatcaccccactcctgagtagcagactccaagataggggagtgtgtgcagggcattcaacagggagcctcttgtggtcagtacttgtgggtagaagggaaggaagcagggctgggcagagggagaagtgagcttcggtgtatacccaaagcctcagctggggcagggtgtcagctctttatagccacatccgtcagtcattgaatgctggcctcttggaggaaaggtgacaacaggtgaggccagcaccataggggctgacactgagagccctcacaacagctgggaaaatacgccctccatttctagtgacacatcaagtgtgcgcccactaactcatctctccagaccctaactcacctctttcatcccctgacagctcaaatttccaccactgcctccctgcaatggcttaggcacctctggtaacaagagtgctgctcccatgccacctgcatgcaaggtgtggcctcagagtgctggcaaaatcgggtcctgatctgctccagcactggtagggtgactgctcctatgggagctggggtgccctgtctgggatggcttcaggagccaggaaaggcgctggctccccaagctttataacccaatggccctgcaggcagggcccagggaaacatggcccacactttgggtgatgcctaggggccctggaggccaccgcctggtcccaggccccagggcttgtcagtctattggtggatatggattacaattctgacctgctgagctctggtttggagttacttgtagatgtctctggaggtacacatagacattgggagacaggttggagctagagagactaatgtgtgtgtgtgtgtgagagtgtgtgtgtgtgtgtgtgtatatatacacatctttttaaatattataccagctaagcgcagtggctcacgcctgcaatcccaacactttgggaggtgggaggctgaggtaggagactcacttgagtccaggagtttgagaccagcctgggcatccagggtcaggtggttggggtgacttgagaccccatctctacaaaaagtaaaaacaaattagccaaacatgatggtgtatgcctgtggccccagctacttgggaggctgaggtgggaggattcttgaagtctggtggttgaggcttcagtgagctgcgattgtgccactgcactccagcctgggtgacagagccagaacctgtctcaaaaaaaaaaaaaaaattatataattcatctattcaaaactactaaataattttttttttttttcgagacagagtcttgctctgtcgcccaggctggagtacgatggtgcgatctggactcactgcaacctctgcctcctgggttcaagcaattctcctgcctcagcctcccaagtagctgggactacaggtgcccaccaccatgcccagctaatttttgtatttttaatagagacagggtttcaccatgttggccaggctggtgatccatccacctcagcctcccaatattaaataaattttttaaatccaaatactaatatgagaggtttttgaactctcatagagtaggacccagagtgtgtcctcaggctaagggaggacaccacccctcatattgtcttatgcccagtttctgcttccaaagaaagaaaaagtaaaaattaaaaggcagaaatgaaatccacaagcagacagcccggcgccacaccctgggcctggtagttaaagatcgagccctgacctaatcggttatgtaatctatagattacagacattttatagaaatgcactttgaaaatccctgtcctgttttgttccaatctaatgatcggtgcatgcagcccccagtcacgtaccccctgcttgctcaatcaatcacgaccctctcacatgcacccccttagagttgtgagccctgaaaagggacaggaattgctcactctgggagctcggctcttgagacaggagtcttgccgatgccccccggccgaataaaccccttccttctttaagtcggtgtttgaggagttttgactgcagctcgtcctgctacaaagccaccaggctatctctaggatcccttatggggcccctcagggtcctctctgacaactccttcttgggtcctggctgaagatctctgctgcccccagactcagaagagccactccaggactcagggagtggctggctttgggccagcccagccctccagatccaaggcgggtcccctatctccacaatcaaatggtgttctgcctccggccctgtccggggaccctgctcaccagccacgggcggtttaggccaacctccctgcctcctccccagtgcagacgcagcctataaaaccaccctgtgtgtccttgcggatcctggcccctccctggacacccaggcgacaatggcagaactgcccacaacagagacgcctggggacgccactttgtgcagcgggcgcttcaccatcagcacactgctgagcagtgatgagccctctccaccagctgcctatgacagcagccaccccagccacctgacccacagcagcaccttctgcatgcgcacctttggctacaacacgatcgatgtggtgcccacatatgagcactatgccaacagcacccagcctggtgagccccggaaggtccggcccacactggctgacctgcactccttcctcaaggtaagtgctgtctcagaagactggccacttccctgctgtgtgacctcgacccagctacctaacctctctgagcctcagttctgtcatctgtgccatggggatggaggagcgtcttcttcctgggttgagaggccccagtgaaatagtggagctgcagaaatctgggcacatgttggaatgtatattagccaatcactagcaacccaaagctagagtgggaggcctagagaggtaatgagcttccagtgagtagaagcatgcaagcaggttgcacacccctgaaagagacagggcaagaagggcctgggaaggttcacctcagagagagggctcgccgggtttgctgcccgggaggctggactgtgaagagtggagggctggaaggtggattgtcatgacccctgtctggcctcacttttcccatatgacaattgggctgaattgttcttttttcttttcttttcttttcttttcttttttttttttgagacggagtctggctctgtcgcccaggctggagtgcagtggtgtgatctcggctcactgcaacctctgcctcctgggttcaagtgattctcctgcctcagcctcccgagtagctgggattacaggagcgcaccaccacacccagctaatttttgtatttttagtagggatggggttttgccatattggccaggctggtcttgaactcctgacctcaaaggatccacccaccttggcctcccaacgtgctggaatta

SEQ ID NO: 6977 - DNA, 6000 bp, Homo sapiens
tggcgcgatctcagctcactgcagccaccgcctcccaggttcaagcgattctcctgcctcaaccaccccagtagctgggattacaggtgcccgccaccacgcctgactattttttttctatttttagtagagatgatgatttttcactatgttggccaggctggtctcgaactcctggcctgaggttatctgcttgccttggtctcccaaagtgctgggattataggcatgaaccaccactcctgtccccaaatttctttaaaaggagctatctcaccaggcgataactcaagagagaatcacagaaattagattgccttttccctaggggaagaaaatgcaaaatcacactcctaaactttctttcttctgagtggaaagggataagatatcttaacgtcttaaggggccctgaggcttgtcactgcaggtgaggggaaaccacactactggcatatttgatttctcaatgcagctgtcacctcctgccttgctgcctcctttaatgcctatgttggttttacctgggcttgctccactggttagcttctccctagttgcaagactaccagatcataatcagttattatctcccatcctgatgtgtgaaaagctacagaatttgtgggacccagtgcaaaatgaaaatgcaaggcttctgtttaaaatttattaagaatttaaagataatagcagagcattaaaccaagcatggggccccatccactacatgggtcccacacccatgaagccagctttgatgaaaaaagggttaggccaggtggtggctcgcacctgtaatcccagcactttgggaggccgaggcaggtggatcatttgaagccaggagttcgagaccaggctggccaacatggtgaaaccctgtctctactaaaaatacaaaaactagcttggcttggtggtgggcacctgtaatcccagctacttgggaggctgaggcaggataattgcttgaacctgggaggtggagttgcagtgagcggagatcatgccactgcactccagcctgggcaacagagcacgactccgtctcaaaaaagaaaaaaaggtcagagccttctcagccgaccaaaaccacttgcagaaagctgagtgtggggacaatttatttccaaagccctcaacctctcatcttaatataaagacagctgagaaagaaatcaccctgtattgtgtgttatattaagattgactattgtggactgaattgagtcctccaaagagatgctgaagccctaaccaccagtacctgtgaatgtggcagcattgggaaatagggcctttgcagatgatggagttaagatgaggttattagtgtgggtcccaatccatgatgactggtactcttatggaaaaaagaaatgtggacacagagccagacatgcacacagggaagatgatgtgaagagacctacaaaaggagaacccatgagaagatgaagacaggttggggtgatgcttctatatgccaaggaacgtcaaagagtgccagcaggccgggggcggtggctcacgcctgtaatcccagcactttgggaggccgaggtggacggatcatgaagtcaggagtttgagaccagcctggtcaacatggtgaaaccccatctctactaaaaatacaaaaattagccaagtgtggtggtgggcgccagtagttccagctactcaggaggctgaggcaggagaattgcttgaacctgggaggtagaggttgcagtgagccaagattgtgccactgcactctggcctgtgcatcagagcgagactctgtctcaaaaaaaaaaaaaaaaaaaaatcggccaggcgccgtggctcacgcctgtaatcccagtatgttgggaggccgaggcgggtggatcacaaagtcaggagatcgagaccattctggcaaacggtgaaaccctgtccttacttaaaaatacaaaaaattagccaggcgtggtggcgggcacctgtagtcccagctacttgggaggctgaggcaggagaatggtgtgaacccgggaggcagagcttgcaatgagccgagatcatgccactgcactccagcccaggcgacagagcgagactccgtctcaaaaaaaaaaaaagtgccagcaaaccaccaggataggagaggggcctggaagattctcccccgaggcctcagaaggaaccaaccctgccgacaccttgatctcagacttccagtttccagaaccaagacaataaatttctgtttcttaagccaggagttcccaacctttttgacactagggaccagttttgtggaagacagtttttccacaggccagaggtggggtggggggggcattgtttcaggatgattcgagcacattacatttattgtgcactttatttctattattattacattgtaatatataatgaaataattatactactcaccatggtgtagaatcagtgggagccctgagcttgttttcctacaactagatggtctcatctgtgggtgataggagacagtgacacccgaagtatggtgcttatgtcaagtctacccattttggctgctgtcactgcagaaaaccctgcttcacagagatgggatgttgcaataggccaggcatggaggctcacatctgtactgctagcacttttggaggccaaggcagctggatcacttgaggcgaggagttcaagaccagcctggccaatatagcacaaccccatctgtctctactaaaaataataaaaattatatatatagccaagtgtggtggtgcactcttgtaatcctagctacttggtaggcggaggcatgaggcacaagaatggcttaaaccagagaggcggaggttgcagtgagccgagaacgtgccattgcacttcagcctgggcgacagagtgagaccctgtctcaaaaaaaaaaaggatgttggaaatgaaagcaggcttttcagtgtttttgtggccatctcaggattaaagcctagactttaacccagaacgtggagatttgaagttgtctcaaacatactgtttttttgttgttgttgttgttgtgtttttgtttttttttttttgagacggagtctcgctctgttgcccaggctggagtgcgatggcacaatctcggctcactgcaacctccacctcccgggttcaagcaactttcctgcctcagcctcctgagtagctgggattacaggcacgtgccaccatgcccggctaatttttgtattttttaggagagacggggtttcaccatgttggtcatgctggtctggaactcctgaccttgtgatccacctgcctcggcctcccagaatgttgggattacaggcgtgagccacctcgcccagcctcaaacatacttttaaggccaccagatgcagctgtacaactgaagtacatacacttgccattgtaaagcctgccaccagatgcagcttgtcacttgccactcactgatagtgttttgatatgagtctgcaagcaattgatttatgatggcctctgtgcagtgaaacctctctgctaatgttaatccgtatttgcagccactctcagcactagcatcagcaactcagctccacctcccatcatcaggcattcgattctcgtaaggagcacagcctagttcccttgcgtgcacagttcacaatagggttcggctcctgtgaggatctaatgccccctgatctaacaggaggctgagctcaggtggtaatgcagcgatagggagcagctgtaaatacagatgaagcttcgctggtggctcacctcctgcggtgccgcctggttcctaataggccagggactcatagtggtccgtggcccaggggggttggggaccccgtcttaagccatccagtttgtggcactttgttatggcagctgcagcagatgaatatacccaccaaccagaccaggctcctcctgttaccttcctgaccttgacaagctcctgacaacacctgaaaaaacagatgtcccaagggggttggaacaaggagggagccggggcaatgtcagttttgtttttcaagcctttttttttttttttttttttcctacagaggaggaggagggaacgcctacaataaagaggcctttatggtcccacttcaggaatcggagaaccccgccctcctcgtctcagccccaatttaacgggtgcatgtgtgagtatcttataaagtgacgcgttttgagggggactccagtgtgagcaggactgtggctgacttgtcaatcatcattagggtgatgtcccaaacgttcaagtctgaggcccagggaaattggcaacagctgcctggatgcctccatcctcccagcccaaggaaaatctggccttgctccttcgttgtctttcttaggagcacgtggagttctcctaggtgggcttgcactcggggtcgcccagccgttctttgagggttcgagtgggtaggcttcccctgtaggacgggcttccccgtaggtttccacgtggggccacagaggcaggaaaaggggaagtgggcactgacacctggggtgaaaaagggtgggggtgcggctttgtgaggaaagaatttgcagagactgctaaactggggtctgctaggataccccactccccaccccctgcctcgggcgccctcagccacccgagctgggggcctcgcaggtctcagaccaagctccccgcgcggcctgcagcgcacccaaacatggccaccgaacccgggttcccggggcacagccgcgcctctgggtgacgcagacgcggcgggttgcatcagcccgtgcccacgtgctcggtccgccctctgccacccggatccggacgccgattgggccacgttgggagagtgcctccgcctcagccaatgggcggcagccacagagcgttctgtccgcagagccgggcgcggggcttctataaaaggcgcccgaagcgggggcgcgcgccccagagacgtgaactgtcgttgcagagattgcgggcggctgagacgccgcctgcctggcacctaggagcgcagcggagccccgacaccgccgccgccgccatggagtccgagaccgaacccgagcccgtcacgctcctggtgaagagccccaaccagcgccaccgcgacttggagctgagtggcgaccgcggctggagtgtgggccacctcaaggcccacctgagccgcgtctaccccgagcgtccggtgagagcggccccgacttcccgcccctaggctgtggccccccgccctctgctggggatgccacgtccggctgccctgtcctgtggcctcctcccgctgacggctgcgatcgctcggccggtcacctcccccagggctgtggtctccccttccctgccccgccgacgcgggcgcccctctgttgcccagtagccgtcagtaatcagcagcctgaccttgggcgagtcatttcaccctccaagcctgtttctcccccagcggccaggcaactcggtgttcctaattgggcttgcatccaatggctagaagtaagaaaacatccgtgctgcaaaatgaggtttctgaacgcagcctctctgcagggagaggagcgggcaggtgccacccggggccgtggcttgagaaacctggggaccgcccagacactgtggacggaaggccccacacccagaagcaggacgtggctcttctcctccctggccaccttccgccgtgcccctccctgtcgcactggaccgagcagccattgccgagtcccggggtggagccccgtgcactttctgaccaagagcgactgagaagggaagcaggcaggagtcgccttcagtctggttttaggacggcagcctctccattattagcaagacttccttgctttgttttggttgacacatctgtcaacatcacccttagcaccgcctgccctggccaccacgtgatgaggctgtaagctggcccttcctgtatttactttctgctctgatattatgtaagtgtcagcagtgttcttcactgcccacgagcataa

SEQ ID NO: 6978 - DNA, 6000 bp, Homo sapiens
ataagggttgaaatcctggctctgctactcagacactgtgtgaccttgagcaagttactcagcctctctgagcctcagctctttcatcagggaaatgggaatacaaatagcacttacatctttcagggctattgcaaagcatcattacatgagaaaatggagatggaatgcatagacagaatgtggcaaaggcttcgcggggataagatgcttgtcagaataggagtctggaagctgcatgggggccggcacgtttgatctgagcactgatgggctgggagatttgggttgcagaaggaggaaggaaagcatgggggaggacagcatgggaaaggctcaaagagggaagcctcagattggatctcgagtattcagcaaggttcagcagacacacacaagcctggtgtgaaccgggcagtgccacactgggctcgttactgaattctgtaaaacgggcggatcctcaaccctctctcaaggaccccgtgaagtatgagaaataagagaccgagcctgagacagggatgacacataggaggggctcaggtagtgctggtgactttaactccagcccagcctcagagcttgtagcagaactgtctcttttaattccctggatccccattcccaggctggcgcagaactgggcaccaaccaggactgagagactggttgattgattgattgcctgattgactgatttggtgactccttgaagccttaggaaaaaggacccactgtccatcagaatataccacagaacacaggtacacacccagccccgcacctcgtgtctgcctcaacataccagtgtttcatccgcttgttcattcactattcacgcattcattcattcattcattcattcattcattcaaacagtgggctcttcctccctgcctgacggccaccttgagctcagatccaggcaccccaaagtgagcctagcccagtttctgctcggaggagttctcagctgggcctgcagctctcatcacaagctttctgttccttgtagaatcacagctgaggatgagacccctccctgctcctccttcccgctcttcctccttctgagccccttctgagactacctcaggtgagcagccctattttatgttccctggaggtgtgtccgcccctcagcacagcacagccagctgggcaaaagggtttttcctttgcccgtaactgagcagatgggctcatcaagccctctgccatcagaccatcacctgccttagaacacaaaacactcgactctccccccagtctctctgacccggggagcagcgggctgactgccggttctaatgagtgcacagtttcaagttcacatttggggagcactcacctattaccaggtgctggggataagcacccaaataggacacaatcccggtgggaaaggagaggagggttgtgaatgaggtctgtataaagtgccctgggagctcagaagagggagtggagtgtagagacaatgagatctgggtggctctgccagggctctgcgcacaggcgaggaaggagagagaaggaaacacacaaggtggaacagcatgggcaaagtcctgaggcgtgaggctgcagggcttcaccacgaccgcccctgccaagctgatggcatcgttttcctgccccatccttgggtgtctcacgctgtggggaggaaggaaaaggaagtcttatttggggaacccctgctgtgtcccgactcaattacagcagggcaggaaagctccctgggtaaggagctgggctctggaaacagaagcgtggctcggaatttccgccccaccactgacaaactctgatctcagaaaggctttcactcccagcctctgttttcccatctgtaaaatgggcctaacagtagtaccacccccgcagggttgtcctgaggtttgaatgaggagtcccaaggagagcttagtgcattagcagcagacacaaaggctgtggtcctcaaatgtaacaacacaaacacgtttcctggggagctacaaacacataagtcctgggattctatcaccagccattctgaccccatcagcctggagtggggcccaagaaatctgcatattcactccccctctcccaggatggatggcttgaagaccacactttgagaaacagccactcgataaggcttgctggtcctgtcatttattttcattgtctcatttcatcttccaaacggcctgcaaagtctgaacagataactcatttcacaggtgaggaaagaagctcagagaggcaagtcggctgcccaggtcatgcaggcagcaacgggtcatgctaggatccaaacctgggtctgcaacccccacacctgtacctccccaagcagcgctccctgtcgggtcaggcttcctcctggcagaggccaggtgggcgtccccaggccttgtcgtcccacccgccatcccacccccactgcctccactgttgcttcctcctctgctactaatctggtctcacagaccatcccatttcctgctagcccaccagccgccttccttgctcccaatgacacttcctggccttgtgccctcctgttacctcctttgcctccagagaggttggagcagaggctgggcagtgccagaaatcaggcatgaaatcctcagggggaccaaggaggcaccagcctccctcccacagtctcagctacctctgctacggtgacccccagccccacccctggggcccacagctcatgcctggctcaccattcctttgtttatggaccacaggaacagtcgttttcagggcagagtcaacttcctcatggactgggagtacaaagggaattggcagatggtgccaggacaggccctgtccccatctgccacagccccgagtctgagacccagcaggaagcaatgcacaggccagtgtatccccatgggcacgtagaccatgaggacaggcgggggtgagggggatgtggactggaacacaggggacagagcactgtcctggctcctctgcggccaaccccccctctgggcaggagaaagcagagttaatcccattggagaaggaagcgctgagctgttgtttgttcattccacaatcggctgttgaatgtgttggatcccactcagaattccgccccaaggactgttctccttccagcaggtcgctcctcagtctccagcatcatctgtcttcccgtctgctggatgctccctggggacatgagcgtgctgccatagttaaaaaaaaaaaaaaaaaaaaaaaaaaaaaaccctcccacttctctgctcccattcactgtaagacttggggaagaagctacagtcacacgtgactccacatccccgtccccctttctcccctttctctagcccctccaatctgtcttgtctaccttttcctgtttaacctgttctggtcacagtcattgatgacctcatcttccaaatccaaagttaagtctcagccctcatgctccccaggctgacccactgactactcccctgccctcctcctctgccctctcctggcattcctccttcatcatgggaccctcttctaatggatccccaaatgtcagagggtccaagtcctccctccctccaagctcatccatgcccatggcctcagatgccagccataagctgttgggttccaaacctcgactccaggctggactcacccctgtctcccccaccagcctgacacctccacctgggtatctaacgagcatctcaaactcaacctgcctgagacagaggaatcactatcccctcctcctccaaaaatatccttccatcacactccccatcttgtgctctgatttactaaacggccctgggccctctctttctcagggtctctgcttgcccagctatataataaaacaagtttgggacttcccaaccattcacccatggaaaaacagaagcaactcttcaaaggacagattcccaggatctgccctgggagattccaaatcagttgatctggggtgagcccagtcctctgtagtttttagaagctcctcctatgtctctcctggtcagcagaatcttggcccctcccttccccccagcctcttggttcttctgggctctgatccagcctcagcgtcactgtcttccacgcccctctttgattctcgtttatgtcaaaagccttgtgaggatgaggctgtgattatccccattttacagatgaggaaactgtggctccaggatgacacaactggccagaggtcacatcagaagcagagctgggtcacttgactccacccaatatccctaaatgcaaacatcccctacagaccgaggctggcaccttagagctggagtccatgcccgctctgaccaggagaagccaacctggtcctccagagccaagagcttctgtccctttcccatctcctgaagcctccctgtcacctttaaagtccattcccacaaagacatcatgggatcaccacagaaaatcaagctctggggctaggctgaccccagctagatttttggctcttttataccccagctgggtggacaagcaccttaaacccgctgagcctcagcttcccgggctataaaatgggggtgatgacacctgcctgtagcattccaaggagggttaaatgtgatgctgcagccaagggtccccacagccaggctctttgcaggtgctgggttcagagtcccagagctgaggccgggagtaggggttcaagtggggtgccccaggcagggtccagtgccagccctctgtggagacagccatccggggccgaggcagccgcccaccgcagggcctgcctatctgcagccagcccagccctcacaaaggaacaataacaggaaaccatcccagggggaagtgggccagggccagctggaaaacctgaaggggaggcagccaggcctccctcgccagcggggtgtggctcccctccaaagacggtcggctgacaggctccacagagctccactcacgctcagccctggacggacaggcagtccaacggaacagaaacatccctcagcccacaggcacggtgagtgggggctcccacactcccctccaccccaaacccgccaccctgcgcccaagatgggagggtcctcagcttccccatctgtagaatgggcatcgtcccactcccatgacagagaggctcctcgagggcacgctgggcctcctcgtggctcagagcagggtcggggaaggtgcacccagaggtagtgccaagggcacaaatgggcatctcggggctgaggggggcagggcaagggcttggctctcccagaagtgtattctccaactcaaaaaggcccactggccttcatcagtgccaggctcagagagggcagtattctgccccagttgcccagcatgccggggcagaggactggcacccaggccttggcctcccctcggtgccttacccttactggagaggatttaccaaggcctgacaccagcctcctcagccccctacccatacgccactaaagctctatgctgggatctggggaggggccctgaaaaggaagctccgagccttggcccctctcggtcagccagtgcccccatttcaggataggcaagctgaggcttggctctgggcacttgaggtcttgcctttccctctgggcctttccctgcccaaacaccatcggggcccactatgtgtcaagggagctgtagtctggacagcggtccaccattcctcccaccagcaccctttcaaaggctagagcataagagccccaaggcccccacagcccaggaagtcccccagaagcaggaggtctgggccaagagcctggcctggagacagctgccctgggtacagatcccagctctcccatttgctctggggtgaccttgggaaagttacccagagtttccaaaccacagtggggaacaagggatggtgtggggctcattattttaccattaacaactccacaaggtagatacattctttctttatatctcagtgaaagcaactgagctttggaa

SEQ ID NO: 6979 - DNA, 6000 bp, Homo sapiens
ctacagtctcccaaaggctcctgagatgtaaaaaggctagagtgggttggggtagggtcaggaaacattccaggacagtgccacccctgtcctactctgatttttagccacagctagggaaacaaagttgctagtaatgaccagatttctagggctatccccactgtcaggaggagagggctttcctggcctttgcagcagggtcagagaagcaccccagatccccctacccggagctcagggagaagtcagtgctataccaggtgtggtagggccttgggtatcggagaggctcctgagacacttcccagaagggagggtagaactgggaggctctagattaggagatgagatgcaaggccagagggacacattctcccctctggcaaaggcaggtctgggctgggggaatattttggaggggaggaaggcactcctgagttcccccagggacactaggcccggcccaagacactgtcaagctcccttccaccaaccagggccaggagatgagtcagaggctgtggccaggagcttcctcctagtctaggaggaaatgagcaaggctttctgagatctgaaagctctttaaaaaggaagcccccaggggaactctaggggctaggctcggcccaatggggtgtgtgggtggagtcccagggagaaagcaggctggcctctgtacatccccagggaggggggtcatctgctgggatgatcagggccagtacccggggccagtacccagaggaggacagaggccacttggctgtgtcctgtcctctgctggacaactgtacataggacgaagcaatgagtaaagaaccccttcctcttatttctgccctacagcttgggacagggatgccctggtttctgggccacctcttccctctagagggccagcaagacaggcctgagtcatgtctgtgactctggggcacccacttataggactacgggaggaaccagctgttgacatttcctgcaaggaggggccctgctcccccttgctcagctctctgatgtccctgtctctgccctattctcagcccctcttcctccagccttctattctggggctgtggtcatagtttatatttgggttgagcacatcacagtgcatctgaccattcctggcagagttgctagccccagggaatcctggcttctggcattgtggtaacctagtgtgccacctccatatccctgtgggggagggaaggcagtcctcaggtactccaggtgggagaacatgaaatcggggagaccaggaaggactgcattggggatgaggaacttatattcttcaccggagctcagtagtgtcctcagctaaggagcagggaacacagggcagagcacctggtagggttgggtggggacacgggtcccatgagagggagatagaaggagtggttctgagcctctttcttgcagctgacttcccaggcttgcccccagctgggaagaggtgtgtcaaggggctgggcatggtggctcaagccttaatcccagcactttgggaggcttaggcaggcagatcacctgaggtcaggagtttgagaccaggctggccaacacggagaaaccctgtccctactaaaaatacaaaaattacctgagtatggtggcgcacacctgtaatcccagctatttggaaggctgaggcacgagaattgctagaacccgggaggtggaggttgcagtgagccaagatagccccactgtactccagcctgggagacagagccagaatccgtcttaaaaaaaaaaaaatcgggggggtggtgtcagggctaggtccaatccttgagttgcaggatgagaggaatacaatatattctctagtgccccacccttatttcaggatccggactttaggagcctggaagcgggaaccagtcttagttcagcactcctgtcttcccagcccccatcctgaatgggaggtggcctccagctgcacacgcttcttccaggcacacctcaatttgcccctctgaatagggcaagagaagcgggggctgagtcaaaactggcggtgagcagtgtcctgcatccttccagccatggccttgaagccggggttctggcctggacacgtgccactctccaggccaatagtctcaccacccctcccgccagcgctcagaggcggggctggccgcagcgcgaggaatgcgggctgggggcccggggcacattccagggaagaccccaggcccaaggggcaagtttacgcaactcgccgcccagctgaggctgggagcaggggagggcacccaccccgactctctctcctcttctccagcactggaggcggccgggctggtggggagcttgtggaggtggtagtgcgcctcccagagtcctggcccggaaacagcgcgccggaaagggctgcctgcggggggctgacggcggcgagagggaggggagaggaggtaggctggccatctggaaaagggcctctttccgcactgtgcacaagtccgcttcggggcggcagcaaagtagggcaggccggctgtttaaaattagtccggccctccctctcactttcaggcgcgggccgatgggcggcgagtgtccgggggtgggggcgggagcggtgactcaaagggcttttacacccgtgcagcctcctgcgctctgcggatcccgggccagaccgcttcgcggggactcccctcaccccgtgaagtctctcctcggccggcactcccatactcccattgacctacagggtcaagccccaatccagcttcctgacaccgcaggaaacctctgccacctctagtagtccgcctcgggcccgcccctcctcgtggtcccgcccccacctcacctgaagcaggtggaagctggtccctccccagctccgcctccagggtccgctacagcccaagcggctaccgtcactctgaccagggaagccaccctggcagaccgacggcgagtggaactcgagcacctccccaggtgcgcctaattcgaagggcagtcagaatggcggagccaagttcctggcacccctcttcagtttcccctcaacttgagaggggactcccccgcaggcggggcagagtggaccctgggaccccagcccaagacttttccggagaagaacactcgctccagcctcttcccgcggagcacctcccaccagttttcatggcgcccaccctgaacccccgatcgccccaacctttctccggcctccctcaccttgagcggcgctcccagcaggcggtgcaccgcgggtatctgcgcgcccaagggcagcgccccgtccaggctgcaggtgggggcccggcgcggctccggaaagttggcacatgcgaaggggtcggtgtcttccaggtactgcaccctcacggtcaccactgataccggctctccgtccccgcggtcttccccgcccgccatggctctgcggccggctcacgcagcgcgcctccgagtcccggccccagtgcagcttctactcaaagcacactgtagctccgcggttcgggcccggccggaccggacgcggctggaggggcggggccagacggaggcggggccgaggaagggggtggagccaagattagtccccgagtgcgcgccaggaggtaaccactgccggaggcggggccgccgctagccactcacagggcccaatgggaatcccgttagttcactggctaggagggcgggaaaaaccgagctcgcgccccaccttcgagaacgcgcagaaggcggggaggctttctttggtctggggatagtgaggctgcgttctctttgaggggtgttagggcagatggggcagaagtttctttagatagtggccggccaggtctctctcagttgagggacaagatagccctcattccttccatttgaggggtgagtccctgtggtttcctcatttagggaaagcagtgagagggggtcccttcaatttggagcaagaagtgagaataaattccacccagtttgaaggaagaggtgggatcagttccctttagttgtgggaggaagagggaaggatgcccttcagttttctgggaaaagattgggaggagtcagtttgagggggcagatagaacacgttcccctcagttttggagaaaaagtgggatgggtgcccctcagcctgaatgaaaagtggagacggtcctcctctgtttggggcgctatgagccgaatgcccctcagatttggaaaaagttgggtgcatctcgcctagtttgaagggaatcagtaggctgggttttccataggttcctgtcagcttcatcaaagagatgagacagttctctgtagtgtgactgaaagggagggccaggtgccccttggtttgggagatgaagaacagcctccctcttcgcctggcacgagctgggccagtctgggccttagggtttctgggacgttgggggcagcgttgtccgtcactgctttggggagcgtccagtgcgcgtgcgcagctcaggtccgggtgggggccggcagggggtcctgggcttggcaacgtgggcggagggcggccaagcacggtcccctgcgttttgcacccggccgcgccttggtcccaggggggtgctgctcgccgcacagcagcgctggccgaggaggagccgtgcccctcccgtcctgaccgcgccccccgcagacccccgcccttcccgctgcgggctgccccaggggggccgtggccgcgcaccgctctggatctggtgggggcggttttggggaggtttgggggcgcggactcgaaggagtaggttgtggaacttgggggagagctgcactggggaatttccggagctgggactgatttagggaggaaagaggagagagtccccgactacgagagtccgaggcagggtctcggagcctggacctggcttgggggtatcggagccgggattggggggagcgggccccacgtgcctgtgacgcgggggcgcccggtaggtggcggcggcgacgcggggccggcggccgtgcggtgccgggagggcggctgggcaggcggcaggatgctgcgcgccgccctgtccctgctcgcgctgcccctggcgggggcggccgaagagcccacccagaagccagagtccccgggcgagcctcccccaggcttagagctcttccgctggcagtggcacgaggtggaggcgccctacctggtggccctgtggatcctggtggccagtctggccaaaatcggtgagtgcgtgtgtgcgtgcgccaggccgaccgccagcggcggacccgcccccaacacccccacctcctcggtcctcagattggggctggcttcttgcacggtgctgggacttaggtttggattccacaaatccgggctctcgcccagttcctgcatcgcttcttgtgggtcccaggtccctgtcttctcccctgggagctctgaggatttgcctttctgaagggctgtcccccgctctccccaactccatctgtaggctcctttgccctctccgctcccctcttccccttgcagtaggccctcttcagtctggtctctcccccaccaatccctagcctcccagaaacctctgtcgctggtgaggatgtgtggggacattgaggggagggtgttctcccaagaacacaggcatcctggttctgaaaaagcagccttccctggagaccatgtccgagtgtccattcccttgggaaactacactgccacttttcctccagctctcccctgctccccacttaaagctgctgccttcttgtgcctgtgtatgggtacccccccaacccacgttcaggtccacattcttctcacttcagggtataagaaacttccgtgtatcggggccttcctgtgtgctgtctaccctagatgctttcatacatccgacctcttcagtcctgacagcattgaaggctgtgcttcagacttctttttccctgaatagagctgcttttccttgcatctgctccttcctcctcccttctgagcagccagtggtc

SEQ ID NO: 6980 - DNA, 6000 bp, Homo sapiens; identical to SEQ ID NO: 1883

SEQ ID NO: 6981 - DNA, 6000 bp, Homo sapiens
gcatactgctgggaaggatggtgctggggctgtataccccagaagtcttccagagctggtcttggatggctaggagcaggggcctggctgttctggctggccgtcagggagattaccatcctcctgctgtggcctacttttcccctggtttttgctctctaagtccctacttttccatggaatagagcggggcttggggaggggggaaagaatctgctctctggctaggggcttaagggctttgtgtgttttatcctagagctggaggagaggggtgggctgatagccaagctggctgggccctgggcacagctgcccaggccagagcatcatggtgatggtgtttctcacatttgcagcaccgtggacaaggagtaccttattgttctgagagagcctgggggatggatgtcctgagcccagtcccctctgcattaatatatctcttcacctaaggacctccctcctgctcttctccagagcccagaccagcacatagtaagggttcaataaatatttgttaattaatgcgctgaatgtctgtaaaacaggagtgttgtgtagatttctgagtgccatcaaccctggaattcatattccttttaaccctcacaacaactctgtaaggtcaggattatgacccccccttatattttattttattttttgagacaaggtctcattctgtcactcaggctggagtgcagtaactcagtcctgactcactgcagccttgacctcctgggctcaagcgattctctagcctcagcctcttgtgtagctaggactataggtctgtgctactaaacccagctaattttatatttttgcagagacagggtctcattatgtcaccctggctggtctcgaactcttgaccttaaatgatcctcctccctcagccacccaaagtgttgagattacaagcacagagctatcctcattatatagctaagaaaaatgaggcttatgggccgggcatggtggctcatgcctgtaacccctgcactttgggaggccgaggcgggtggatcacctgaggttgggagttcgagaccagcctgaccaacatggagaaaccctgtctctactaaaaatacaaaaaattagaattagctgggtgtggtggtgcatgcctgtaatctcagctactcaggaggctgaggcaggagaattgcttgaacccagaaggcagaggttgcagtgagctgagatcatgccattgcactctagcctgggcaacaagagtgaaactccatctcaaaaaaaaaaaaaaaaaaaaagaaaaataaaaatgaggcttatggcccagcgcagtggtccatgcctgtaatcccagcaccttggaaggctgaggtgggaggataacttaaggccctgtctaaataaataggccaggcatggtggctcaggcctataatcccagtgctttgggaggtcgaggctggcggatcacctgaggttgagagttcgagaccagcctgaccgacatgaagaaaccctgtctctactaaaaatacaaaattaggccgggcacaatagctcatgcctgtaatcccagcactttgggaggctgaggcaggagaatcgcttgaacccaggaggcggaggttgcggtgagccgagatcgtgcagttgcactccagcctggaaaacaagagcgaaactccgtctcaaaatacataaataaataagcaagtcaggcatggtggtgcatgcctgtagactcagctatttgggaggccgaggtgtagcgggattttaaggaatcagagagaccagtggggttcaggaggatatttattaattatttaggtgcatcggcccagtcagattaacatccaaaggactgagccctgaacaaagagttaagttaccttttaagcattttgtggggtggggggagatctgtgcagggggaagcatattacagaagcaagaaacaaagacagttattaaattaattgagacatgcattacatcatttcttttttttttttttttttttgagacagagtttcactcttgttgcccaggctggagtgcaatggcgtgatctcagctcactgcaacctctgcctcccgggtcccggttcaagcagttctcctgcctcagcctcctgggtagctgggattacaggcacgcgccaccacacccagctaatttttgtatttttagtacagacagggtttcaccatgttggccaggctggtctcgaactcctgacctcgtgatccgcccgcctcggcctcccaaagtgctgggattacaggcgtgagccactgtgcccggccgcattacatcatttcttacttttcaaggagaagcatgttttacgacttgagtttatctgtctagtgaccttgtaactgcacagctagtgaaacagggtcttcacaatgcctgggaaaggaggagagataaggcttcctagccacagaaaaacaggcagttaatttttaaagaactccagctctttctctttctcagggggaattgggttttcttacatacaactgagtttctacttacacattctttaatttcttttaattcctgttccagaggcaggaggatcccttgagcctaggagttcgaggttacagtgagctttgattgctgccatgcactccagcctggatgacagagcaagaccctgtctctattaaaaaaattaaaaaggccaggtgcagtggctcacgcctgtaatcccaggattttgggaggctgaggccagtggatcacctgaggtcaggaattcaagaccaacctggccaaaatttaaaaaataaaatgaggctgatgaggcagatgtcttgcttaaagtcaaacagctctggaagtgtcagagctgggatttgatcccaggtatgtttggcaccaaagtctatacccttaattattgcactagacttttggaaacaattttttaacttttttttttttttgagatggagttttactcttctcgcccaggctggagtgcaatggcgtgatctcggcttactgcaacctctgcctcccaggttcaagcaattctcctgcctcagcctcccaagtagctgggattacaggcgcctgccaccacgcctagctaatttttgtatttttggtagcaatggggtttcaccatgttggccaggctggtctccaactcctgacctcaggtggtctgctcacctgggcctcccaaagtgctgggattacaggcgcgtgaggcaccgcgctgggccaccattgttctttttaaatgaaatcttgtaagaaaccttactacggctgggcatggtggctcacgcctgtaatcccagcactttgggaggccgaggcgggcggatcacgaggtcaggagatcgagaccatcctgactaacatggtgaaaccccgtctctactaaaaatacaaaaaattagctgggcacagtggtgggcgccaatagtcccagctactcgggaggctgaggcaggagaatggcgtgaacccaggaggcggagcttgcagtgagccgagactgcgccactgcactctagcctgggtgacaaagcgagactctttctcaaaaaaaataaaaataaaaataaaaataaaaataaaaataaaaataaagaaaattaaccgggcatggtggcaggcgcctgtaatcccagctactcggggaggctgaggcaggagaattgcttgaacttgggaggcagaggttgcagtgagccgagattgtgccattgcactccagcctgacaacaagagcgaaactccatctcaggaaaaaagaaaagaaagaaaccttactacataaaatagacaacaattttttttttttttttgagacggagtctcactccatcgccaaggctggagtgcagtggtgcaatctcagctcattgcaacctctgtctcccaggttgtagctattctcctgtctcagcctcccgagtagctgggactacaggagcctgccaccaagcctggctaatttttgtatttttagtagagacagggtttcaccttgttggtcagactggtctcaaactcctgacttcaggtgatccacctgccttggcctcccaaagtgctgggattacaagtgtgagcagtggcgcccagccgacgacaatgttttattggtgttaatttatttttaggtttaaagtataacattagcttatacagtcaatcaaagacagttccatgtgcaaagtacatactcaataaagatttgaatacagagctactgaaatggggaagatggatggaggttacaatgcacttaccatctgcagcacctattttaacccctccaagttgggttgactgtaaagtgaaccagttctgatcctatagagaagtcattgtgaatggtaacaattttttaaaaatccgcttgcttttcagactcggcatataaattaaattaacaacaacaaataaccatgagtccagaagttggcccaagattgacttcacctatctacaaattaaccctttgcatctcttctttgatggaggccaaattcaacacatggagtgttgaaattattctaagtgcagttttaaaaaatagattttgttaatgaaaattaagtctatcctttgcggagttccagaggcacttccagaaacctctgttggaaagcattgtttacccaagctcgcattacagagtcccctttcccccaaccagaaacttgaaactttctccctatttcccgcgatccttcctttttctatcaccgacccgtctcgcaggcagcggtcaagttactttgagcgacaaatagacccaccccttcaggagagtgcccgtccccgccccgaagaggttgattggcaggccacgctcggagatccgccagccgcgtagcccagtttcgggagagtccgcccccgacccgcccccgacccgccccgtaggcttgttttggcgtcagctgcgcgctgtgatgacgccacgacgctaacgcccgagaatggcggcggcggcggcggcggcggcggccgctgccattgcccggagatggccggcagagccgccgagacgccgaagagcccgccgcccgcgcgaggtgaggcggcccggcccaggacgacggcccgacgggcgggaggggcagccgaactgtggtcgtggtcgctttctggcgctccggggcctgcccctggtcagcctgcagcgtcggcccgtgccccgtgcgccagggcctacagggttggagagcaggccgggcgatggctgctcgggttcccggcgtccgagtctggactggcctcggaacgtgctgtcgtgctggatagcccgtctccaggcccgcttgggcctggtggacgtggtcggttgccctgcctgcttgctgttcagccgccccgcgtccagagcgggtcaggttgatccaacctggttgtccttgtccttactgccttctcgcgcccggcgcctactccacacccctcctttgcgtctgccaggggccggcggggcagctgatcgcttccttgtgcaggctgggaaatagcaggtctgagtccagctgggttgcttgcttggcaagcttgtcattcctctacctgcaaggggaagcctagtcccccacacttagtccccctccataaagcggctgaagtgataattcccacctgaaaatctgagtaagtccttcactgcctgaaactagttccttagtgccttcaggacaaaggccgcacttcttagcaaggcattcagggctcttcgtaatctggtgaaggtttaaccagccaatcaacaccggagcacttctgtgctccctttacgtagtttattgttgttaaaacgtgtggcgctcctgttagctctggtttcatacctttgtgttttagtattactaattttgagacaaggcctctattgcccaagctggagtgcaatggctcattcatagctcactgcagccttgaactcctggactcaaatgatcctcccgcctcaacctcccgagtagctgagacaagaggcactcccctcc

SEQ ID NO: 6982 - DNA, 6000 bp, Homo sapiens
acgcgttttgcaaagtttgtgactcaccattcaaggccccgagtcttggactgtgaagcatctgccatggggaagtgctgtttgttatcctttctctgtggcagtgaagaaggaagaaatgagagtctagactcaagggacactggatggcaagaatgctgctgatggtggaactgctgtgaccttaggactggctccacagggtggactggctgggccctggtcccagtccctgcctggggccatgtgtcccccctattcctgtgggcttttcatacttgcctactgggccctggccccgcagccttcctatgagggatgttactgggctgtggtcctgtacccagaggtcccagggatcggctcctggcccctcgggtgacccttcccacacaccagccacagataggcctgccactggtcatgggtagctagagctgctggcttccctgtggcttagctggtggccagcctgactggcttcctgggcgagcctagtagctcctgcaggcaggggcagtttgttgcgttcttcgtggttcccaggccctgggacatctcactccactcctacctcccttaccaccaggagcattcaagctctggattgggcagcagatgtgcccccagtcccgcaggctgtgttccaggggccctgatttcctcggatgtgctattggccccaggactgaagctgcctcccttcaccctgggactgtggttccaaggatgagagcaggggttggagccatggccttctgggaacctatggagaaagggaatccaaggaagcagccaaggctgctcgcagcttccctgagctgcacctcttgctaaccccaccatcacactgccaccctgccctagggtctcactagtaccaagtgggtcagcacagggctgaggatggggctcctatccaccctggccagcacccagcttagtgctgggactagcccagaaacttgaatgggaccctgagagagccaggggtcccctgaggcccccctaggggctttctgtctgccccagggtgctccatggatctccctgtggcagcaggcatggagagtcagggctgccttcatggcagtaggctctaagtgggtgactggccacaggccgagaaaagggtacagcctctaggtggggttcccaaagacgccttcacgctggactgagctgctctcccacagggtttctgtgcagctggattttctctgttgcatacatgcctggcatctgtctccccttgttcctgagtggccccacatggggctctgagcaggctgtatctggattctggcaataaaagtactctggatgctgtaaggtgccctggcctacattctgctctgagcatgaggggagggaggtggtggaggtacaaggtggctacagaggcaggaaattaggggctgggcctttacaggagccttgacaggttgtctcagcatcaaagcatggttcctgtgcccttctgtggacctcatcctcctgtcctctctcctggaatccagttcccttcctgggactaagaaccagaacctgaaacattcctgtggaaatggggtcctgtcctccccctgctcctgcctggtcagcaggccccacatgccacccaggagctgggagcaaggacagtcctgcaggtcaccctggctacaccctccttcccagcctctgtcctccctcagcttgcaagtgtcagcatcctttgaacctagagttctttttaggatgccacccttctttgcatcttcagctcatcagcctgccatctgtacccctggggaggtacagatgagagagatcaagggaggaaaagagactactaggctgagactggtatggacaaagacagaaacagagacagagccaaggaaacatggataggggatagggtcccagcctgaattttgtagtccagagcccagccggtacccagttctgtcttaactcagccccacaagctggggcgccagactttgatacaccaggggccacaagagggcgccctgaaccctctcactgaaccacctgttagccaaacctggaaggacgaggtgacccagagtgggggtaaaaatgcctgtggtaaaaatactggggtccagctgcagctctggcctcagtaaaaggatgacaacatgaaagggagcttcaccccaggccctgcccaacctgactccctgcttggccctgacacccccctactcatggcaccccactcatccctgacccattttagcttcaccatcaccctcagtttcatagctgcagagagaaagggcatggaatcagaggaggcttaaggatcagcatactagggttcaaatctcagctctactagctccagccaagttgtctggggagcctcctgaccctcagtttcctcatccaaagaatggggacatctgggtgcattggctcacgcttatagttccacctactcaggaggctaaggtgggaggatcgcttgagcccaggagtttgagaccagcctgggcaagactttatctctaaaggtgaaataggccgggcgccatggttcacgcctgtgagcccagcactttgggaggccaaggagggtggatcacatgaggtcaggagttcaagaccagcctggccaacatggtgaaaccccatatctactaaaaatacaaaattagtcaggtgtggtggcacatgccttgtggtcctagctactctggaggccgagacaggagaatcactggaacctgggaggcggaggctgcagtgagccaagatggcaccactgcactccagcctgagcaagacagagcgagatacatctcaaaaaaaaaaaaaaagatgaaataaatctgtagtcccaagtaggaagctgaggcaggaagatcgcttgaaaccaggagttcgaggctgcagtgagctatgatcacacctgtgaatagccattgcactccagcctgggcaacagcaagatctctaaaagcaaaagaaaagaatggttacaaataaatgtatcctgcagggtggtcctgaggaacactgatggtgttggagaacatctgattcagggtgtggtgtacattgggctttcagctgatgggctacgtaactgggtatgagactgcaaagccagacggagctggcatatggtgtttttttttttttttttttgagatagactttcgctcttattgcccaggctggagtgcaatggcgcgatctcggcttactgcaacctctgcctcctgggttaaagcgattctcctgcctcagcctcctgagtagctgcgattacaggcatgtgccaccacactcggctaattttgtatttttagtagagacggggtttctccatgttggtcaggctggtctcgaactcctgacctcaaggtgatctgcctgcctcagcctcccaaagttgtaggattacaggcgtgagccaccaggcccggctgagccggcataccttatatgaagctgtggcagggacacgtgggctgggtgctgacacaagtgtccagagctgtccttctgctcagccagggaggccggaggaactgatctgggaggcaaagggtgcaactcgattgatccaaatatatacgtccactcactgacacttaggggaggggttccaagcagagggcaggagggcagcaccagcgaggattcctcaagtattgtcatcccaggcctgcagagaggagaatggaagggttttaggcaggggagatacaaagtcatcgcaatctgtattctaggagcatcccctactctgtggagatggggtaaggggagcaggatagggattgagaagccgttgtggctggggagaagaaaacgaggtataggccgtgggaggagtggggaggaagggtctgaggtgctacccatctctggctgggtccctgtcactgggtggcagggagcagggtcttgggtatggtctggaaccagaggacgtgtacttgtggtcataaggctgggggaaaagattccagggccctggagaaagtcagtgcttgaggtgtggacaggaaatttcggaggagggctcaggcgcccatgaggtcaggaggctctagacagagagccccagagccaccagaggaaaaggaactcgagagaaagatggaggagcaaacagagggaggggaagggggcaggaggtgcagctcccccaagagggggggcaggaggtgcagctcccccaagaggggtggcagccctcttgggaagatgaggacagagccccagggaggcctggggttggcaaagggagcctgcagtttctttgtgggtgcgggggcctcaagggctacgagtctgagctgtgcgtgtgtttggacaagtccccagagtgtgtgtcttcctggggttcctagactgcgagtggcagtggcccggcggcggaggccgtttggatccctgtgtgagctgtagggggcgccctgggcgtcgggcccaggtcaagtgcgagataggaacggggtgcgggggccgatgagagctccccgcgggaatgtccgctgtggacgccctcggaggccccatctaactccagggcggcgagcgtggccgggcccagttcacgggctgctcgagccctgacgaggcagctgggggctgtctggcgtccacgctcacgttctgggccggcggaccccgtaccggccaggccgtggcggccacgggggcccggaagcgccgccgccagctggccccgcacggaactgtgtcccgacgcggcgcgcgctgtcgcgatccggcggcgggtgacgtggcggggcggggcctgagctgccgcggcggcggcggcgcgaccgagcatcctggcggcgccgggccactgggaggtaacgggctgggccatgggcgggcgcgccgggagcggggccggggctgggccgcgttctgtgggagccgaaccctgtgggtcttcgctgccgccgtcgggagcgggatgcggcccagaaacagcgcggggctggccgatcggggccgcgcgagaggcgctgcgggtgagggggggcgccacgaggagagagggacctcgagcgtgagggccgagtgtgggagaaacgctgtatgggtgcgagccccggaggctgatggtgaccgcgagggagccagtcttggggtgtgctggcgacgcggcgagtgtgagggagaccgggggtgtgtgtggagagggaaaccccaggtgcgagggtgaccgggacgctgagtgcgcgggccgcgccgcgagcgtgagactgtgcgacggtgaccctgagtggggctgtgactgcgcctccgactgcaggacggagaacctgtgctgtgtggcggccgcggtggggcaaagaaagacgcgggctcaggacctcaggagccaggcttcctggggctgtcgcaagaatgacgattatcattttaaaatcagtccttttactttagagaatgccgcaaggttttgtggcgtgctggagcctggagcgttgggctgctggcgctggggaacccgcgtgcccctggtgattatggctcttttgagcgtccctatagcctgtcatcttgtgtgactatctctcctgaatgtggggagatagacgtgaaacattctgaaaattctttgctgggctctaagcaaacatgttgtgtaatggtcagtataaataggaatcagggtgtcggcgaacacgtttttgagtacctcttgtatgccctgggcttggtgacacagttaaaaagaattcagtctctgcccttgataggggaaaaagccagggcagctcatctcgcagggcggctgttcagtgcccagccatccggggcttgtctctcagaactgctcccagatttcagatctgggaggagcagacttgaaaggctgtgagtacttccttatatcagttccacctctttttggtggcggtgaggccttttggggacctgcccaggctgcctgcattactcaggtcccatgtgtgctgcgcagacggcttttgcttcccaactttgatc

SEQ ID NO: 6983 - DNA, 6000 bp, Homo sapiens
aaattagaaaattaaaaaattaggccgggtgcagtggcttatgcctgtaatcccagcactttgggaggtcgaggtgggcagatcacctgaggtcaggagttcaagaccagcctggccaacaaggcaaaaccccatctccattaaaaatacaaaaattagctgggcgtggtggcacccgcctgtggccccagctactcaggaggctgaggcgggagaatcgcttgaacctaggaggcggaggttgcagtgatcccagatcgcaccactgcaccctaacctgggcgacacagcgagactccatctcaaaaaaaaaaaaaaaaattagccaggcgtgatggcacacacctttatttccaactacttgggagggtgaggtgggaggatcgcacttgagcctgacaggttgaggctgcagtgagctgtgatcatgccactgcactgcacccctgctggggtgacagcaagaccctgtctcaaaaaaaaaaaaaaaaaaagtctgactgtttcagacccactccataatgaccaatctgaaccaagccgtttcatcttttgcctggataactgcaatggagcccccaccagcctccctgcttcccttgtcccttataattttctcaacatcactcctctgctcaaaaccaacagtggctgcctcccctggttccccaagtaggggccaaagttcttacaatggcctacatgctctacaaggtgtgatcctggccctcccatactctgactcacttcctacttgctctctctactccagccacactggctttcttgctgttccaagtaatctactgtctcggggcctctgccctgttttctctgcctggaatgctctttccaaagcgtggttccttcacttccttcaagtctttgttctaatgccactttatgagtaaggcctctgggctttcttgtttgctctccgagttcccatcattttctgcccttctgtgccctgtcctgagcctggggagaatgacccctctagaaagcaacctgggctttcttgcctcaggcttctgagtgggtttggtgaatgggaggtgccaccaggagatgaaaggcaagaggggagagatgctggggtattttttttccctgcactttctctgctctgctctgggcagtggctgtgccttcctcgatcacagctgcatttgggaatggatcccacacttccctgtccccttatccacggacttccaataacatgatttcctctctgaccttcagttctcaaagtagtcatgccttccagcttttgtttgtctctctggtgcctcaacacccctgttgtctgggctccctgaaccctgcccatttctctcgtcccttccttaagacttgaacctcccggctgggcgcagtctctaacgcctgtaatcccagcactttgggagatcgaggcgggcagattgcctgaggtcaggagtttgagatcagcccggccaacatggtgaaaccctgcctcaactaaaaatacaaaaattagctggggatggtggcaggcacctgtagtcccagctactcgggaggctgaggcaagagaatcgcttgaacccgtgaggcggaggttgcagtgagccgagatctcgccattgcactccagcctgggcatggcagcgagatgtctcaaaaaaaaaaaaaaaagtgcagttgctatggaaaacagtatggtgtttcctcaaaaaataaagcaggctggagtgcagtggtgtgatcatagttcactgcagcctcaacctcctgggctcaagctatcctcccgccttagccttctgagtagctgggactacaggcccgtgccagcaagcctggctaatttttttttttgtattttttgtagagacaggggtctcgctgtgttgcccaggctggtgtcaaactcctgggctcatccacccacctcagccttctaaatgggattacaggcgtgaaccactgcccactgcgccgggcccccctgtccttgttcttgtacacggtacatgttaccatctaacatattatatttccacgtattttttcactttcctctaccctccacactctggatggcaagtccgaaggcgcagggatgtttgttcactgttgtatcttaagtggttggcacatcgccggctgtcagcaaatgtttttgaaatgaatgaatgagtgaatgaccgacaaggggagctaaggggaaggcagcggtgcggtccgcgtcgcaggcagaagagctgactctccaatctccgctcctctctccgcccccgtccggaatgctgagtgcccgagaaggaggcggaaatgagcgcgctcaacagcccaccagccgggtgtttacttaattagggcctgcatcccgaggctcgtttgtgtttaaccgtccgcctaatggcttcgtctggctccgggcgggcgcgggggaacctgcgaggcgagcgtaggcctggccaccctgtcccgccgggggcccactccattgcgccgcgcgggtgcgcgtagacctgacctcccctcgggcataaaaagcgccctgcgggagatccaggccgggagggcgcggagctcagcgagcagccccaggctttcccaaccgcgtggtccacccccagcctcagtcccagccccagctgctgggctcacccgccggctaagggaatgctcccgagataccagatgccagttgctcgttgtaccctcagccatgaaattggaggattacaacgcttctcattctcttaattcaggggatgtggggatgctagaaagagagacggctcgccagacatctgagagcaataataccaggcagcatttgggcacttgctgtgtgccagatatgatgtttagcgttttaaaccttctaatttatttaatactcatctatgagagggtaaaatactaagatcataacagccccatttgacagatgcagaactgaggcccagggggtttattttacttccccgaggcttcagcgctactaaggggtgggacctggatttgaacccaggtggggccggccttaagggcccatgctaggcctgagagagcaagacccccaccctcgcaacgcaagcaatccatggcttagccacaggcctggcggggaggaggacggatagattaccaggttagccctggaaggtcaaagaatctgtcatttaaaactccaggctgggccccgtttctcacgcctgtaatcccagcactttaggaggccaagggaagcggatcacttgaggtcgggagttcgagaccagcctggccaatatagcgaaatcccgtctctactaaaaatacaaaaattagcctggtgtggtagtgggcgcctgtagtcccagctactcgggaggctgaggcaggagagtcgcttgaacctgggaggcggaggttgcagtgagcagagatgacgccaccgtactggacgacagtgagactccatctcaaaaaaacaaacaaaacaaaaaaacctctccagtctccagtccgttcctcaaacccctaaatctgagctggggacggggagggagaaggaccaggaggtggcatccagggcttctcaaggcagcagcagaaggtgaaggaggagtgaggggacaggtgagagagactgaccgggaaagctcagctccgtggggaagggcttgtggggtagtgattgagactcaggaccgttttcatggccagagcccacttgtgtgcagcaagaggaaagcacttcgtgtctaacgtagtggaatgagagtaacgtagaagaacaacgaatcccaggtctggcgtttatctcctaggaagggtgtgggagagctgttttccaagggagactctctggaggctgctttgcgcagcaagcagtttttacccagattatatacagtatttcagaccaatttcaaaacctctgcgttttaaaaattgtctttatttacattttacagaaagttgagaaagtgttatttatatggggggtaggggtgctggagattatgagactaataacaaccctcttagctcgcaccctttggcaccactacagcttccaaactctgggactttctcgactagcttccctttgtttagctgtgaaatggaagaagcggtccgggtgtggcggctcatgcctgtaacctgagcactctgggaggcggaggatcgcttgagtccagaagttcaagaccagcttgggcaacatagggtgaccctccaccctccccccgccccaccacatcgctacaaaaaatttttaaaaattagccgggtgtggtggcgcaagcctgtagtctcagcgggagctgagggaggagaatcgcttcagcccgggaggtcgaggctgtagtgagccgagatcgcgctactgcactcctgggcgacagagcgagaccctgtctccaaaaaaaaaaaaaaaagaaaaaagaggaagttgtatccaattcagaaacgcggtccttcgggacctgctagttttataccccggaggatcctccccggcgggctggcacgggaggtggagaaagaggcttgggcggccccgctgtagccgcgtgtgggaggacgcacgggcctgcttcaaagctttgggataacagcgcctccgggggataatgaatgcggagcctccgttttcagtcgacttcagatgtgtctccacttttttccgctgtagccgcaaggcaaggaaacatttctcttcccgtactgaggaggctgaggagtgcactgggtgttcttttctcctctaacccagaactgcgagacagaggctgagtccctgtaaagaacagctccagaaaagccaggagagcgcaggagggcatccgggaggccaggaggggttcgctggggcctcaaccgcacccacatcggtcccacctgcgagggggcgggacctcgtggcgctggaccaatcagcacccacctgcgctcacctggcctcctcccgctggctcccgggggctgcggtgctcaaaggggcaagagctgagcggaacaccggcccgccgtcgcggcagctgcttcacccctctctctgcagccatggggctccctcgtggacctctcgcgtctctcctccttctccaggtactccacagcctcgccgtggccccgaccgggaccgctccctggggggcgggcggggtccgcatggggcagtggcgtcggggagagcgcggggctgcgctccctggggccaagggagtcccggaaggcccgtgaggaccctgcggtgtggggagtgcagggccgggcacgcctggacccagcctccttcactctctgccctcgggcgcaggtttgctggctgcagtgcgcggcctccgagccgtgccgggcggtcttcagggaggctgaagtgaccttggaggcgggaggcgcggagcaggagcccggccaggcgctggggaaaggtaagatcctcagggtggaaccgcagggtaggggccgcacgtgaccattttggtgtggaccgcgcgaggggtgttcgggccggggcaagggactcctggcgccacctcagttcccggggaggcgcagaacgcgcctcgggggctgggattgggggtggtggctgacggagaaggctgggcagcagagcgcctatgacatccagccccttgtccggtagccactgcttaccttgaccccctcctccgagatgccggatggctgagcccctcacccagtctcgacgtgggaagttctcccccgctggccccagcagaggaatgcgccggccacattcttcccccaacccgcgcgcaggtgtggggatgagccgtgccccgggcagcccccttcgcccctctcgggccccctttgtgaaccgtgctttgtgtctccgacagacagaccgggtctgtttcttttctccgagcttccctaccccgccccccttcttcctcggcagctggaatgcactcttaaccctgctcttcccggagggcctgcgcccttgtagcctgcctggaaactgggccctggcacacctgggctggggcc

SEQ ID NO: 6984 - DNA, 6000 bp, Homo sapiens
acctcccaccccaatctgaaccctatgactgcaccccttgccaggagatgaaagggacaagactgcctgaaggattaatctttagcctccaggcaggccagtggccaaaacacccaggaagtgaaagtctgtcctctgccataaggaaacctggagtctgtgatcccatcatgcggggtctgttatctgccaggtgacagggtctcttatctatctgcggtgatctgaagggcaaggcctctggccaaacatttcttttccccagtgatgcctgaaattccactgttagcgctggatctcagcaagatctcagagaaagctcaactcctggagtttgggttttccccagttgagatgttaggaaagcaatgggccttatcacctgcacggacaggtttgtgtacagtctcaggggattcagggaccccaccagagcccatccacagacaccaggttaaaagccctggacagcatttacaactcctttgaaagaagaaaagtctttctctagagccctctttaaagtgcaaatggccctgggaggttcgaaatgatgagctggccggcatgaaagaattttctccagtagatgcaagagataacctgaggagctttagtggcgggggtgggggaaggagagcctgggggaggggaggctccaggcagctcacaatttttcctagaactggaaagggaatgtattgggccaagagggctaatcactcacctttgcagagtgtttacaagaaccttatgaattaagtgctatcaacattcccattttacagatgaggaaaccaagatggtggagataaaatgacttatgcttctcaactaatggcagagccagaagtgaatccaggctggagtgaagtggctccagtgctcaaatgatcctcctacctcagcctccagagtagctgggactacaggcatgcactgccatgtccagctaattcaaaataatatttgttggggagatggggtttcaccatgttgcccagactggtctcaaactcctgggctcaagtaatcttctcacctcccaactagcctcccaaagtgctgcgattacagttgtgagccaccaggcctgcttaggtatccctgtttgatacaagagaaaacagagggcaggcacagtggctcacacctgtaatcccagcactttgggaggctgaggtaggtggatcacttgaggtcaggagtttgagaccagcctggccaacatggcgaaatcccgtctctactaaaatacaaaaattagccagacatggtgacgtgtgtctgtaatcacagctactcaggaggctgaggcacaagaatctcttgaacctgggaggcagagagtgcagtgagccgagatcgcgccattgcactccagccggggcaacagagcaagaccttgtcactaaataaataaataggaaacagagaagcaattcagtgtgttgcgaaagtcacacagcacctgtcttccacaaggagcccctctgtgttcccgcctcaccctggacacctgatctactgtctttggagcttggagaaggacttgccgagaagtctgaagaatgcatcaggcctgacctgactttgctgcccctaattgttttctaaaatcctttttattgaattatcagagtgtaatggaagagtcgatgagagtcgctgcagagttacgaggccaaggcttgctgggtagaagaaagtaaagccctaaaggctcccagggcccagcgatggtataaaatatgtatttttacataactgagaggaaaaaaataagcagacagtacagccccatgggggaaacgcctctttctgtatttccattatcttgttcaaggcacgatcctagtgggaaaggaaataccggagccttctccctctgagcctcctggtgggttaagagcagagggagccaaaatacgacatccaaaagacctgattggaaactcattaaaattgaggggacaggttgttggggggggcggtgctgggctgcccagaaatcgtctgcatttgagaaattacttgatggactcagaggcacctttagctctgggtgaaatattccaaacatggctttccccaggaggaagcgaaataggggctgggccttttgaaagagtaacccctactccaaatatttattgagcagttgctatgatgagccaagaactctgcttagcgattgtttttgtattagctcatgccaattcacttatacaaaggagaacactgacttccccaaggtcacagggctagtgagtggctgactccacttaatgctgtgtagttctaaccatgcttgaaggataaagggaaaggaggtgcccttgtcggggtagacaagccacccagacgtggctggccacagggagtcagacagggaagttgtctaacctaacatttgcctgtctattctgtttttgtcttttgatggaggacggcgggtgctggagggccactggcccaggacctgagacctttggcccctatctattctatttttgatcctaaaattatttcactggggacagaattctctggagaaggtgatggtggccatggtgtggctgtggcattaaaagccccactctgggggtcagaagatcctgggttttggtctttggctttgacattgacctgcctatgtgacattgaacaagttatttgcaaatcataggtttgggtgaactctaaaggtctcttccaggtcaacatcaaaaaacagactgaaaactgcagctccagctggaagactgggaccacatgagatgaagctgattgttagaagaaaggccctggaatcagagaggttggttccagtcctgcgccacctctcattggcctcaatctctctaagcttcagttgcccatctatcatatgggaataataatacagctcttgggttgttttgaaatgagcttaaatgagctggtcagtggctgggcacggtggctcatgcctgtaatcccagcactttgggaggctgaggcaggtggatcatctgaggacaggagttcaagaccagcctggccaacatgatgaaaccctgtctctactaaaaatacaaaaattagccagtcgtggtggcgcatgcctgtaatcccagctactcaggaggctgatagaggagaaccgcttgaacccaagaggcgaaggttgcagtgagccaagaacacaccattgcactccagcctgggcgacagagcaggactccgtctcaaaaaaaaaagagctggtcagtgtcaaatgcttagcacagagactggcacagtaatcttcaatgtccagcacctattgttactattttttttttttttttttttttgagacagagtcttgctctgtcgcccaggctggagtacagtggcgcgatctcggctcactgcaagctccacctcccaggttcatgccattctcctgcctcagcctcccgagtagctgggactacaggcgcccaccaccacgcctggctaattttttgtatttttagtagagacggggtttcactgcgttagccaggatggtctcaatctcctgacctcgtgatctgcccgcctcggcctcccaaagtgctgggattacaggcgtgagccaccatgcctggccctattgttactatttttacccctcacttctgtacagagcatttatggctcaagaaacatttgtcattttaattgtatgggagtcccacaacagcatagggagacatttctgatcattattcccattaggagggtggagaaactgaggctttgggaggtggtcctgacctagggaatcaatttgctgactcactaacccatgaagctctacagttaaaaaagactagattaaaaaatgagaactcagtaaaggggctgaggcaggaggatcgcctgagttcagaaatttgagatcagcctcggcaacatagtgagatcccctctctagaaaaattttttaaaaaattaggccgctcgaggcagagtgcagtggctcacgcctgtaatccaacacttcaggaggctgaagagggtggatcacctgaggtcaggagttccagaccagcctggccaacatggtgaaaccccgtctgtactaaaaatacaaaattagccggtgtggtggcacacgcctgtagtcccagctactcaataggctgagacaggagagtctcttgaacccggcaggcggaggttgcagtgagccgagatcgtgccactgcactccagcctgggcaagacagagcgagactccgtctcaaaaaatacaaacaaaacaaacaaacaaaaaattaggctgctagctcagtggctcatggctcacacctgaaatcctagcactttgggaggccaaggcaggaggatcgcttcagcccaggagttcgagaccaggctgggcaatacagggagacacagcgcccccactgcccctgtccgccccgacttgtctctctacaaaaaggcaaaagaaaaaaaaattagcctggcgtggtggtgtgcacctgtactcccagctactagagaggctggggccagaggaccgcttgagcccaggagttcgaggctgcagtgagctgtgatcgcaccactgcactccagcttgggtgaaagagtgagaccccatctccaaaacgaacaaacaaaaaatcccaaaaaacaaaagaactcagccaagtgtaaaagccctttctgatcccaggtcttagtgagccaccggcggggctgggattcgaacccagtggaatcagaaccgtgcaggtcccataacccacctagaccctagcaactccaggctagagggtcaccgcgtctatgcgaggccgggtgggcgggccgtcagctccgccctggggaggggtccgcgctgctgattggctgtggccggcaggtgaaccctcagccaatcagcggtacggggggcggtgcctccggggctcacctggctgcagccacgcaccccctctcagtggcgtcggaactgcaaagcacctgtgagcttgcggaagtcagttcagactccagcccgctccagcccggcccgacccgaccgcacccggcgcctgccctcgctcggcgtccccggccagccatgggcccttggagccgcagcctctcggcgctgctgctgctgctgcaggtaccccggatcccctgacttgcgagggacgcattcgggccgcaagctccgcgccccagccctgcgccccttcctctcccgtcgtcaccgcttcccttcttccaagaaagttcgggtcctgaggagcggagcggcctggaagcctcgcgcgctccggaccccccagtgatgggagtggggggtgggtggtgaggggcgagcgcggctttcctgccccctccagcgcagaccgaggcgggggcgtctggccgcggagtccgcggggtgggctcgcgcgggcggtgggggcgtgaagcggggtgtagggggtggggtgtggagaaggggtgccctggtgcaagtcgagggggagccaggagtcgtggggacgatcttcgagggaaggagaggggcatccgtagaaataaaggcacctgccatgccaagaaaggtcgtaaataggagtgagggtcccggggataagaaagtgaggtcggaggaggtgggagcgcccctcgctctgaggagtggtgcattcccggtctaaggaaagtggggtactggagaataaagacatctccaataaaatgagaaaggagactgaaagggaacggtgggctaggtcttgagggggtgactcggcggccccctcccgggagttcctgggggctcggcggccgtaggtttcggggtgggggagggtgacgtcgctgcccgcccgtcccggggctgcgggctggggtcctcccccaatcccgacgccgggagcgagggaggggcggcgctgttggtttcggtgagcaggagggaaccctccgagtcacccggttccatctacctttcccccaccccaggtctcctcttggctctgccaggagccggagccc

SEQ ID NO: 6985 - DNA, 6000 bp, Homo sapiens
tttgaggcaaagtcttactctgtcacccaggctggagtgcagtggtatgatctcggctcactgcaacctccgcctcccgggttcaagggattctcgtgccttagcctcttgagtagctgggattacaggcatgtgccaccacgcttggctaatttttgtgtttctagtagagacgggtttcaccatgttggtcaggctggtggaactttagtgtagatttcttcttccaccctggcctctcttggctgtcctctaaacacatgtcccccattcctacacctggtcttgtacttaagctatccttcctacctaaaatgttcttccctttctacatagcagctcaggttccccatgaaactgcccagcctgttccagctcacagagacctttcctgaaatcctcaaactcctcatgttggattctctcatcaatatttaattataaactgccttgtacagtttatacttgtactcttttttttttttatgagacggggtctcgccctgtcgcccaggctcgagtgcagtggcacgatctcggctcactgcaacctccgcctcccgggttcaaacgattctcctgcttcagcctcccaagtagctgggattacaggcgcaagctgccacacctggctaattttttgtatctttagcggagacagggtttcaccatgttggccaggctggtcttaaactcctgacctcgtgatccacctgcctcggcctcccaaagggttggaattacaggcatgagccactgtgcccggcctatacttgtactctcaagcacatttgtcttcaaaatgggtaacgttctagatggcagggaccagcccgagatctccaggtgccaaagcagtgttctctactcagagcagggcttcagcgtttgttaaatgagtgttgtaagtgcagcgtgaatcttctactactgagccaaataggaaggcttatttatcctctggaacctgtggaaaagccaattcagcaacatctgaattcatgtttttaagtgattgggtgtggaattagccctatttctaaatccccagtggtaagcagagataaactcgagcttgattgtagcagccccttaaagaaacccctccccacctccccgtgaagggatgaatgcaaataggacaccacaaactggatgctaattacaggcaaatcctccctggcatagactgccataaaggtaaagactctcttatctgcctgataacaccaggtccctggccctgcagatcagaaaaaaagagagtgctccctagggcaggccatttagggggcaaagccaattaattggtacaggcagggtgtttgttgtcctcatgaggttctatctggacccactgttggttaaggaggttttcatggactcgtgaggttgtgctgaaccagccccaccacctggaaaactccgtggagctggcggcgtgagaagggcaataagccttgggacacagttggagtctaagaaactaactaggcatgagatggtcctggcccagccccagggagacaaacttgcacccagagaagtcatgttgctgctgagtgaggacggaagggatccttccaaactggcttctccattccttgggcttctaaacaggtcacttacaagcagccagttggctggatatgactcagacacattatgtctggcctgtggagtgtgcatgtgtgtgtgtgtgtgtgtgtgtgtgtgtgtgtgtgtgtttccttcaacatttgaattaccaatgcttaaaaaaattaggagatttcacatacaaaatctggatttctggcttctcttgacaacagagcacctggccacatgaggccctccctccacagggagatgagcctctaaacggagcgtttgctctccaccaggctgatgcactcatttttgcccttgccaagcccctgcttattttctctgatgttgcagattgcaaatctgggaaggaggaaggatcagagatatcctcatctgcagcaactccaggggtctgtgatgcctctgggtgtgcaggaggtagcccagggctccagggttcataatgcaagagagacaagacatttttctttctttctttcttttgagatggagttgccctcttgttgcctaggctggaatgcagtggcacgatctcggctcactgcaacctctgcttcctgggttcaagtgattctcctgcctcagcctcctgggtagctgggattacaggcgcctgccaccacacctggataattttttgtatttttagtagagacagggtttcaccatgttggccaggctggtctcaaactcccgacctcaggtgatccacccgcctcagcctcccaaagtgctgggattacaggtgtgagccaccacacccggccaggcagttttcttttattcaaacactgatccttgaacttgctgtcactgagtgctctagagggatggccatgtagaacccgtggcatgggcaaaggatgctgctgtctggtttactaacacttgctgagcgcttaccctcagccaatctcttcaaacttcctatcagtccgcctagcaatcccatctgtgggatgaagacactggggcttactggcagactctagagccctcccctccaccaacctaaggcttcttctccatctttgtgtaagtaggaatggctctggtagggcccctcaggccatctgaagttcaaaacacattggcagctgggctggatagcatgcctataggactagctcctagggaggctgaggcggaagggctgctggagtccaggaatttgtttttgagacagcgtcttgttctgttacccaggctggagtgtagtggttcgatcatagctcactgttgccttgacctcctgggctcaagcaattctcctgcctcagcctccctagtagctgggactacaggcacactccaccatgcctggctaatgttttttttttttttcttttcttttctttttctttttttttttatttttattttttgagatggagtctcactctgtcgcccaggctggagtacagtggcataatcttggcccactgcaacctctgtctcctgggtttaagcgattcttctgcctcaaccttcccagtggctgggactacaggcacgtgccaccatgcctggctaatttttgtattttttagtagagatagggtttcaccatattagccaggctggtctctaacttctgacctcgtgatccgcccacctcggcctcccagagtgttgggattacaggcgtgagcctgcacccggccctggctaattttttaattttaatttttgtagagacgggggaagtctcgctttgttgcccaggctggtcttgaactcctggcctcaagcgatcctccatcttcagcctcccaaagtgctgggactacaggtgtgagccactgtgcctggccaataatgtaagatgggattgtgtggagtaggtgtgcctggggtctttgcttgcctgcggggactgaggtgtgaggtctgtggcccagactgagcaatggtgggcaggcaagtccctgagcccctaaaacttgcgagaggagaagtttatagactgcagctcaggtgcctataaatttgttgcagcttgggaagaagtgatagaaattatatcaggtgtatttggaaaacaggtaaactctgttttttggttttttttttttttttttttttttttttttttggagacggagtctcgctctgctgcccaagctggagtgcagtggtgcgatttcagctcactgcaacctccacctgcggggttcaagcgattctcctgcctcagcctcccgagtagctgggattacgggcatggtgcccgtaacgccgaaagtgctgagattacaggcttgagccacggcgcccggccactcattttttaaaaactagttattaattataatttctcttcaagttttcctgagatgtaaaaactcatcgccttcagctggttctaaacttcttgtctctgctaacaactctcccccctcctcgatctcaccccaccccagtgcaccccaactcacttcatctcactttactcgagtctagcactatcttttagggacctgaaaactactgtcgataaggtcagttgggaatttaggaggtcatggatgtcggaaataaaggtgtgaaaaagaagaggaggaattgttttggctttaagacaccggaacctccaaggttcctacaaaaccgtttgcagcttttgcaaaccgccttaaagtcatcagcgccccactgcggaattcaaagctaagctgtcacaattgttaacaccttctttgaccagcctttttacatttgacaattctcttcagcgcctctttcctgccagcaggaaggttttgctgccttggctttcgggagccccctagacagcgaactgccccttcgcgtgcagaagtcggggaagagtgctctcagctcgccttccttgcagggtgagtaggttttgcgggttagagagcggggcgtgggggcggggagggagagtaacaattttggaagtccctgcgtggtatctggaaagttaacgacgcttcaggttctaggttgagcccaatgaccgtcttgccttggcagctggtcccagggcgattgcagagccgcgtggccttcggccccactcgggggacccagcttcggagagggcgcaggggctgcgagtcttgcgagccggagccgcgtccacccgggactaggcgtccccgccgagcgctggcttgtggcgctccctgggaccgcgcggggtcgggggtgcgcccgcgggggccctcccactctggtcaactttcccggccccagggccgggggaggcgcctctcctggcgggcacgcgccgggtacttaagggcggctcggctgggcaggcggcagtcggagcgcgcggcggcgcggagcggagcgggaggaggggcatggagccgccgcgggcctgctgagctccggagcgcggcagccggcggcacggtgagcgcgggccggccggcacccaggaggggagggccgcgcggggctgcgccgaggccggggcgcgccgggtggcaggggtgcctctcgccgagccccccgcacccggccagctcccagccctgcgggcgccgcgtccggcgcggggaggcgggttgggggcggcggcagccccgggcttcccggcggccgttcctgcagccccctccccactgacccctcctccctttcttcctgcatcctctcctcttccagcctcgcctccctcctccccggcggctcctgttttgtgaatgaattaggaggcggacgccggtgcggggctccaggctggctggggtacccctcccccgcaccttctacgacctcccgggggtttgcacctgtccgggcaccaaggtaccaggcgcccacgttcctgcgggttagccgggccgcggcagcacgtgtccgggggagtgggctcccctcccctggccggcctggaggggcccggagggcggccgggcacaagaggaggagccccgttgggcgcacaagtttccatgccgctgcgtgtggccctgccgcggggcgcacctgtcagcgggagagacgctgcacaccagcagcccctcaaagtttcggaggcttgatggagaagcgtgcgtccttgactgggggttctccttccgtagtcctgggagccggacttgagagcgcccccaaccttgtgcccttgaaagccgagtgcgcgttagtttgcctgggctgggctcccgtggatgagcgaagggcatgaggaggcggcggtccaggctgtaggatcaccccacagcctctgccggcttggggtgacacagccccccgccccaggtctgggcaggagaacctcgaccacagcctgcaccagcgcctgattgcacgtggggtatctggctgagggacattttgggggcctctatttgggggtgggggtagtaacctgggtaatgcctctaattcctgcgggggaggggt

SEQ ID NO: 6986 - DNA, 6000 bp, Homo sapiens
attctagttttagaagaggatccacatttaatgtaaggcataaatatgccttttgcaaattattgcttgttctccagtgaacatttgatcatattcaacagaaatccaccatataaaccataatccttgaattgccccttttaaaatagattggttaaaaccaaaaacctataagagagaaatgatatttcattgtattgtaggtttgggaatcctggttagatttataatttctggccgggtgcggtggctcatgcctgtattcccagtactttgggagcccaaggtgggtggatcacctgaggtaaggagtttgagaccagcctggccaacatggtgaaaccccatctctactaaaaatacaaaaagttagctgggcatggtggtgcgcgcctgtggtcccagctactcgggaggctgaggtgggagaatcccttgaacccaggaggcagaagttgcagtgagctgagatcatgccattgcactccagcctgggcaacagagcgagacttcatctccaaaaaaagaaaaagaagaaaaagatttataatttctgagtcccctaagtccctttctcagtttgcaataatcttacgtccatgctattgacactaattttgaaactggaaagctaattaatgacatattcatgtgttctttcatctaataaacatttattaatgtatagttctacaccaggcattctgaagggtccaaaagaaagttcctgccctctagtagcacataatccgttatttctcagcacaccatgccatctgtttatcattcagcagttaagtaattcatcacttcatatttttaccaaagtatatttacaagtctgtttatctggatctggcaaactggaaaatgtttgaagggatactcaggctttgatccatgccaacatgaaaggactccaagcacatttaagtaggctggtcttttcatcatgcatgattttttttttagtgcaaatttagactttagtttgggaaagagaacagtatacagtatcctttgtaagataaatcacaacaacaaaaattaagttttattgcacaaagtagataaatgagaaagtctttcttaaaaaatgcttctttaactgtaacagcaaaactaaatgcatattttatcaaccccttatttctaattgctgtattcatttccacccttaaactatttaagcatttcatctgctgaaagtccttatatacatggtagacggaatatttctccattaatgatagatcaaaatgaagatatttaaaaattaacaaaatcaggccaaggcaggaggatcactttagcccaggaggtccagaccagcctgggcaacacagcgggaccccgactccatttaaaaaattaaaaaaaaaaaaaaaacttttaacatttaaaaaataaaaattaacaaaatttcacttattccaggacacgctggcatttggactcaatgaaaagggcacctaaagaaaataaggctgactgaatgttttccataattttcacacaataacagtccctttctatccagcttgccttccatttatctctagggttagcttttcaggcaacatccttggtcattgcccagaaagtacctgagctatcagtgattggaatggcacaggaaaccgaatcacatgggtgccctccccttggttttcaagtatcttggagttgtgcacaaaaattaggtcatgccttcagtgtcttgttctttaaacctaccctttgacaatcaggtgctaatgattgtatactattaaaaccagcacataagtattgtaaatgtgtgttcctcctaggttggaagaaatgtctttccttctatctgggtcctgttaaagcgggtgtcagttgtgtcttttcacctcgatttgtgaattaatagaattggggggagaggaaatgatgatgtcaattaagtttcaggtttggcatgatcatcattctcgatgatattctcactttgtcgcaaatctgcccttatcgtaagaacaagtttcagaattttccctccactatacgactccagtattatgtttacaatccattggatgagtgcagcattataagaccttggtgcccagaaaaatctgtcctttttggtaccaaacctgaggtcttttggaagataatgtagaaaaccactacctattgaaggcctgttttggctaatctgtgcaaactctgatgatacctgcttatgtggattcttttccacactgctttcatttttaagtataaagacttagaaaactagaataatgcttttacaaataattaaaagtatgtgatgttctgggttttttccttctttttagaaccctgtatttaaacaagccttctttttaagtcttgtttgaaatttaagtctcagatcttctggataccaaatcaaaaacccaacgcgtaaaacagggcagtatttgtgttcctaattttaaaaagctttatgtatactctataaatatagatgcataaacaacacttccccttgagtagcacatcaacatacagcattgtacattacaatgaaaatgtgtaacttaagggtattatatatataaatacatatatacctttgtaacctttatactgtaaataaaaaagttgctttagtcacgtgggttgttttttttttccaatttttaaaatgctgaaatagttttgaacctacaggaaagttacaaaaacaatacaaatcttcttcacccaaaccttccagttgttaacattttgccatatttattccattaccttgtctttctctaatatgattctctagcacccttaaattctctagtgaggacctccaaaacataaggacagtccttgcattgccaccataaagtcctcctaatcaagaaatcaacattggcacaccaccactcattccatagaccccattcaaatgatgccagccatcccggccatgtcctgttttcctctctggccttggatcctggccaataccactttcttgccttttgtcgtcgtgtctcagttcttcagtctggaatgttcctcggccttactctaattcgcatgtgcctgagtctcagcacaaggctttgattgttcagcacagctctccagctggctctattcggtgttgcctcacaaccaggctgtgtcacacactcttggcagagatgccacgatgccatgctctcttcagggtatcatgtggagagacacacgagggccacgcatcccaccaccaggggtgttcccttcggtcgcgtagtcaagctaatgtcctcattgttttctcctttgtatttatttatttatttagagatggagttccgctcttgtcgcccaggctggagtgcaatggcgtggtcttggctcactgcaacctccgcctcccaggttcaagcgattctcctgtctcagcctcccaagtagctgggattacaggtgcccaccaccatggccggcgaatattttgtatttttagtagagacagggtttcaccatgttggccaggctggtcttgaactcctgacctcaagtgatccacctgcctcggcctcccaaagtactgggattataggcgtgagccaccgcgcccggcctctcctttgtatttaattagcattttgtgaagagagattaaggtgtgccaattttttggttttttttttttttttttttttttttttttttttttttttttggaggcagggtcttgcttcatttcccagggtggagtacaatggcctggtcacggctcactacagcctcgacctcccaggctccagcaattctcccaactcagcttacggagtagctgggactacaggtgtgcgccaccatgcccagatacgttttttattttttgtagcgatgggggttcacctgttgccgaggctgttctcgaattcctcggcccaagcaatcggcctgcctcggcttcccaaagtgttgggattacaggcatgagcccccatacccagcctcaacttggatgttttttgccctccattttttttctctcacaggatagacttgtggacaaatggatcacttgcctctggtgcgtttttttgtttgtttgttttgttttgtttcttaatttagcgacgaggtcttactatgttgcccaagctggtcttgatcctcggctcaagcaatcctcctgccttggcctcccaaagtgctggaattacaggcgtgggccagtacacccagccctagaactgctttgatcattgtatccccagaaactagcacacaacgctgcacacagtaggtgtgcatgcctgtaatcccagctactcgggaggctgaagcaggagaatcgcttgaacccgggaggcggaggtcgcaatgagccgagatcatgccactgcactccagcctaggcgacagagcaagactccgtatcaatcaatcagtcaatcaatccaagcaaaacaaaactggctttgaacagtcagcggcatcccaccagggattgagccccagtgtggggcacactctgtttacattagctagctcatttattccccacaaaagccagacaaggcaggtactaattatgatcgtgcgatattaaacatggagaaaccaacgctctgataagttcgttttattgtgagaataaaactgctcaatgggcgctgttattccaagcgaggtcaggatttccggattctaccccgctccgcccctggccccgccccgagaatgtacgtcccgccaggccccgccccggccttgtcccacccaccccgtccccgccccctgtccgtctcgccctagtcccacctcctcgtccccagtcagtcctgcctctcgaaccgccccctgccttcgccgaggcagggagaggtgcctgcagtgcgagccgtggacgctagggggcagccgctcggctcgggcccgaccgctctgggctgcgctcctcgcttgccctcggactcggctcccgctgcgagcggccgccctgcccgcgcaccgcgctcagcgcccaccgccgggcttcccgcgccggacccagtacctcggctccccggggccggaccgaggccgcaagcagcgccgcggggtgtggggcggacccaggagatgaaatgacaacgtcaaccctccaggtacttcgtgcggcccggcccgacttcggaggccgaaggcagcggggcctgcgggccgcagagccgggcggcgggcgggtggtcaggtgggcgcctcccagccccggcctcgcgaccccgctccggccgccccctcgccgcttccgcccgtgtctgtttccacgcgctcggagccgggtggcatctccaccctcaggccttccggccctgcccggctggcccagccccagggccgcttcgtgtagccggcgccccggtaccgccgtggggatcagcctcacccgagccgcacaggcaccctcaggaagctcggcccggggtccggctgggcgttcagacagcgatgctcgctccctcctctcctgtctcgctccctcctctcctgtcccgggtcctggaagtccctcgacctcacttcgaacaagccccggccccttccccaatcttcgacttcctcttctcggccagcgacccttcattcattccctagatcctgcagggtggtgctgggatggcgccacctgggtgaacaactgacccaccctctaggtgctgtcagtcctgcggggccagaagagatcaacatgctcaggcctcattccggggtttgaatctcagctctgccactcaccagcaagtgaccttgggctagtttttttttttcatcttcgggtctcgagtttcctggtctgtaaaatggggtaatgccctctaggttgttgtgatgatagctttaaattgaataattacggtaaagcattcttgtatgtctggcacatagtaggtgtccattaagtgacagccaacaaagtgcctgggagagttaggcaagacttcatggaagaagggacatcagagttccagtagcattcagagacctggaggt

SEQ ID NO: 6987 - DNA, 6000 bp, Homo sapiens
agctgtctctattagcagacgacatatttattacatagataattctaagaaatccataaaataattacaggaactataagtgaatttggcaaggtataagatagtaagtcaatgtacaaaatcaattatatttatctagactggcagcaaacaattggaaaatgaaataatttcatttataggggcattaaaaaacgaaacatttagaaataaatttaataaaagatgctaaagatgtctacattgaaaactacaaattaaactgaagtaaatggttcatgaaatgtaaggtttttaaggtgtcttttttctgtaaattcatctataagcacttttgtaaaattaagaagctgatttttttttttttcttctagaaacagggtctcactctgccacccgggctgcagtgcagtggcacaatcatagctcactgtagcctccaactcctgggttcaagcaatcctcctgcctcagcctcccaggcagctgagactataggtgcccaccaccatgcccagctaatttttacatttttttaaagagatgaggtcttgcaggccaggcacagtggctcacgcttgtaatctcagcattttggaaggccgaggtaggcggatctcctgaggtcaggagtccaagaccagcctggccaacatggtgaaaccctgtctctactaaaaatacaaagaaattagctgggcatggtcgtgggcacctgtaatcccagctactcaggaggctgagtcaggagaattgcttgaacccgggaggcggaggttgtactgagcctagatcatgccactgcactccagcctgggtgacagagtgagactcgtctcaaaaaaaaagagatgaggtcttgctatgttgtcgaggttggtcttgaactcctgagctcaagcaatccttgtgcctcagcctccaaagtgctgggattacaggaatgagccacagtgcccagcaaaaaataataactttttttgtaataattttagatttacagaaaagttgcaaaaataatacaatgagtttctgtatactcactcaattttccataaagatagcattttacattaccataatatgtttgtcaaaagtaagaaatcaacactggcaccttactgttttatttggatttcactaattcttccccagtgccctttttctgttctaggatccagtccaggatactatactgcgtttaattgtcatgtctccttagtttacttgagtctgtgacaatttctcaatctttcctttttttttttttttttttatgagcttgtcagttttgaggagtactggtcaggcattatgtagaatgtccctcagtttgggtttacctgatgtttttcccatgcttggactatggttatggattttgtggaagaatgccacagtggcaacatgcccttttcatcacatcacaccgggggtacatgctgtcaacatgatttattatggagatgttttaatttgatcacttggtcaacaagctgattttaaattgtgtgtggggccgggcatggtggctcatgcctgtaatcccagcactttgggaggccgaggtgggcggatcacctgaggtccggagtttgagaccagcctggccaacatggtgaaaccccctctctactaaaaatatgaaaattagccaagtgtggtggtgggggcctgtaatcccagctactctgaacccgggaggtgtaggttgcagtgagctgagattgtgccattgcactccatccagtctgggtgatgagagtgaaaaaaaaaaatgtatgtggaaatacaaaggatctagaatagcaaaaataattttcaaaagttaagagcaaagctataagacttatattacctgatttagtgccttacaataatcaagactgtggaattggcacaaggataaacaaataagtcatcggaacagagtagaaatttcagaaggagaaccacacttatatgatcaatcaattttcgacagatacaggaaaacaattcaagggggaattgtgttttcatcaaatggtgcaggaacaagtgggtatccacatggaaaaaaagaggctaagaaacctgcccaaggtcaccaagtttgtgagtggcagggacaggtattccaagccagactttctggctaacatgtgctatcaattgtaaatataaatttataaccaaaacatttaggtcacaataatttttcagtgtaaaattcaatttgaggctatactatttaaaaatgtcaatgtcatgaaagcaaaagcaaagttaaggaaatgttctagattaaaggggactcaagagacttagctaagtgcaatacatgatcctgaactggatcctgggtcatacaggcacactaaaatttcacaaaggacatgaatgcaataatggaaaataatatggagagtatgttagataataattttgtgtgaatgttaaattctctgaatttgaaattcatactgcagttacgtgacaatatgttcttatttttagaagatacatgtagaattatttggctgtaaagggtggtgatatctgaaatagttcagcattattaacaacaatgatcaaaataatatggaaaaaatcaaatattgaaaaatattaacagttggtaaacctaagctaaaagtatatggtcattcattgtattattcttgtaacttacttatttgaaattctaaaaacattttcaaatataatgttacaggtatatatcacttaagtgctagaatttgtaatttttttattttttatttttatttatttatttttatttttttgaaacagggtttcgctctgtcatccaggctggagcacagtggtgcgatcatacatcactgcagcctcgacttcccaggctcaagccatccccagatctcagcctctcaaatatctgggattacagttgtgtgccaccatgcgtagataatttttgtattttttgaagagacaagagcctcactatgttgcccagcctggtcttgaactcctgggctcaagtgatctgtccacctcggcctcccaaagtgctggaattacggggcttgagccaccacattcagcctgtaaatgtttttatttctttcagagattttgtttcttatgttatctctctactcccaatgcctatcataagacttgtaacagtaaatagtaaatgtctggaataaatgtaaatatttgaatctagagtttgtggaggatcctaagaatcttgtgagattgctctcatagtgtcagtctaactagggaggtaaaatacgtaaagttaaaatttacagacgtagcaggcttcccaaaatagtaatatgctttcttaggtactacaaagggatggaagcactggagctcaaaacggtaggagaagtttgaaaatagaagaaactgaagaggaacttgaaaagccggtaggcattgaaaggaagaggagtccttgggacagcaattgagggtagaatgtggagtatcccatgtttctaccaccattcagaatccgattttcaaatgaattctgtgatgatcaggatcaatctgcactattttagtctctaagtgatctaaaattaacttggtggacctgggatgaccacggatgtggttttaaaccagcaggtttcagagtcggggcgggtgcaacaggcttataaagggaatggtggaaaatattatacgttagtgaaagaggttgcgaatggattgtggagagccctgaatggtagactgcgagagtgacaggatgaaaacgacgacatcataggaagagcaatctgtcagttgtaatggcagttaaaaagtggcgcacaacactgtaccttaaccaaacttggaattccaaagtgctgggacctctagcggagagcagttgagttcaattctattttagatcacgtagagactaaaatagtgccgattgatcctgatcatcacagaattcgtttgaaaatcggattctgaatgatggtagaaacataggatactccacattctacccccaattgctgtccgggacagcaattgcctttctaatcgactgccatgtttagcgattactatgcgccaagcgctttacaggcactctcattaaaataggcaaaccgggccaggcgcggtggctcacgcctgtaatcccagcactttgggaggcctacgcaggcggatcacctgaggtcaggagttcgagaccagcctggccaacatggtgaaacctactctctactaaaaatacaaaaattagccgggcgtggtggcgcatgcctgtagttccagctagtcgagaggctgaggtaggagaatcgcttgaacctgggaggcggagtttgcagtaagccgagatcgtgccactgcactctggcctaggagacagagcgagaacttgtctcaaaaaaaaaaaaaaaaaaaaaaaaggcaaacccctctgtaagagagtgctttatcaagcccattttactgatggggaaattgaggagagacgggattggccagatcacgacctggaggcagcaaagatgtaaaatcagggttgggatacaggctgcgccggtagtgtaggggataggaactttctgagactcaggagaaagccacagcgatgggaagggaagcagaacactggagaccctaaaggcccacaggctgagagaagtggtacctctcctgaagtgacacctgtcagcacgcctcttttgggcgccagtccaaaaatcgcggtatctgattggcgaggttggagggggctgaacgaccctaattggttagttggacctcgaaccagactttcatctggaggatcgggcgaggagtgggcgggatttcgaactgagccactcccttcattggtgaaaagaaaacgaaccaggaactattcggaagtgtgattggctgttgctaggaaccgtctcaaggccttatgggccctggttacggaagccgaggaaggctgagcgcgggctctcaaggaaagtagtcgcggaatctcagttagcggtggagaggcagtatgtccggttcaatggcgactgcggaagctagcggcagcgatgggaaagggcaggaagtcgagacctcagtcacctattaccggttggaggaggtggcaaagcgcaactccttgaaggaactgtggcttgtgatccatgggcgagtctacgatgtcacccgcttcctcaacgaggtggggcctgggaggtgggaggcctctgaagctgctggggcgaggggtgaaaaggctgtgtggagtgtatgtgggaaggaagggaggcttggctgggggcgataaggcgtaagaaagggatcacgaccctcagagggaaactggggtgggattgggggagggctttagtttgcatgcatttccagtcagctccgagttctggtgccttatgtaatatcatgtattacttatgtgtcgagcatttgctgtgtgctcagctaaactctaagccatcattatctttattttacagaaagggaaactgaggctcacaggttgaggactctcagggccatagagttagcagcttagatccgttgaacctaggtctgaagtgcacccacatctgtgcttttccagtgtgccttctgaagtaataccggttttggttttcgtcttctagagtagaagctgagatttctctccacacgcttccccatcttgattatgcctccactgtttttttttccccctaatctgagttgaccttgaggccagaaactcataaatcaaccctttttttttgtttttgactcatgttttgtcatttttcttaaatattcaagactgttttatttaatcttcaagtctgttgcattacatctcattttaaaaattatttttgagaccatggtgcaactaattttttttttaaggaaacaggatagacttctaaatatttaaaactttattgaggtgtaatgtacatacgtaaattgtgcctatctaaaatgtacattttgatgagttttgaaaaatgtattcatccatgttaagacata

SEQ ID NO: 6988 - DNA, 6000 bp, Homo sapiens
cattgccaagagtaaagagagagcaccccagcctcttccagcaggtacttcacactgcccttccccaagttttcagtttggccaccactatcttcctggaggccatcattatctgttattatttcctttatcctggtttatgccagtcacacaagtagcccaggatcctcagttgttccttatcccttgtgtttcatcccaaatggctccaaatgtctcattttctgaccccatttcccaccctccccatcccgacacccttgttgggatccacaaaatccatcttttctcgaagtgtcttaatttcctcttcactttcttgctctaaaggaaactaggtctcccttgaagacactgctttctctgcagtcctctcaagtggtggctgtttcttacactccacaatggaataagttttcttgttcctcattgctgcttccagattattctggctccctccttcctaaacatttccagctttcactctgatattaaccagactatatggccctcattacagtcatatgacccctgccactctccaactctactcctgggacaattctacatgaactcaatatccttagagatgatactttcaaagccctgatgtctcaaatccttgacctcctcactcccaaaaaacttgccctccaacttagttcagctataatctttctgtccttctttctcctcttaaccagcttagattccatggttcattatcataattacacctttgaatatcccctaggctcccttgcctctctaatacttcattgtactcttccagaaaagcagaggtcttacttaaatctaactctccacttatccccacacaagtagtagtagccgaacagggctggaaaaactacacacctctgctatctgctttcattttaagtttatgaccactcaccttcggcttcactcatctatcttacctcattaccctagcatagtcactaacgtatcctcacaggtggccactccatatcttcctctctcttcaggcttccattaactccttccccatcctcagactcagctgacaaccttatcccctcactcactaggaaaataaaagcaataagaagggagtttccacaaattcccagcacatcatctacccacctacctgcaacctccactccctgagttcaagctattctcctgcctcggcctctcgagtagctgggattacaggtctatgccaccacacctggtggatttttgtatttttagtagagacacggtttcgccatgttggccaggctggtctcgaactcctgacctctggcgattcacccaccttggcctcccaaagtgctgggattacaggcgtgagccaccacacctggccgagagacaccaactcttaaaaggtgcctaactaagcatctcgaggaatttgtactgtgtctctaatgagctcttttgtagcattttcatcagggaaatgctggggatcagatccatcctaggaaagatcattctagctgcagcatagagtgggaaggctggagggcataagattggggatatgggaaaaagtgagagactgttggcagaaattcaagcaaaaaaaaaattgaaaggcagactgaagacaggggctgttgacatataaaggagggcaaatttgacagctatttaaggttattttacctttagacagacattggtgatcaatgtgatacatgaggtgacagtccaccggaagacacactgatagtctccccagatttcatccccagaaactccctgactaaatcatcacgggtcacctgaagcagtctctgacagtttttggaagaccagaggtagaatttcaggagcctgattccagataaagccacaattatgcagcaatgttatgttcctgaaccatcaaagacatataagggatgcctgagttttactaggagctcctggctcattatttcctattttcccatcccctctgcccttcaagggagcaacaaaaaagcaagaaccagtgaaaaacttaaaactgtgttcgttttttccctaatctattctagtccaacttattctcccactgttgaaacaaatatttctaacacagataagggacatcgtattgctgggggattccctacacagatgtccaccaccagggcccagctcaaggaagcaagttctactgaaagcaattacccatttgataataggatttacagcaaccaagatttccttcctggcttgcagacacttcttccgaaggcgctggctccctgtgatgctaagatccagtctctatagacttcagaaacttagccaaactacaaagccctccagaatctattctctaaactcagccacttagccagtgacctactcaggccagacactggctttggtaagcaaaacagggctggtgaccaatgtagggagtgacatgttcctcaacagtttcaggcctggacatctgcattgcaggctgatgcttagcgtaaaaaaatgaggaatgctagagcccccataagaaaagaaactcaaggaagcatcactgtcctttcagtgtcactagggacagaaaagatatgtaggtaagtgtggaagtgaagaaactgcaatctcatttggagtgatggtcagggtaaggtagcaggagtaggtagtataaccagcagaaagatccttttgacccctgagaaaatcagagtctaggtcagtagctgaccccaggtctcttcaccactcaggtgggtccccagacagtaaagatggtaaacttccaagggcaaagatgagatcagcgactccgctgaatagtggtccccaggagacaattgtctaaatcacttcaagtacacacagccttttgtacggattttaaacttgggattccttggcattgcacatgattttgtgtttgtatatgagcaattgtacatttttctacagaggtctatatctgttatcagattttggagactcaaaaagaaaaagattagatctcttacttgactgcacgatccaatatggttgcactagcacgtttcaggtggacagtggctactgtatagtgcagatatggaacatttccatcatcacagagactgttattggacagtgctgccttagagacgtgggctgcaggacttccacaagaaggcctggatatcagacaccagcattcaaatttcttcccagtgctgtggaatgtggtagacccttggaagtccagtatctgaacatgctggtcaccaccgtatactagtgaccagaggatgcctttcttcagctgcttggcattctgccagcatgaattcctagcacgggaaagatggcaggtgatctgaattacttggggttatggtgtatttgagtgacctcactatatttgggaaggcgctggaaaaacacgaaaagaatgttagaaagggctggaataaaactacaggagtcccctctttatccacggttttgtttcccagttttaactactcatcatcaaccacgatttgaaaatattaaatgggaaaattacagaaataaacagttcatttattacatactattctgagtagcatgatgaagccttgtgccatctcgctgtgtcgtgccagcacctgaatcatctctttgtgcataaaagcaaaactaccgactgcccagttctagtgcttccagttacacctctgcccaaagtccttcactggaggaagagaaatttctcttctctctgccagagagaaacaggaagggaggaagagccacacaattgaaatcaagtcaaggcaagcaccacaggttcttgtcatttgtgcttagcggacttagctgatggaaatcggcaaagatcatcccaaagctcacacaactccctgcctgctctctctctcttccaaggtctggaaaaggaagtggcagctgagttgcgggggtgggtggcggtgggaaggtattattattcaaccactttttaactcttatattgtcatattattgtgttaggagcttcatacgcattaatcctaacattcacaacaatactgtaaaatagatattgttacccttatttaacaccgatgatattctagggctcaaagaggtggtatgacttgcccggcaagatcttggacttgaaagtctgaggcttccattctccaccacaatttacgtttattcacgggcatccattgtttcagactcatgacaaccgtgtaaagtagcacggagtaggtaagtgatttgcccaagggcacacagcaagggagaggttgtaatctttaatgataatttgtttctttttttcttaaaggggacttttttttctcctgtaccaccaagccagtacatctatgtcctcccagaaaatatttattacctcttgtagcaagggtgaagatattgaatacaacacagaggctgagaaatgttacctccctagacccagggtggagtgagcaggcaggtgtaatgcaagaaataactttcacattttctccttggagataagaacaaggtctaaaaatcaggtttgagattttgtagcctttcggcttgtaagtgtcatgaaatttccctatcagcctcatctactagctccctgggtctctctctctctctttctctttttccccacctccccactctgcccatagggagttgaccttcacagttgcctttcagtagtcaacatgccaggatgcctccagtctgggggaaaatgcttcctcatttgcttctcccagcccacctcaagcagtctccccaccccttgagtctcagcagtgttaaagctgttactttcacagcttcctgggagcgagtgctttctcaagcccgtcttgcaaggtgggtccttttttgtttttggcagaagggagggacagtgaaatgtgctctgagtagggacggttatgcaaaagcaagtaggaggaggaagccaagaggggagttggtgagtcagaggagaaaagcgcatggcccggctagcagtgagcctctcaaaagcagcagggaagcccaagccacaaggtaagaagagaatttctgtgtacgactccaatgcagagccattacccagagctgctggagcaagagtatcagataacctctggcagctaagctagagattacagtggcgaaggcggtttgcgcagaggggataaatcagatcacctggggaattttctgggtaaaataaaacacaagctgcttaccagcagcccccaagccccactagctctatccctaaatgggtccaaaagagcccagagagcagatcaggctgttctgatgtatattttgtagatggtcccctggtgccaactgactcgttcagatcctggctttggagctcaaatttctgtacttcctgcagcttctcctctgttttctgctggggagtggaagacaggaggtgcaaggagctgtaggttttctctagctcaggagagggacagtgtgatcattgaaaattctcagccctgggatccccaaaacctgggttctgatccagaaaaggctatttataccggatgagccagtcaattaaagtttagtttatttattctgaaaaatgaagaaatgtctcatcactgtctaaaatatctaaccgatcagtatcataattgcagctaaaagggctttaaaaatgtggaacaccacgcacatgtgcaatatgattaagttatggtgccaacatatcagctatggtagaagatacgtctatcttgcatggccttggacaagtatgaaacttctaattggaattgaaatacttttctatgtgtaaaataaatgtaatattgtcgatgaaaagagtcagactctgtgacatatttgaagagatttattctgagccaaatatgagtgaccatggccggtgacacagccctcaggaggtcctgagaacatgtgtctaaggtggtcggggtgcagcttggttttatacactttagggagacatgagacttcaatcaaatacatttaagaaatacatctagccaggcgcgatggctcgcg

SEQ ID NO: 6989 - DNA, 6000 bp, Homo sapiens
cagacgacacgatggaacgtgaatactgaagccaacaatcttctggaactctcttttccaaaactcatatgctgttttttctaattgggaaatcagggacagggaaacattcgcataattacccaccaacatgttcttcttaacagaaatgaagattattattattttttttttgagacagactgttgctttgtcgcccaggctcgagttcagtggcgcaatctcagctcactgcaagctccgcctcccgggttcacgccattctcctgcctcagcctcccgagtagctgggactacaggcgcctgccaccacgcccggctaattttttgtatttttagtagagacggggtttcaccgtgttagccaggatggtctcgatctcctgacctcgtgatccgccctcctcagcctcccaaagtgctgggattacagacatgagccatcgtgcccggctccactttggttttttctaatcggttcaggatctcatttactttcttctccattgtcacaatttttacatccttctgcctgtgaaagcctatctgcctcacatccacgtcagctgttttcttcaggttagaccgtggagtatttaccacattaacgttgttcttgcagccttgagtgctattggccttcacaaggtgggcgcagtctgtcagcacttcctttggaatgtcctctatattctctcccttatgcaattgaaggtatacatgagccaaagagagtctgtccgcacgaaaccagatatattcaggccagccatgcttcatcagatcttcatgatgatttatgggttagtaggagagatataaaactcaagggccgggcgcggtggctcatgcctgtaatcccagcactttgggaggctgaggtgggcggatcacgaggtcaggagattgagaccattctggccaaaatggtgaaaccctgtctctatttcatatttatcctttcccatgtaaatagcgcaggcagatgaattaacgctgctgctggtgaagtagaacaccatgatgctggcgggggtgcggtgactccaccgtggagcagcagcgttcaactgtggcggttgcctggtccccggaactctcctcttttttttttttttaatgcattatggaaacttttttatgtgatttttgtacataaggaatatgagagtaactcttttacaaatgaaactaatttactagaacaaacagtgacaaaactgaactgatatttgatgtgaatccataggagtttaagcttcaaatccagccaagaaatttgttacaactccatcagctttgcatctgagtcttctgagatctttccatcagccctgatagtgcccaacagggcttagcgctggctgacaacatgagacaagaaagcattctcaaactttgtaatcttgctgggctccagtttatcaagatacccccttacacccgcacagataacagccacttgttgttcagtaaccatgggaggatactgtccttgcttcagcaactcagttagacgcacaccgcgactcaatagttgttgagtgggagcattgaggtcagaaccaaactgggcaaaagcagcaacctcacgatcctgagccaattccagcttcatggtacctgccgcctgcttcatagtcctggtttgggcagcagatccaacacaagacacagacagacccaatgttaatggcagagcggatatctttgtagaacaattctgtttccaagatctgtctgtcagtgatggaaatgacatttgttggaatgtaagcagacacatcatcggcctgtgtttctatgactagcaaagcagtcaaggagccaccaccaaaagcatcattcattttggctgctctctccagcaaccgggagtataggtaaaacacatcaccaggacaggccttacgaccaggggggtcggtggagcaacagagacatctgacagtaagcgacagcctgtttggataagtcgtcatagatgatcaaagtatatttgccatcgtctctaaaatactctcccatggaacagtcagagtaaggagccaggtactgaagtagggcagcatctgaggccatagctgacaccacagtggtgtacttcacggcatctgcatctgtaagtctcttcaccaactgagcaacagtggatctctttcgaccaatagcaacatagatacagtacagcttcttcttttcttcagatctatcattgaaatgtttctggttaatgattgtgtcaatagcaattgaggttttcccagtccttcggtcaccaataatgagctcatgctgaccacgaccaattggcaccaagctatccacagccttaatgccagtcggcattggttcccacactgaagttcgaggaatgattctgggggctttcagaccgactcacttatgggtcttggaacccattggaccctttccatcaatagcattaccaagggcatcaactacacgacccaacagctcctcaccgactggaacgtccacaatggttcctgtcctcttcactatacctccttccttactttattattttcaaacactacaatgccaacattgtcagtttcgaagttcaaggacatatcctttaagcctgaagaaaactctaccatttcttctgcttggaacattcctcagcccatgtacatggacaataccatcaccaatacttaagacatgcccagtttcttcaaggtcagcagaggtatcagctccaagaacatgctctttaagaatagaggacatctcagcagtcccagtcttctgaagatgagtgttagaggcatggaggttccttgcagcaatgaaagatgaacccaaagcatttctggagaccagtcctgcccaccgagtgaggtcacgggctacggccgcggagacacacacagacagcatctttgcagtttctccacaggtggtacctccacagccgcagcctctggactgactgggaccgtttcaagcatttttaaatgaaacctgatgttgatgaaatctctgaaagtcaagtcaggtatcttacacaatgctgtaatttcatttcaatccttttcataaagggtaaagtccttgtatatattctttcaatacatgctttatctaagacacaagcactctatcaataaaagttttaatttaaacgaccaaaaaattggtgagagagtgctcagaactgaggataaacatgtaagtagttttttgtcccagatgagcaatgatttatgttgactaaggtgtgctgaattaacttattccattaaagtgtaaagggaagacaggttgataagcataacttttaccttgataaatgttttcaatgatttctattgcatgtagactgaaacacctagcatgtaaattattgcagtagaatctgtctctaagtctcagctgggtctgtgaatttgttctaatttgatagcttcatacaactgatgaagctcaaaaatggcttgactcaagatatttcatacacctttcttttgctctaatttctgctacgacaataacccagctatttcagctgatggcgggaacactgcaactggacaaaaatgacacggatgggtgtagagcctccaaacaataagtatctgattaatgctgttgacacctaagtctacagaggctattctccaacggccaggacatcattaggtaagacatttcaaaattcttcgtgagggcacgattgcttcagaggactacaaagtgacacattaggtcgtcataaatcaccgcagtaccatcctggctaacacggtgaaaccccgtctctaaaatacaaaacaatgagccgggcatggttgcgggcgcctgtagtcccagctactcgggaggctgacgcaggagaatggcgtgaacccgggaggcggagcttgtagtgagccgagatcgcgccactgcactgcagcctgggcaacagagcaagactctgtcaaaaaaaaaaaaaaaaaaaaaaaaaaatcaccgcagtaaaccacactccaacgggcctgcacactcagggtcttgattagaaacagtatttaaaaaaatacctccacatctgttgcaccacaatgccaaggtataaccagggccactttctccaggaggcacaacaggcgcagggccagggaagggcctctgacacttttaggatctcaagaaattttttttttttggttatttttctttgtttgtttttgagacagagtcttgctttgtcgcccaggctggagtgcagtggtgctatctcggctcactgcaacctccaccttctgggttcaagcgattctcctgcctcagcctcccgagtacctgggattacaggcgcctgccactacgcccggctaatttttgtattttattttattttttagtagacacggggttttgggtgttgaccaggtctcgaactcctgacctcaagtgatctgcctgcctcagcctcccaaagtgctgggactacaggcgtgagccaccatgcccggcctcaagaaaatgttttaatttccttaaaaaaccttaagaaaaatcaacttttaagttgaaaaagtttatatattaacatattcatctttatatcaacacagcagtaaaatttattttttaaagtgataaaaactgtacaaatatttctggtgtgaaacacagtgttttgatgctcgcggactcttggattcgaggctgcggtagtacggacaaacaccgtgcagcggcatctcatctccgccaacagccggcgatcaagcgggcaggctgggagagggcgggcggaagaggcgtggccgccgctactgcgcacgtgcacccaaccagaacctgggggtggtgccgggccttccccgctgcgcggaggcgtcctctcaacccttctgcccggcgactggtgggttggcggctaaggggcggagacaagaggggccgccaccatctcctccaatggaagggagacaggggcgggcttaatgacggaaggagcatggcgtggagacacctgaaagtgagtcccgcgagtgagcagtgtggatgggggaccagggaccggggagggcgagaacggagagtcaggccgggcgaggcatggaccgaaggcggctccgggagtgtgggcccccctgggacgtgtgcgtgtttccggggtctcctgcaaatgctcgtgcgtgtgcatttgcacgtggactcggtcaggcgtgtgcagacagcgcctgcaggtctgggtgggtgctgatctgagtgtctgcgcctgggccatgtttttgagcctggcacaggggtgcttagtgaacacatgaccgcctagcgttgtgtgccggatccaacggggaatgaaactagagtaggacatgctcccaacccttttaggtaaagttttgttaggggcgggggtctctgtgaaaagttcttagctgtatccccgtatgtaataggtgttcagaggccgggcgcggtggctcacgcctgtaatcccagcactttgggaggccgaggcgggtggatcatgaggtcaggagatcgagaccatcctggctaacaaggtgaaaccccgtctctactaaaaatacaaaaaattagccgggcgcggtggcgggcgcctgtagtcccagctactcgggaggctgaggcaggagaatggcgtgaacccgggaagcggagcttgcagtgagccgagattgcgccactgcagtccgcagtccggcctgggcgacagagcgagactccgtctcaaaaaaaaaaaaaaaaaaaaaaaaaataggtgttcagatatttgttgattgacatggtgggggggagtacagtctccaagggaggcaatgaataaccttgactttctttttatatgtttatttgagacggagtcttgggctgtcgcccaggctggagtgcagtggcgcgatcttggctcactgcaacctccgcctcccgggttcaaccgattttcctgcctcggcctcctgcgtagctgagattacaggcgcgcgccaccacgactggctaatt

SEQ ID NO: 6990 - DNA, 6000 bp, Homo sapiens
caaaaggtgaaaaatcaacctacaaaatagaaaaagacatttgcaagtaatgtatcttacaaggggttaatatctagactatgtaagaaacttccacaattccacaataccaaaaacaaataacctgatttaaagatgagcaaataacttaatagacaattctccaaagaagacataagaatggacaacaagcatgtgaaaagaggctcagcatcactaatcaagataaatgcaaatcaaaacctcaatgagatatcatcttatacccattggtgtggccactatcaaaagaatagaaaacaagttcaaataaggatacagagaaattaaagccctgtgcactgttggtaaaaatgtaaaatgattcagctgctataaaaaatagtataaaggttcctcaaactttaaaaatgaatgattatgtgatccagcaatcccacttctggatatgtatccaaaataattcaaagcattatcttaaaggaatacttgcacactcatgttctttgtagcattactcactatggtcaaaaggtggaagaattccaaatgtccactgagagatgagtgaataaagaaaatacagtgtatacatataatggaatactgtgcagccttaaaaagagggaaacccggtcacatcctacaatatggatgaacattgaggacaccatgctaagcgaaatcagtcagtcacaaaatgacaaataccatataattccactcatatgaagcatctgaagtagtcaaaatcagaaacataaagtagaaaggtggttgccaatggctgcaggaggggagggaagagagggatttaatgtttaatgggtatagagtttcagttctagagatttgttggatcacaatgtgaatattcttatcactactgaactatacttaaaaatgattatgatggtaaatttaatgttgtattttttttaactacaataaaaatgaaggtaaaagcacaatgtctaaaaagtatccatttcatttggaagatataaagacaaatcaaacaatgtaaaagaaatgaaatgattacccagatttgaaatgaaaagattcctataatagaaatgtagggtaaaataactgttagatgaataaatgaaacaaaaacattgtatgttaatttctttctagtctttcaatgtaatatagttccactcttgccttctggcccttttctagtctaaactatagtttaggatcctccatggaccactgtggtgggatatacagttctctggcaagttgtaacaagaaaataattcaaagcctgattttaagaatttcaacattttgatctgatttacatggcttttgccaggcagggtgtaacctatagtatggacgtgggagaccttaaacaccagggtcttttcttaattggtggaaaacataaccaaaatacagacacagggagaagtgattaaaggaatctgaatcagcagtacaggtgtgcaaaattagatctccacacttttctgacttttccttcgattttctgatgttaaacaccatcctggagggaatggagaaatgatgcataagttagtaggtcttggagatgaacccttttctgccaccagtgggtcatatcccacaagctgtaatccctctgctcatcagatttcttttctgtgtcgtgtgagttgtactaatataatgattacaaaaggaatattgatcatgcgcctcctaggcatgctcatttcacaggacattgtcttaaccatgaggttgataccgtactcatcgttggtgcacagatgaggaaattaaggatcaaggattattatcctgatgcagcttgcccaaggccgtgcagctagtgggtggtggaacctgtacagacactgaacctgggtggccaagctctgacattgcctgcttagaccaattctctgtacagttttaatgcagagatctaaagctgggaagtaagtgagggcccactaagcacaaggcattcaatagttgtcatatgttataccacagtaactctttggtcatgattctcctatcgggtcataaaataaataaacgaaaggtcagcatcattgagtcatttaatcaaaacaacagtggaagcttgtatcaaggccgctctggtttttttgttttgttttgttttgtttttttttttttttgagtcagagtcttgttctgtcgcccaggctggagtgcagtggctcgatctcagctcactgcaagctccgcctcctgggttcatgccattctcctgcctcagcctcccacgtagctgggactacaggcgcctgccgccatgcctggctaattttttgtatttttagtagagacggggtttcaccatgttagccaggatggtctcgatctcctgacctcgtgatctgcccgcttcggcctccaaaagggctgggataacaggcgtgggccaccgcgcccggctgaggcctctctgtttaccatatctcaagcactcactgtttcatttgtctaggcaactctctacccctctgcagccatcaggcagagacaggttttgcagtgacttgaaatgctcaggtcttctattgagggccagcccccaattccttctattactgtagcccattgatatggaaaaatccgccagtattggtcactataataatttatacattgtcccaaagaagttattattgttataaaatgtttatttttcatttttgctatgtgtacttatccatttaagatgcattctctaatttgttttaagagaacaattaaatacaatattgtaacaacgagacaacttttttcttctggagagcccacaaccgtcccacagacatgatattttcttcaaaggactgatataattattcaattagataacaaatggcatatagtatgtgttcagtaaaatttaatctccttcaataattagttaacataaactgttaatttatatctgcttttacttagcatatgattgaaaaaataaaatcaggaatgcaagtctaggaacacagaataaacactcaacccatgacctttctttattttattgtatttatcctttttttttttttttttttttttgagacagagtctcgctctattggccaggctggagtgcagtggtgtaatcttggttcactgcaacctctgcctcccgggttcaagcgaattcctgcctcagcctcccaagtagttgggattacagttgcctgcgaccacaccctgctattttttttatttttagtagagatgggatctcaccatgttggccaggctggtctcgaactcctgacctcaagtgatttgcccaccttggcctcccaaagtgtttgctgtgttttcctagggcctaaggtttttgctgccactgacaagggtcaggaaggaggtatactctgatttaggggcaataagtcctagggtgagagcagtaaaactggagtcagaaaagccaaatccagtcctcagcatttattactaactctatgacctcttcgaatcatttaaattctctgttcttgttttctcttgtaaaacaggaaaagaaaaaagatgcattctgctttgtttgcaggcatgagctaaacaagcatgtttagttcttacgggtatttctgtcattttctcactctttgacaaacctatctgatctttgacaaacccactctcattattccataagaaagtggtgttaaaggcttatgtttcttccaatttgtgattaccaagaggcacttaagaactccaggatttccatttgtataaaatctagcacattatcagtaaaacatcttgacatttattttaaatagattatttatctgctatgaaccatgtgacatgcttcttgttatgtgatagtaactccattatttagacattttaaaattccattcaagaaacagttgtatccatggaccagccattcaaagagtaatttttctttaatcattgatcttccaaattcaactttactcctctctcctttaagtcacctgaattacatcgtcacattgttcagtgtttgtgtgaatgtgtatgcatgtgtgtatgtggtggtggtggaggtccctttcttcagtattccctcatttcctactttgggcctttttggaaatgttattaaaaattttgattatagaatggtacttcatattcacagcatgatgcattcatcaacataaatctagccaaagcatttcatttgtggatttatacacctgaagcattaaaataagaaatgttaatttcttgcagactactaccagatgattttaaatatctgctaagcaggaatgtctgttcccatgtggggaatttccataataaaatcctggcaccctcgctgaagagtacagttttatagaaacagagaaaaacaacagcaagtattttccctgaggacggttttagctacaatttcccaatgctgcttagttatttctgtcttattttatgcttttgttttgaaacataatgcaattttacctggatgcactcccggataatcaggaatggctcagtgtgttttctggctcttgcaaatgcaagacctccagaaaatcagaaggctccaccgccttgtcccttcccccactcacacctccagctgggagaaaagggttaaggattattggaaaatagaagagaagggagggagccccaaggaggcccacgaacgggaggccgcgcctctgggtgcagcggagctcgagcgctgttgtgtgtttggaaggaaggatgctgctgccaatttgtgggaccgctgctgcgaggagtgggcgtggcctcggcggtgtggatgcttgttaggaaagatgctgagtgcttttcagtgaggagtcagggaggtgtgtgtgagagagagagagaaaagagagagacagagacggggagagagagagggagagagaagagagggaggagggaagaagaaaagacggagggaggtgaggaggaagggagggggagagacagagacctagaggggctgaagacccagacagagctggcagagctactgagaagaggactggagcgctctgagagcctctcaagatcttttgggggagcccaataaatgtgaacatgggatctgtcacgggagctgtcctcaagacgctacttctgtatctactcaaaattggaacagagtcgaagctgggaattcctgtaagtatacagcaaatgatttaaaacttgctggggggctctctgcaaaactttgattctgttggtttgatgatgattatttgcagctgggattgctgcaaagcgtattgctgtaaaccaagcatcacttaaaaatcttgccaatgtgaccggttaacacttgtctctcctcttggtctggtcaaaataggcaaagtgtcatttctctttttgtctactcgcagaatcttaccctctggtctttgagtattcattgagaatgcccaagttctagtaaaacatgaaattagcatcttatcgggggaatagcctgtgaatatcttcatttcttcttttttaaagaactactgaattttattggaattatgtctaagaggaaaacaactggcagactttacattatgctgcattggcttagatttctgaagtttgcaattgggcagaccagtagctgcctgcatctttaaaataatgcaggctaataactgaaatgtactgcaggcttcaggagcaccagcactggctgaggcgagtctcagtattaagagctgtgccctcgctgctaagagaatgagacttagcgctctccggaaagaggagcctcttcctacatttcgcttaaaggaaaaccagtcaggtggtctttcaaaagtaggattcctttgtggttgaatgcttaactgcataaatttgtaattgaatgttctgatgaaatagaacctatttagggaagattgaaatcttatttataatttagatatcatccataataatttggcagactcccttcatccactctttattagagatagaaaaagttttaaaagttatctttgg

SEQ ID NO: 6991 - DNA, 6000 bp, Homo sapiens
acacttaatggggagttacactccaagtccttgaggtaaggagtatttatgtccattatttataattcttcagcatgtgagatttgtctcttctcatccacctagctgataatgtatttatatcactatggaggaatgggtatttatttatattttggataatttctcctcatgtgtatgatattttactataaaaagttaaaagtgacgcagaaactataaaaacgaattttatttgataacaaacaccgtggtagtcaagaatagggcacttttgttaaaagagcaaataagtctttggacacataagcaaaaataaagcttcaaggataggggaggtgataatcttactctattctatgttctttgcactgtactgaaaatattgtgcccagttctgggcctaatctttcaggggagatgtaagtaattggatgccattctgagaagtggctgcagatccctgaaaccctatacaaaaaaaaaaaaaaatgagatctgacttacttggaatttatgataattgaggagtttagacatctttaccacgtattatttcaaagatagaaaaaaggcatggtccagccccaagttctggctatcttctcctagtctccccactcctgcccactgtataaaatagataaatatgtaatacatgatatttgcgcaatcacaaacactccaaacattagttatcaccctaatgctcaaaaagcaacaaacgaacaaaaaactcgtattaccaacaagatctctgtgatgtccctgagatgatctgttatggctggtaccaccctgtccatgtcctgaactttgggtcactatgacatcaacacacagtcattctctgcttggcaaatcatgccgtcattatgttaccctcatcataggaaaatgttcttcaattattgtaacaatgtgattttaaaaatgtttgagctctgaaatatctttcaaatatctgaaagaaatagaacaagacatcctctgactccacgtggagtgggaagacaaacgtcaagatgaatttgacctagaggagaatgttctaatatcccgagccatcttgaatgggaaaatcagccttcagaggaagtgaagtgcctgttctcagagatgttctggcaatagacaagatgaccacttggtggggatgttacagagggaattcccattttagatgggaagttccttcttcaagttctcttctaaactcaacatccaccaattctaagaaagtgtacattggaggattctcagcatttttttttccccagcattttttgcccagcaattttttttgggggggcggcaatcctttcttttgggtaggatgttttgttttcagatggcattttccaaaaggcccctctgctggcaggaggaaatgacacattgacccactggcgtcattagcaagaatgagttggtccaattggctccttttccctggaaggctgagagcaagcctgcaagcaaggggacactggccaagccatgatggcctcgagaatagcttcacgacaaaatggtggggacaaacaagggacacgatttagctcaataggatgcaggaaatcttcattcagcggtagctctgagatggactgaccctgaggttgggatgaggacattcagggcttagaaacgattgggctagttctcacctggggattctgcaattccatatattccccaactggtaaatagccttcctttccaccaccgtgcacccccactagtctctgctcctgcagcaggcctcctggaagcactgcgtcctcaactctgcaaggccaggaaccgggtctatattgttcactactgaattcctccatggctggtgcagaactggccacctagaagactctcaatagagatgtgattcttcctatatttttccaacaaatattaattatgtacatgtgatgtgccaggcactggactgtgcacgtggtgaacagtaaaggaaaaacaataaacagataaggttcctgccctcatgaagtttatggtctagtaggggagacagaaaacgttcttaaactgatcaaagtaaatatataattgtggattgagctaagcgcaacaaaggcaatgaataaagcgtgctgataggagatactcagattgggtgacaggaggtgatgtttaagcagatatctgaaggatgacaaaggaaacagccgagtgctgaactgaaagaagaaataaatgagtgaggaggtagctgtcaagaacctctctctctgctcagaggaaaaaggctaagaggcagtgggtactctcaacaatgagaaaagtgcctaccatccatgagtgcctgtaagtgccagggacgatgcaagaatggtgtcattcacttttcaaaacagcccttggaagaaagactcctcctaccgccaatttacagaagaggaaactgaggcttaggaagggcaggtaacttgcccagtgcctcacagctaagccaggattcgaactcaatttagaagtctgtgagacccgaaagctcatgttcttaatactgttcagccccttcaccatcagggctcagggagtatccttcatgggacttctgtgtggcctgagggtggcttttgctcatagattttaccctccccttgggagccccaggacagagtaggtctgggaactcgcaagggctgcctccaggagaaaagccacctctctcaagtgggcgtgcacttggcaggaagcctgcgcaggtgtttggctcagcccaaatgtgggagccactgaccaaatgccaagactctcagcgaagagccatagctagtcctgtctccccacctggaagctgtttttcgaacggagctaactgccaggatgctctgggctggtgaggccacaaggattgtgagaggtgccctgtggctcagatggcacccaggaaggaattggggtctgttgagggagggagagttcagggctagccaaaggcaattccagatccctgcccctaagcttcctggcctggagctggtaacgtctccctgactcaaatgtccatgtggctgggagggcagacaacagttgccatcactccacgcagaccctcataactgccttgttgtccaaccccacagtcccacagcacagtaatggttcacaagacactgcttcccaccccttctcccttgggtcttgagttggctttgagcccaggtgggctctgcctcacctccctttacaggggatacgctgctgggtcccttccttcccgagtcctgcctccccaacatcatccacaaaaggcatcctctcccttcctcctcctgcccctcatttaactccagcacgtgttttgagacaagtctatactccactggacactttgttttacacgacttcctcttattcttcattctcctcctgtttaaaaaacatgaatcactagcatttatgaggttccttctactgttccaggcaggatatgatattattttatagccaaagggatgaagatctagggaggtgaagtgaccctcccaagactatgtaattaataagtagtggagttaagattagatttgaatagagggaaactgacctcaaatagagaatgtttctctctagctatgccaaagtccagcctttatcacaaccttgcctccctccagccaggcatgtggcccacatggggcacgccctgagcccaggtgcggtgacccctctctggcttagcacggttaggtggtgctgtagttgcagagtgctggcttttaagccgcttgtgagtaagggatttattttttcccagcctcagtttttctctctgtaaactgaccataataataacacccacctcaaacagttttataaggttgaaatggggtgaaagtaggaaagatctagcacataatgcactaatttttttttttttttttgcctaaagcaggcagtggaatagaatgcttaggggcatacagctctgagatcaggctgcaagactccactgctgtgtgatcttgactaagtctcttaccctctctgtgtcctggtttcctcacctgtaaaattactataatactagaatcaacttcataaggatattgtattcaaggaggatgagaggagtcccagtgaatggaggctggcatagaataggcttacaataaagagaaagaacaaataagcagctatacacagcctctgccacaaaaaactaccaatagatattagccgctattagttaattgtcattattatctctccctggcatgtttccactcaggcaagaccaaagcactttcctctaccaaggaatatcttcctctactttcatatccctctccatccaacccttcagcctgcctcagttgggatttgtaggagtcctgaagctatggaccagatcagaggtgccttcccttccagaatctattttccaaacttcatcgattgcctatatttatatgcatgcatgcacacacacgcacacacacacacacactctcactcactcccgagtcagaaaaaggactcagcacccagacatactgcaggctcttgaagaagacagtattttcctgtgagctagaggatcttcctgttattctccatgcagttcaaattctgtcaattattatccagttagtcatcgctccagaggtggactgtcattaaaaaaaaatagaaggtgtgtgtttgtgggtgagtatgtgcatgtgttgtgtatgcagggggtggggaggggcgagagcggtcaaataggaagtgccttggtatttatgttgaagtgcacactggtttaaattacccactgggaatatgattatgcttaatctatgctcagttgaaaggggctggggctgctttctcccctcccttcttgactctctgttcacagaactcaggctgcctccagccagcctttgcccgctagactcactggccctgagcacttgaaggtgcagcaagtcactgagaatgagcactttcttctcggacacagcatggatctgcctggctgtccccacagtactatgtgggacagtattttgcaaatacaagaagagctcagggcagctgtggagctggatggtctgcctggcaggcctctgtgcagtctgcctgctcatcctgtcccctttttggggcttgatcctcttctcggtgtcatgcttcctcatgtatacttacttatctggccaagaattgttacctgtggatcagaaggcagtcctggtgacaggtaagcagacggtgctacaattttcactgagggtatgatctgaaacttgctttgccttagcaggactttgtcaaatctggcttaaaaataaaatacttggcatggagtaaatgaaagccctcacccaagtatttttcatgacactgttttcgttccgttttttccaggaggtgcatttgaaggggctggtagtgggagggaaggagaggatgaagtgcacccagacaatgattttgttaaaatttcccaggaataaatattaataggcaaaatggcaatatttcatgtgttctattgtacccaggaatgtcccatagattgttttttaggcttaaatggacttttgttctgacatcattgtttggccaggttctccacctggactcttcttccctaggtatgcaagaacgcttacaagccaagttctacttgtcccttgctgttttgaaatattgaagggattcacttacctgggctggagactttgcagtttgcttggctgctgtcaagaaccttgtgtcctgtctgaactgttcctcattagacctctaatgtttcttaattggaccaacttggcatcgtgtccaacattcagttgcctgttagctgagctgccagtttttcccttgtttgtgtgtgtgtgtgtgtgtgtgtgtgtgtgtgtgtgtgtgtgtttccccattgcaagtgtgaggccaaattaaatttctttgagttgtaaaatttttgcttggttatggagtttaagcttggatagggctgtaattaggattatccag

SEQ ID NO: 6992 - DNA, 6000 bp, Homo sapiens
cactggatttagggcccactcagttaattcaggatgatttcatcttgagatccttagttatatctataaagatgtttttccaaataaggtcacattcacagcttccaggagtaaggacatgaacatatcttttgcaggggacattattcaacccacgacatgcactgcctcactttgcattacacatggctttgtccgcggcctgtctccaccattagatgagatataggaaagcagggaaagagtctgttgtgttcccagctcgatcgccagtgccacatggcaggtgctgaaaagtatttcttaagtgaacgaaatagttttatctttccaagtcccagtgttcccgtctataaaatgattactgcctgtgggtacagctattgcaaaacaaacagaatcgagggtttatgcaaggaaccgtaacttccacctaattcttaacattagaaacaaattgtacaaaatatacttttgtacagtgtaccctttccaaaaaggatgtcttcagtgccacgcttagagaacttttgagtgaagtttgttaccaaacaaaatacaggtgtcttgaggttgcatcctggctcccagcagggcgcattgctggggataatttgtgggcagtgaaaagacacgactctgacatagagagtgaatgggagttgcagagcatgacctcattgttcaaggtgcccagagcagacattttgagaaaggctggatgcctctggttgggtcccacccttggcgttcatcgttggccaatagggcagaatcactctgaggcgttgagccgcaaaccccagaaagttctccagccaactgccttgttagattctttgcaagtgggctctagcattttacaggctgaaggcagaaaaaataaacaaaaaacttgaaaaaacagaatcttgaagtctgtggggatgaccacggaatccaaacaaagtgacagacagagctcagaaaggtcgtttaaggcaaacataaatagcaggtgtaactgacggggaaacaacaacacacaacaacaacaacaacaaccaactcagaaggtaagagcttgggccgggcacggtggctcaaacctgtaatcccagcactttgggaggctgaggcaggccgatagatcacttgaggtcagaagttcaagaccagcctggtcaacatggcaaaaccctgtctctactaaaaaaaaaaaaaaaaaaaaaaaaaattagctaggcatggtggcgcatgcctgtagtcccagctaatctggaggctgaggcacgagaatcgcttgaacccagaaggtggaggttgcagcaagccgagatggtgccactgtactccagcctgggcaatagagcaagactctgtctcaaaaaaaaaaaaaaaaaaaaaagagagagtttggataattaacttacttagaatataaaaggatgcagaggttagaaaaacaaaaattaaagttggaaaatttctttaaatctggaaaaggaaaccaaaagagactgtaaatactcatctgtatttctgaagtgttttcaggtagctcccaatagaactttcaatgagatgtttattccaaaaccaaagtaaaaattgacagcaaattgagtgcttgcctcaaaaggcacagaaatgaaacatgaaagaggatgacagaagtcaatctaacaatgacaactataacaatgtaaacacaatacatttccctatttttttttttttttttttttgagacggagtctcgctgtgttccccgggctggagtgcagtggcgcgatctcggctcactgcaagctccgcctcccgggttcacgccattctcctgcctcagcctcccgagtagctgggactacaggcgcccgccaccacgcctggctaattttttgtatttttaatagagacgaggtttcaccgtgtttgccaggatggtgtcaatctcctgacctcatgatccgcctgcctcagcctcccaaagtgctgggattacaggcatgagccactgcgcccggcctacatttccctattataaagcaaatcgttcatatgaaagttctgttaaatataaatttgaatgatctgctgtttatgggagacatattcaaaaattttttggagtatttgccatgtttcaggcacatcatttaccataaccaacactggtggagcctaatttacctaattttacacaccacaaatctaatttataggcctgggcaacagagcaaagaccccatctctacataaaaataaaaattagaaaattagctgggtgtggttctgtgcacctgtagtcccagctactcaggagggagtattgcttgaacccaggagttcaagcctacagtgaactatgatcgcgccagtgccctccagcctggactacagagtgagaccttgtctctaaaatgtacatgcatatatccaccacctagagtttccttctggaatgccctgggcattttcgaacctagcccaggaattccagccttgacatctctgggctggagcggaagccatggtgataggatccgaaaggctgggctttcaaatcctctgctccggggatgctgatctgcctggagagatgacatctggttaacagcttggaaaaacatgaagatgccaacaaggcgttcttcttccctggatccaacatcattttaaaatcacagaatgccacttgggaaggacctgagaaataactgagccaagttcccatatgttcttttatattaataatatagaagcgcctgagagcctgcaatgtcgggtaccacgacatcgtactactacatcatacctgtgcaagcattcactcagcctgaaccacaggatgctgaggttggctgcgggatgtctcctccttgttcctctacaacactcttttttttttgtttgtttgacatgaagtcttgctctactgcccaggctggagtgcagtggcacaatcttggctccctgcaacctccaccttccgggttcaagcgattctcctgcctcagcctccgaagtagctgggattacaggcgcatgccagcacacctggctaatttttctatttttactagtgacagggtttccccatgttggccaggctggactcgaactcctgacctcaggtgatccgcccaccttggcctctcaaagtgctgggattagaggtgtgagccaccttgcccagcctcctctacaccactctccacccttctttggattctctgcccaggaggctgcatccttggcgctctgttgctttctggcttttgatctaagcagttgccctctgcagaagttatcagtgccccagagctccccctccaggtaactcctctctcgtctggcccttcaggccttgggtgggaccaaagccacttctcactctttgctagtcttcgttaatgacacaagcacttctggtttctctacgtcttccccacagctttgtaaaaagtctgtttctcaaactctcctcaaattactatttcctactgggaccctgactcctacgggtaggtagtgacatccccattttatggatgagtaaactgaggtggagagaggtgaagaaaattgcccaaggtcggaaaggaacattcctgggattcaaatctggactcactcacatcagaggtttgctgttaccattattcctgcacctttgttgaaactggggagtggggccaggctgataccgtagcctttgtttccttgaaagaggaagatgcaggagatacaagaaggggcactggaactgccctgcaggttttcgtggcctggagtcaaccctcgggagcaattgaggtaggtggcaaatatttgctcaaaaggggtggctgaatttcgtggacaaatgcagagggcacctcctgtagcccgtgagtaacttccctgtagagatgaggaagccagcggaaaggcgggtggcacggacttccccagagctccccctctgctaagtggtgggtctagttacggatctagtcctacctgaagccaaagaaagccctggaacttcaaagcacccacttggctgctggcaactgtctacactgcgtatggactcacatactttgggagccatttgagcccagcaccttctgatgatgaagaggaggaggatggtgtcatggggacaccagcacattctctactccaagccctgctcgagaccttcctgtacagcactgtccgctggggcctctccatgtcactgtgaaggaggcgctatcgtggtggccattctgcagagcagtaaaccaaggcgctaaaaatataagaaacctgctcaggtcccacgacgagcaagagcggcgctcatcctgcagacgaggacaggggccctgaccatccgagaccatgcaggcgccaaaggcagcagggctctcagtcgctcctgttcctggactcactcccagggccctggaggtgggggtcttagccttctgctgctccccgctcaatgacaggctaggttgccgaggctcagaaaggccacgtgacccgtccagagtgcacagccgcaggtgtgagtctgactgagctccagccacctcgctcccggcgccttagagccgcccaccctgggttcctcaagaggatcacctggggctcgttaaaaacccagctcccggcggctccaaaccgtgactgggcagggaggggtctgggaatccggattttaaaccagcatttgctcctccacctcccccactccaggtgattcttaggatctgtaagtttgggaaacagcccaagccctgaggcgacgcagcctctccctgggcctttcatggccagccggcgctgtccccagagcccctggggtcccaggcgagctcgcggggcggggccgggtgagccggcacctccctgtgcgcagccccgccccaggggcggggcctcacctgccgcgggcaggtagacagctacctggtaaccgggtccggcccaggaggcttgggcgcgcgcagccatcccgggcctcgccggggacctagggacgcaggcaacgcctgcgcccgctcaccatggtcgagggacgcgtctccgagttcctgaagaaactcggcttctcgggcgggggccgccagtaccaggcgctggagaaggacgaagaggaagccttggtgagtccccgcgactccgcgccgggcgtgcgacccgaccccccatcccctccgtcgtaaccgtccccggcccgagaccccgcgttcgcgctgcgatccgcgaactcgccctcctcccctggctctggaaagaagctgtcctcacagcaaccgcgctctcatctgcgctctggcgcggggagctcagcatggaaccctcacgtgaacccattttgtggttgagaaactgaggccgagagtggttaagtatattccctaaggggcacggagctaggaagtgacctggctgggaacttaacctaggtttctctgactccagagaattaaaattcctgggtctccagacttgggctgctttatggatttttaaaacttaaattggaaaataaaattagagggatgcaaaaaacaaaagattgctgaaatgttgtagcaataatagaaagcaaagttggagctgagggacctcccagcctcacttcctacagtcaggtacttttagaaagtcactcagagctgtatgcctgctttgcaaccttcagggaccctctgggataaagcagcagggtgccagggcagggcggttcatgagggaacgaagtggcaaagctgtcaaataaagcccctcctgttccttggattcttggaagccaggggtgaagccaggcttgagggtgacccaacacccttctttttagcttcgcaaacagaactcgttgcatgctttaaggtcaggggggcactgaatttctgcagaagcgtttctctgcacgccagagggtcgttgcacttttttttttttcatttacgcttaagcagtcgttcaaaagtaacatttctgaacgagtcccctgggttgctaattagaaatatgact

SEQ ID NO: 6993 - DNA, 6000 bp, Homo sapiens
tcactgctgaagagtagttaccgcagggagtcaagtgtggaccttacttgctggatggggactcatgtggtggggggaggtgctggaggctggatgtctacagtgcagactgtaactaggaatgaggcgcgggagcaaggtcagagtgggcccctgcggtgcccggtgccctctcacgctcaggtagcaggcagtcactgtcccctctgggcatctttcctccctggtaagtggtttgggaggcagccctgctcccccgtggaaaattcatgtacaggtgacttgaatgcagttgtttatagttcctgggtttaactctgtcaagtactgcattcatatcccatagtcggaacagaagtgtttaactctgtcaagtactgcattcacatcccatagtcggaacagaagtgtttaactctgtcaaggttacttaagaatgagaagaataagcaacatctgacattccaaatgaggttcaagtttgtcttcaagaagctcctagaagtttctgacaggattttacatggccagcagccaccacaccttcttctcccactcctgggctggtcctcagttgctctgtgactcctcctccactcaacccataaaagccagagtgccccaagccacgttcctggggtgtgatgagagacactggttttcctccccgttcctggctcctcacggccctggttagtcttttgatagaatgccaggtgcgtgagcctcaggggcgctaggaccccaccttctcctgccctccttccactccactgttccctctccgcctttctgacggtgggtcttaagacctccaggagagggtcccccctagacctcgggggaaggaatgctgatgtcatgaagctcccataaaaacccaagaggacggggagcttccatgcccctttcccatacctcgccctatgtgtctcttcatctgtatcctttgcagtgtcctgtataataaacccataaacataaggttttccctgagctctgtgagttgctccagcaaattaatcaaatccaaacaggaagccatggaaaccccaccttgaagctggtgggtcagaggttccagagcctggacttgctgctgagccctcaacccgtgggctctgacactatctccaggtaggcagtgtcagaacagaatgcggagacacctagctggtggccgctgcttggtgtgtggggaaactcctatacatccggtcacacaagtcttcttctgtgttgactgttggcggtgagagcagaggacacacgcggttggagagcttttccctacgcagtcctcaagtgctaagacctgctctcatggcttcagaagtcaccggcacaccactggttctcaatctacatccatctctggtctctgtactcagacccattcttcacctttcaacctaggacttcttcatttgaacatctcaaacttaacataccccaaacagaagtaatcacctcccctccagacctgtttctctgcctcttccctcaacaaatggcaccagtgcaccatcgtcccagcgcacaagccaggaacctaggtaacacccttacttccttttcccctaggtccatgcacgattagtcaccaagacctgtggattctcccacctgctctctcttctgtccccttctccgtacccatgctgcactcagttttgccacctccctgcctctagtcttgggtgtactcctgtctccagcatcctttctgctgcaggctggggccatcactcgaaggcactgatctgatcacgcaactctcctccagtggcttccctctgtcctcaggatggtgcccaaatgcctctgcatgatctacaaggtcactacaaagcaatctgtccaccactcaactctctctgcccgctgcccctttacactccatcctattgctctctccaaactcccccactcgctctcctctcccgcccactattttctcctgctctttgcacatgctggtcccttgaatgttctccctccatcccccacctcctgagggtcaaaggctggcccgctgcctgcatgttcctttctctgggcaacctgactgccctgattgcccaagcctaggctggctgacttctctcgaatcccttgccacttttttactaagctccgcctgtgaggtttaggtgctgtgcttgctggcttgctgcaccttcaagtgctaagcaggtactgtgtttcatccacagccatatccctcctcagcacgggcctggcacaaagcagatactcaaaaacatttattagaaaagtgaataatcccgcataaatgctactgatgaatctagctccctgcaagtcaatgcatttcacagatccaataattctcttgacaacagaacaattaagatggttggaaaggctgagcgcagtggctcatgcctggaatcccagcactttgggatgcggaggtggccgtattacttgaggtaaggagttcaagaccagcctggtcaacacagtgaaaccccatctctactaaaaatacaaaaattagctgggtgtggtggtggacgcctgaaatcccagctacctgggaggctgaagcagaagaatcacctgaatctgggaggtggaagttgcagtgagccgagatcatgccattgcactccaggctgggtgacaagagcgaaactccatctcaaaaaaacaaaaagatggttggaaagacctggattaaaacacacacacacactccccagtggtgtttcagtaatgacagcagatatcttcaagagctaaaatacttagttttataaatatcatctaagtattataatcatctgaatcctacccggaaatgatatgaagtttaactttaacaggcactcaaagatgtgcccaggaaccttacgccaggactctttgcccagagatacttcttgcttgcccagaactgacttgggtgtcataattagttaagttataaatggtagattatgaaatggcttcgttttacttggtggaggagggacacagataaagaaattctacttacaccttctcaagcttagctacttcttacatcaattagctactattttttagcatcacagtttattcttaaatgaaaaacaaacagcacctcagctcaggtatgcaggtctgaagctacagtttacttttccttcaggttttaacaactcgatggaatttatagatggtctttttcccttcattgatcaccggaactgaaaagctactgcctaaaattcacttaccaactagtctacctgcatgctacatcttttttcccactgtacttcaataaagctgtcattgcaaacaaaaacataaaagcgtgttggacagatcgtctgctcctgctgtttaatgtcacagaaattcgtttttttttttttttttttttttttgagacggagtcttgctctgtcacccaggctggagtgcagtggcgtgatctcggctcactgcaacctctgcctcctgggttcaagcgattctcttgcctcagcctcccgagtggctgggatgacaggcgcccgccaccacgcccggctaagttttgtatttttagtagagaaggggtttcaccatgttggtcaggctggtctcaaacttctgacctcaggtgatccgcctgcctcggcctcccaaagtgctaggattacaggggtcagccaccgcgcccggccccacagaaattctttagcttttaaaagccatggaaacattctagataagttgttaaccattaacgggaacaaattctctttacacaaagctcaggcacattcaatcaaggggagccaggcctaagatgcatcacacagatctgaccatgcaactacctttctacaagtgtctgagctccggggtgcccgagtaccgacagccaaagaagcatttacactttgccagataaggaatcggctctgcgaaggtgcgaagaaccaaatcctagcgattaatgtcccaacaacgtgaacacttcctgcaactcgaaatcctcaagggaaactctgtcgaatccccaccaagtgaacgatgacttgtttctacaaaggctactgatttcaggaaactaacgtataactcgtcgccttaaagtgcctctaaaagcatccacgacggttaaagtcgctgctactacgggacgctatttattcagcgccaagacccaagcgccatcgtggatcaccccattcctggccacggcaaccctagggagcgggtcctaggagcctgctggagggcgaccgctgggccagcttcctctctgctgactgaggggaggccaggctgcctgcaaggggaaggggccctttccgcgcttaccagggtgagagccacctccagcatgggggcgagggccagggtgccgtggaagagggggatgcagtccacgaagagggtgtggtgggcgccggggccgcccagggggaggtgctccttacgcggcttctgcttctcggccaccaggagcccgttgacggcgcagtgcgggtacttggcgccgtgcagcaccatcttgcagtaggcctgggtggtcagtttcaccccgggcatgctgacccgggagggccccggaggcccctgggcgcgcggctgaggcctggacccgctgcctggccgcgcggcgcctcagccgagaagcgggacgaggcggcggcgattgatggcgcggccgcgggctggcgggggacccttcaggcccggccccgtttgggcctcggctcctggaaaagcgactcgcgcctctgggaagccgcagccccagactccagtcgcgcttctcgcccggcgccgccggaaagcagcctctccaacgcctgccggaaagcagcccggcccggcattttacgacgttcgcagcgctacccttttccgctccacggtgacctccgtgcggccgggtgcgggcggagtcttcctcgatcccgtggtgctccgcggcgcggccttgctctcttccggtcgcgggacaccgggtgtagagggcggtcgcggcgggcagtggcggcaggtgagacaggaggtggccggtgcggcgccgccaggccgggccgggtcggggggccgggagccatcaagtctgcacgtccgcagcctggccgctcggcttcagcaggaagcaccgaatgggcctcggagccaggtgacattgaggccggcccgtggggactccgggctcggtggctccaggctcggggggccgccccgaagtgcccggtccatcttacccggtctcgcagcggctgcggaccggcctcgggcactgaccttggagcgcccgctggccgagggctcaggctgcggggaggcgggcccgcgctctgtgcctgcagcctccgcccttgctccttcaaaaggtccctgtgcaacccctcccgggttttgcggggctcccgggcggcgctcggctttccagcctggaaggcgcctattgtttgctcacgcaagggctaggcccaaggagagaagctagacgcgggcgttcagccctgacgtcatgcttgtttattctgccccaaggagggtatttccccacatcactctcaccagtcctccgaagggtcgatttaaagggggccgtgtaaggttgatgggcctgaatagaggagggcccgggtgagggggggtctcataggttttccgctctcctcagggattggaaattgatcggggctgtgttggcagccttctccaatttccccttctagtctatgtacaggcggtattaggttttaaacactcagttgaatgtgatgcgtgccacggtccctgtgagctgtcacctccccccaccgctccctgaagaatggagtctgtcacggcagcacagtgctttaatgatctctagctttttcagagtcaccttgttagcattttttcttcttgcctttttttgtttgagacggactcttgctctggttgcccaggctggggtgcagtggtgcggtctcggctcactgcagtctctacctcccgggttcaagcgattcttctacc

SEQ ID NO: 6994 - DNA, 6000 bp, Homo sapiens
catttgttttaacactatgatgaggctttacaataatgacctctttgttagtgagaactgataacatctaaggaagtaagtcgaatatagggctgggcattttccaattggttgcctcaaaggtcacaagtagtatttcttggactgaggaaaaccatgttaactgggcagggcgcggtggcttacacctgtaatcccagcactttgggaggccgaggcgggtggatcatgaggtcagatcgagaccatcctggctaacacagtgaaaccccgtctctactaaaagtacaaaaaattagctgggcgtgttggcgggcgcctatagtcccagctactcaggaggctgaagcaggagaatggtgtgaacccgggaggcggagcttgcagtgagccgagatggcgccacatgcactgggcaatggtgcattccagcctgggcgacagagagaaaaaaaagaaagaaagaaagccacgttaactgtatcccaatgagttctcaacatccggatgtgaaaaaatgggatcttacccactgctcaaaagaactagtcacactaactggaaagaagggaaaatattcaaactttgaacaagaggattgcagtttaaaataagcgggctgatggagcctccacagttgcacacgttaacagtcccagaatggagcaaaagctataaacacagcagtcctacagaatttgtttagaattaaacaaacaggcaaacaaaaacatggtggaacctcagcccgttccacctggtgttacacactcatttaggaaacagctgcgggtcgcgtgactgatttgtcagtgctttaccacgcgttctactttgcagattcttgaagctgaacaggccagacttccctggggaggaagacactgaacatacagcctgctctagctacttattccctggattctccagggaagacattctgaagactgcagtctattcagtgtcaacccctaaatcctcctgaccaaatcctttctgagaatagctccctgcactcctcttgagcaatacttgtttgtttacttgctctcaagagcaaagcgatgacaccacgatggataggacactgggcctatagtggtgcagacgacaaagccggtggcctctctcttccaatcagaaagaggagaggagggagaggccgaggaggcctgaggcctggagcaaattctccgcgtgacttgccgtccatattgagtgtggcaaaaaataaccccgatgctttctgtaggtcaggttaatgttttgtgattcatttgacaggttcttacacacagctagacagcatgatttacagccacttacatcactcaagctgggccatcacattcaattcttagcagttacatcatttccccacggttatggtcatttcctggtttgaaaaaaggaatagggtgccactgctggactttgaagaatgaatgattatttggtagtttaaaggcaccatgaaattcctagagaaaacactgagtaaattaaaatgaaagatgtgttcttgcttttctactttacatggattattacagggaacattaacgtttatattacactatgcttatattaactagcttaaaataattcatgagtaatattaatttaccactctgaatattgttcactactatattaaatttctactaaactgcagtcttttgggtcacatgaaatgtttcataaatactcaagcacacttatgcttccaaaagttacatgaagttgtttcttatatttatttgtatatgaatgtacattattataatatatatacaatagatatatattatttaactaaatgtgttattcttacatgggaatgaaacctatgagccatctttaaaccccaatcattttggattcttttctgagagccatggaaggatatgtggctttagattcaagttggaattagaagttaggcgtagaagtgtcagctttgcaaatgtggacttcagtcctatatttcaaaaacacgcagagtaaccctggcccattactacacaactgtcgatgctacttcctctggcaatgaacccaaggcctggagtaatttggtaaagctttatggatgcccaagggtgggaaaatatgagactctgcttcccctcccccatctccatatgccagatatcgattttttcccttcttcttgcatttggaacagttgtccagcaagagaaagaaaaagcccatttcttacaaagcagcaactcagccaagaacgcactcaccagtcaatacttaatatcataaaaatccagaaaagaaagcaacacagactccactctttaagacttcaaaactgatactttgttgtttggcagaaggtaggtacataatatgcgcttaccggatttttttttctattttcacagaatacaaaccaacagactgtagccatcttctgaacgctgtcctagatcatgtgaaggcacagcttcagaggttaaaaatttcggaatctggaaaccagagagaatgtttaagtactcttctttattaattgtatgactatcagagatgtctgaggtaaagaactatgacaaaaaaatcagggacagaaagtgccacctgcacaaatgcaccgttatttcacaaaaagtggtacaattggctgggcgcggtggctcgtgcctgtaatcccagcactttgggaggccaaggcgtgtggatcacctgaggtcgggagttcaagaccagcctggccaacatggtgacaccctctctctactacaaatacaaaaattagctgggcgtggtggcaggcacctgtattcccagctactggggaggctgaggcaggagaatcacctgaacccgggaggtggaggttgcagtgagctgagatcacgccactgcactccagcctgggcaacagtgcaaggctctgtctcaaaaaacaaataaataaaataaacagtggtgtaataaagaactacaactaacgtcattcttctgatggtgggagtaaattaattatacaaggatctatgacagtagttggcttctctagaagaaatcccaactgtataaaagcactttgagaaatatattttctttctttttttttttgagatggagtttcgctctttcccccaggctggagtgcagtggcaggatcttggctcgctgcaacctctgccttccggtttcaagcgattctcctgcctcagcctcccgagtagctgggattacaggcgcctgccaccacacccggctaatttttgtatttttagtagagatgggggtttcgccatgttgaccaggctggtctcgaactcttgacctcgtgatcctcctgccttgacctcccaaagtgctggaattacaggcatgagtcgccgcacctggcgcgagaaatatattttcatactttttttcttcttttttgtggaggacggggtcttgctatgttgcccagtcaggtctcaaactcctgggctcaagcgatcctcccagcctctgcctccctgagagctgggtttacaggcttggagccaccgccccccgctattttcatgttttgtatgattcaagcttacagtgtagagtgtattagcctaatccaattactttatccaattgggatagaagaaaggcttttacaaagtcaaaaggagaaatcctggaactatggggctctttcaaagtattagatgttaaagaacaaaaacagccaaatagccgggagcagtggctcacgcctgtaatcccaactcttaaggaggccgaggcgggagggttgcttgaggccaggagttcaagaccagcccgggcaacacagcgagatcccggctctactcccagcttctcgggaggctgaggcaggaggatcccttgagcccaggcgaccgaggccgccgcgagctatgatcgtgccactgcattccaggctgggcaacagagcaagaccctgtctcaaaaaaaccccaaagaatctagtgctgttcctacagagacacattggccacaggctgaggtgggcaatagcaaccaaatatcgcatggtggtttacgcactgcagcccatttggagtcctcaaatatgactgccctttcacagatgagtctgagactcaaaaactgtcactagcgtaaggttgtccagcgagtttagtggctgggaggctgaggggtagacagggcggctagcgatgtggggcaggcctggcagtcgccacagacgacctaacggtaggaaaatcttacagccaccaggagagttccaggcgccgcggcagggggactgggagaggggactgcgcccagaatgaaggctcgggacaaaagcagttgcgcaaacgcgccaaggctgggcgtcgagtgaccgcgggcggaggtcaccagcggccactccccggaagccacccacggaccacgcgcgcccctgcacgcagagggggccagggctccacgggcgagcggcgaccctgcctcccggagacggcgcggcctgccctgcgcgcctcagccccgggtgccggcgtctcgggcagcaccaccaagtctctctggaggggaaaggatggtcggatttgccccatgtcccttcctctgacccctccctcaagagtgccccgggacaccccgcctgtggctcagcctcccccgccccgcgctgccatctcctcagggccgggcagcaggctcccgagcgcccacagacccggggtgcggcccagcccacaaccgtcacctcaggggcctcaggcgcccagcggtgctgggcggggctggggcacgaccgggagcatgcgcagagcgcgcgtttcgcccatcgcgcacgcgcacacacctgctccgcccccacgctgcgtgccgctgctgggttccgccacgcccgtcatggcggcggccccggccggctctggccccgcccctcggtgacgcgtcgcgagtcacctgaccaggctgcgggctgaggagatacaagggaagtggctatcgccagagtcggattcgccgccgcagcagccgccgcccccgggagccgccgggaccctcgcgtcgtcgccgccgccgccgcccagatccctgcaccatgccgtcggagaagaccttcaagcagcgccgcaccttcggtgagtgtcgccgcgagggcggcgggtgcggcggggccggggtccgagctgtggagggcggcagggcctgggacgccgtgaggggtcggggccgagccgggaggccgagcggggccggtggctgccggccggcggggccgagggatgcggggcccggggccccgtgagggacccaggccgggaccgagccgggagggccaggggctggtctgggccggggcggcctgcggacctctcggaggcctgggaggaggcagccggcggagggcgggcgggggccggtgcgctcggggccccgggcctgctgaatcaccccgcgccctccgcggcggggtgcctgccgtaccccggccaccgccgcccccgcaagcgcgctgcgggcgagggtcgcgcttctggggcccaacagcccccggggccgcgctgggccgttcggctctgaagcggggctgcgccgggacccagcgcgtcaccttcagggctggttttcccgtcgagggagcccgcccgggtgcgagtgcctcttacagacctcagtgcctcggtcgagaggaggggaatgtgctgggccccggcctcgccgcgcccgggacggcccacagcggtgttgccagttcctgtctgtagcccaggagctggggtgggagacttctcttgggtttgcgattacgttctcaccttggcaccaggaataccgaatacatcccttttctgccggttcagactggaaacccagcttaggtgtgctggcatttggttaaacgtgcaggtgtcaccatcacaatatttactccacgcagatgatgcgaagtgattatttcccgcttgagcaagagaacgccgcagatccaggtatctgttgttgcctaagttccagacaccggtttggaaggga

SEQ ID NO: 6995 - DNA, 6000 bp, Homo sapiens
tgtagggcccagtaaaagagagaggcttgggtcgtggcacagtgggaaggtggccatctgcaagctgggcagagaactctcaccagggactgaatcagccagaaacttgatcttggacttttagcctcaaaaacaataagacatttctgttgttgaagtcacccagtctgcggtattttgttatgacggcccttgaagactaatacacaggcagacagtgctagaaagctcactgcatcactgtaactgcagaaaacaaaacaaagccaaccgccctaaatgtccctcattgacagtgggtgtatgaggaggtgactgtcctcctggctgctggtactctggggaggcggctttggtgctcaagccaagagattgaggttgaactctgggactcccaggaggggctgattttcctgagagccccgtgagcaaaaagtggtaaacgttttctgtaaagaacaagatggtaaatattttaggctttgtaggctatatggtgtctgtcacaacgactccactcttatgttgcagtgtaaaagccactctagacacacaaatgaatggccatggttgtgcttcagtgaaattctgtttatgaaaataggcagtggactagatttggcctctgggttatggtttgtgtgatgcctggcttaaaacaacaatcttcttttttttttttttttttttcagaaaattgaaattctgacaagatgtgatggggaacgcttgtctcagctgcatgtggctttagctggggtgacctgcctggggtctggagggtctactttcaagatggtacacttttatggctgtcaaatgctgctggctgctggctgggagtctggctggagctgtgggttggaggaccctgtatctctccttgttggcacgtccaggggctgcttgagcttccttacatcatggcaacttggttccaagcttgagcaccccaagagcatgaggcagaagctgtgttgctgtttatgaactgacctttgaagtcacatcctgtcacttctgtgataatcacacactggcccagattcaggggaagggaatgcagagcccacctctcaacagagacctagaaacgcccaaatggcagtcccactttgctcccccaaagcactccctcaacaggaggggtgtcaacaccacactggaagaagatcacgtggaatgggggatcttgtggacatttcacagtgttatggtaaacacaggcaaagacaagaaggcaagcacagataagttgatcgtggctcagttctttgaaggagattaataggcttttgtggggatgcagggggagctttctttctgcactagtcaggaagcctctctggagctgagaccagaaagctctactgtcatgggaagaggcaccaggcaaaagagacagcaaggacccatgcctggaggccagaaagggtgcaggctggaaggccaggcagacttgggctcgaatcctgcccagtcattattttccctctggcaaggcactttacgttggtggggaaaagtgattcttttaaaaaggagagtgtaattccaaatcacctgagtccatgagatgactaatgtgctgtcttcatcctagtgcctggctcacatgtgggttacagcttttttacccttctccctggtttttgtttttaaacggctgggtggtactacgtttataggcttggagagtttcctccaaagtgaaatcaatactgccagccctactttatcgggagggcggtgatttccaaattgcacagaacaaatgcctgtaatatctgcatttcagagactagagcctgtcaccgctggagtaactgactgcaggagatgagagagggtcagttggaggtgggggtcttggaactgcaagggagcggagtgtacactggccaaaggtggaaggtgctgaccagtaactgcttggaagcaaccaccgtgtttcaataggatctcagttgcaatccactgcttgtgtgaaggagggctgctgattcagcagcaaaatggttggaaataaaatggaagaaatgaaaagtagaacatacgagtggtggcaatgtttatttcaacaggcagagggctgggtgtctccatgcaggaatccatgaccctccctggggggctggcttccaataacattacttcccacttcccgagcgcttactgagtgctgggcgcctagcttttgaattcccacggtaaccctatgggaactctgccatctccattttacagatgagaaaactgagctcagggacattaggtgactgcccaaagccatactgctggtgggccccggagccaaggtttcgacccgaatctcttgaggacaaggtgcagttcctttggcccacacatttacaacagagaaatttccatggacatgaaacagcccagagatattatttcatacccatttagatgaacaaagtaaaataaatggaaagaaaatcagaagtttgaggacaccagtgctggccaggaaatagagaaccacaaacccaggcacactgaagggtgagaggtcagttgctccaggtgtttggaaagcaatttggcagcttccaataaagtccaagacgtagctggtccaatgatgccaccgcagacatttagagaacttctgtagaggggcacagggagacagcgctagaaagctcaatgaatcactgtaactgcacaaaacaaaacaaagccgaccgccctaaatgttcctcattgacagtgggtgtatgaggaggtgactgtcctcctggctgctggtactctggggagggagctttggtgcccaaggcaagagactgaggttgaactctgggactcccaggaggggctgatttttctgagagccccgtgagccaagagtggggaccatcctgattctctcggacaggggaagatctgagcagggctcctggctgattggaggctccgaatcgcacctcttctcctgtcctaatctcaggctccaggcctggcttgcagtttctggctcaccgcgctgcggtcaccggcccacactcccaggagcgaggaccctgggcagcctccacacccccatcagcccactgcaccggtctgctgccatttcccgcacgcatttcaggagggctggggacgccggcttctgcctgaggatttatggtccaggaaatgcattttaaatggatcccaggatgctcggatccaagaatcagactctctcttgtgcgtgggaagaggggcggagggtgagagtatgtctggagagagacctagaaacgcccgaatggcggtcccactttgctccccaaaagcgcgaccgttccccgagtgggggggcgctacctgttggccagggcgcagggcgcacggaattcgggtgactttgctccaagatacacgcgtgtgtcccgactctcactcaatttataggggagagggactcgccaaatccctgttttctggggtaagcccccctccccccactcttggacccaagctgcccggaaggaagaaggaagcattgtttgtcaccggagaaaaccacctgtggtttgcaaagggcctcagtcgagtcaggggcaggcggggcagatccgagcccggcgggaggggcgaggcgcgggggcgggcaggggcgagggtaggggcgctcagctggcaggtcctgctctgcaggcctcaccgcccagctcccgggagggggccgagggcgccctgagtgctgcgcgccttcccatgacgcagttcctgtgcctttaaatcccactcccggagggggcgggggcgccccggctggaccccggtttccagtccggcgggggccccggggaagcccagggcggggagcgcggggctgggggcgcggagggcggggcgcccggggtccccgcccgcgcgccgcgccctagcctgctgggccgcgcccctcttgggaccgccgcgctccgggggcgggggcgggggcgggggcggggggcggggggcggggggcgggcgggggcgcgcgggcgggcggggtgcgggcgcgcgccgcgcggcccgagcgcgcgagccgggcccggagcgcacgccgccgccgccaccgccgccgccgccgcccgagccgccgcattgctgctgctgctgccgccgccgccccgcgcccggcccgcggcccccaatatggtgcagccgccagcgccgccgcccgtgccgccgccgccgcccgcgggccccgccgccgccctcgggcgcccgcagcgcggcagccgcaggtggggggccgcggcccgggcctgagctgccccccgcccggcctcggcgcggcgccctccccgcggggctgccggcgaggggccctctcgccgctgaggtggagccgcgggccccgccgccgccgctcctgccccctccctccctcctcccctccccctcccctccggtcctgtctccagcgggagcgcgagacgctggtcaggctccgcggcgcagctcgaaaaggaataatcgcccccgattgactgaaattcctccggagccggcgccgcggccgcccgcgcccgagaccgcgctccggggccgcgtcctcctctcctccggaaaacgctcgcgacccagggccgccggcggccgcgactctgctgtgtcgatcgcctgagtccgttttcaccgtttgcgggatctggaaccgagttacatgcatgtccagtgggggcaggtttaattttgacgacggagggtcctactgtggaggctgggaggacggcaaggcgcacggccatggcgtctgcaccggccccaagggccaaggcgaatacaccggctcgtggagccacggcttcgaggtgctgggcgtctacacctggcccagcggcaacacgtaccagggcacctgggcgcagggcaagcgccacggcatcggcctggagagcaaggggaagtgggtgtacaagggcgagtggacgcacggattcaaggggcgctacggggtgcgggagtgcgcgggcaacggggccaaatacgaagggacctggagcaacgggctgcaggacggctacgggaccgagacctactcggacggaggtaggtgccgcgggccgggccgggccggggcgggagggacgtgcttccgatcgcgccccttctgtggatctctggggaagttgagctgcgtcctccggttgggccgtgggcaccaggggcctttcccgggcttccctggaagccacggcggctcctggctacaggttgccccgctgcctggtggggacagtgcccctgtgccagctgaagggtgttgggggctttccaggggcagagccaggcggggcccagcagagcctccgtgcgtcggacacagcaggccggagacctgcgggaagggccaggctgggcccgcggccctggggaacccagcaagggcagagggggctgggagaagggcccctccccttgttggctttgccccccaccctggaggccgcccttcgatcaggccccagcttcgcttctggtgttcctgcggcgcccgagggccttcctcagccccgaatctgcccaagccgagagaaagggagtgatggggagcgctaggggcgggggatgccaacccgaaccaaaacagccaggcagtacacttctaggtggttggacgcggactagcgctgtcgaagcaggctgctggagggaggagggaggcccatctgctcagtgagagcccaggaatctcgtctttcagtggctgcatcgttttcaccattagttgagggaatcgatctgtgccttcattctaagatgccaccgcattcggggcagagccggggccggaagccagggagctgcctgctgctgctgctgctgctgctgctgctgctgctgctgctgtaagatggtttctgtgcagggaaccttggccggctctgcagctgcccgcctgcctggactctccgatatccactcctcagtgcacctgacacgcatggagccggtcctttcctggaagccagaccccaaacaaactggctt

SEQ ID NO: 6996 - DNA, 6000 bp, Homo sapiens
agcgttcgcatggtgtggggggctggacagccactctctccgggaccacagctttctgggctggggcaggacaaggccactcatgccccacttgcccttctgaggttcagccaaatgaggctcccacccccatgactcacaaggcagctgggagctccggcactacccgtggggatggtcaggactctaggggccttggggggtgtgggccactccaccgtcagccccagccccatccccagccacagcctgtctttggagggtgctgactgggggccattgcagcttatggatccctgtgaaagcctgaacatcgggagcagcctggtgacctctgctctctggttcccccaacagtgctgtcccacgtccccacccctgtggccagctccgcccactcagcctcagccttgctggggcctggcccgacctcaggagtccctgctggcctggccacccttgtgccttcgcctcagccatcggggaggctcgggtggtctcagggccaacgccaggtgagacctcaggtgagctgccccccaccttcccagtgctcagggccagggaaagggtggtgggcatggaccacacttgcagcccccccctggggcatgcctggccgctggcctccctgatccctgcccgggttggggctccaagggcaggaagtcaaggcgtccacgcttggtgacagtgctgggccggcctggagggggcaggcatgtccagcatggagacggaagcagggaagagcccatcgtcccctcccagctctgccctgaacaccctccagcaatcggaggagcccgctgcccttcccccacccgcctccactggcatccctggagccacactgccccctgccggggctggcgggtgtgatgggccaccaggccaccagccctgaccccgccagccctgagcccgccagtcctgagcccacccgagctcttacggctgcaccttgagccagtgcctggttggctcctctgtcactgtggggagatgggacgcaaaaccagtgtcaggctggctgggcaggacaggaccccacttccccaggtcagggacaggcctgagggagccccagacaggcccgccaccccctgacccctctgtgcccaactccccgtagagccaggactgaccgtcaggctccagggacctgctgtccccaggtcctcaggagggccagcaccaccccgcccccaccagcagcccctcctgtctaacatgtccgtctgtctgtctgtctgtctgtccgtgtgttttgaatgcccaagatgttttaaacagacttctcgaatattcttttcatgtgtgttgcagggggggtcaggggcttctgaacaaaaacggcacccccatacctgatggggctcctctgagcccacctggactgaccccctgtggccgccaggggcagctggtggcctgcctgaatgtgggggcagtgtcacccctgagcccagagagccggagcacagcagggtccaggatggccccagctacagacactgcctggcttcctccacaccccgagatccagctgcgtctcctctgtcccggggaaacttacgggaaacttatgggcggaagtccctctgcagggcccactacccagagccagccacatgcactcaggccagggctcaggggccgtgggggctggtggccccagcccttctggatccactccccacccctcactcactccgtggggaccttcatctgcctagatgggctggtctgtgctctgacggccccaggactgggtgtcggcctcaccccagcgccctggcggcctcccggccagagtagaatgttggaagggcatggcccatggccgacgccaggctcccggccagggcccacctgtgtttgtctcctcaccccggcctcctccagcctcaggccctgcctgtcagacaggggcacttgcccaggggctcctcagggagcagttggtacctgcagagcaagcccccagagcccctgccacaggcaccccagcctcaggtcaggtctggaatggacacagcccccagaccaagaccagggcctcctcaccccggggtcccctcccttggtgtcgggtgtcacccaaactccctggacgtcacccttctgccctccacgccccacaccctgggtaggagccgccttcacagctgctaacccctgccctccagcccccactgcctcttcggtaacggggctgtgactggcctaagccctgggcctccacagggcccctgtccagcccaccttgctcaaccgcagcgttccgcatcacgcctgccccttagtggttggggtgtgcatgtatatttatacactgtaattacataaatacaatttaataatcaagggtcaagtgccgttactgcactgtgcaattacagaatcactccagagcagacaccatggcatctcagctgaaaaccggcacccgcctgcatctatcgtgagaaagttggaaattccttagcccagcctcgaccactgcctgcggtgttgggaggagtggccaagggctgggggtggggggacctctgggacatccaagactgcaaggctcctggggggtccgggaccctgtttgttgtccccccgttcctcatactggggagaggaaataggatgggaactgaggctgtggaccagggagccccctctacatcttggccggcccacccccacctcatgcccatgaggtgcgtcccccgaggtggagagttgaggtgggcaaggcagagggcaggagtgatgggggtgagtcccaaaggctcaggactgcagactctggaaaaaggaggagaaggcccagagtggggtcctagctggaggcttggggtgctgagggagggtccggcgtctccaggtccaccaggaaagggaagggctcttctagggctgatggtcctgcagccgaaaatgtacccctgcccccactgcacaggacctccagactcagggtacccagcccttccctgccacctacctctgacacaaggagaaactgaggcacgggggagaacctccagcccaaggctccgagctgggactggacccaggctcctgcctcctgaccttcctgctgccctgggagcatgtggagcggggtccctcgcgggggcacctgcccctgggggatagcccgccagccagggagcacaccctcccgcagtggttaagccggctgcttccctggccccgccctgcatttggggctcacccaggacctggcccagcttagcctttcccttagagacccccacatcccatggaggagggatttggcctccgtttctccccgaggtgggtgggaggcaggtggctgaagcgaggtgggtgcagggtggaagcggagaggagctggggttggcagaccgcagcctccccagacctctttctggggggagggcgagcacttctacctcacccctgcactagtcccgtgaggatgaaaaccaaaagcactcagagggcttctccacccctattttgaggtcactgaccacagaggcaggatggtggtccccaacaggctacaccccagccccagaggcctcccagtctggagatggactccctgccctctctcatcttggagcagtgagcgctagggacagtcctggcctgagcctcccgggcagcctggcctcctttcaagcaggccaagtgcacagatgctgcctgcacctgcacagccacccgccgtcgacaggagagcagaggtaccgggtctgctcccatcacagagaggaacgggctccccggcccggccctgggctggtcggcaacccccactccccaccctgcctgctcaaaagaaaggatcctcctgcctccagccccctccaccccctctccaggaccttcctgaccgtgcgctgggcctgtgcaggtgttgagccacacccacaccatcccagggggcggggtctcgaaggggagaacaggtgccacagtcaacaggagggagggcttctggccgaggtggcaaggaggctccaggaggcggcagcgttgaccttgggtgttgagggatgatgagaaggagttctgtaggaaggaaggtgctccaggcagggggcctcggggaacaaggggatgctggaggaggtgcgtggactgggggaattgggggtgtcctacgagccacgctggtatcagaggcgtgtgaaccagagcagttccatactgaataagagctgggcaaaatgaggtcgcgaggaggtgcgtggaaggcgggcctagcgttcagtgggatgcggggaggcgcaggagacgcagccagagaggcgaggggcccaaggaagtgctcaagaggtgtcccccggcagggactacaatgcagattccctggagcaggggcgagccgggcccaaggagcaggaaatgaagaagccaggaatcccagctggtccctgacccggacgcacccaccctgccttccccacagcctggcctctggctctgctcccaacgcagcaagccggggtatctccgacctagccctggccctgcccgccggaaccccgcaaaagctatcactcagccctcggccccgccccggccccaccccggccccaccccgcactctcacaaggtgtcactcagccctcggccccgccccgcccgccccatcctcctctggctccgccccaccagcctcgtgcggtcaccgccccgccggcgcacctgcgctgtcactcagccctcggccccggccccgccccgcctgccccactcgcacacgggctatcactcagcctgcgccccgccctagctcgccagaggctccgccccacccgcctgccaacacgctgtcactcagccttagccctgcccaggccggccctcggcccgtcagaggcctccttcgtgctgtcactcagcccttgccccgccccctccccgcccccctcacacgtgctgtctctgtctctggccctggcccgccccgcgcacttgcgctgtcactcagcctggacgcgcttcttcgggtcgcgggtgcactccggcccggctcccgcctcggccccgatggacgccgcgttcctcctcgtcctcgggctgttggcccaggtaaggcatcggcacctgcgggggtccccgctgcctccctcgacgctgcgggacagtgtcttcaactgcagccgcacaggtctcccccagaaccactggccctggtcgcctttgggggcctgtgagcggagtggctccgggtgggtccctgggctgggggcagcaccccaggggttgtggggagtgagtgtaaccaaacactccatctggtggaatcacccccaggactgcagagtgctgctggggtcagggaccccaggcaggggccacccaggtagccgtgccctctctttggaggaaccgctgccggggtctgggggttgccagtcttgagtggagcagagagaggggggagcggcaggagtgcccctctctggggggctgggggccaggtttctatagggactccctgcggtgggcacaggacccctggctagtcttgggttttgtccaaaccccccaccccaagttcctggccagcaggggtggctgcaggccctgcccccaggaactcaccctcacggctacttctcgattgggagggcccagcccgagccaggtcgcaacacacggccttgcagagtggcgtgtggcagccctgggggctctgttcctgggcttcacctgggaccctgccgcagctgcctggggtgatcaggcctgggggcccagcccccagaggctgctggactctgcccctaaaaatcttgtctggactgctggcaccgtggtctctccaacgtgggagcaagccagagtggaaggaagcccaggcctcagccccccacacccgacatgggtactgcctagctggagccacgtctcctcacaccctagggggacctagacatggaggatgtggcctcagtggcttcagcccccagggactgggctgggctggggcat

SEQ ID NO: 6997 - DNA, 6000 bp, Homo sapiens
caggtcttcagagcccacaggcagagcccaccctgagggaggagcagctggttcttgggtgaagtgagcccccaggaccccgccttgcaggaccccgcgaggccccggtgaactggagccgggaaccggccccacggaggcacgttgggatttggccaccagagggcaggagctgcagcagccaggcaggcggtcaacacgggggccccggggtcctggccggctggtggggtgtgaattggagaggagtgggctgtgtggagggagaccaagcaccaaggcccgccctggcctctgagtgtccacccctttcacaggcccatttcacagatactgaggcccaaaggcgcagggctcaggcgtcccctacgtgtcgtgtccccaggcaggagaattacttgaacctgggaggcagaggtttcagtgagctgagatcacaccactgcactccagcctgggtgacagagcaagacttcatctcaaaaaaaaaacacaaaaagtgaatttaaaatgctccctgaactccagctggggtgcgcagcaggaggctgggtccgtggggcttcgggggctgggctgggggttcaggtgggtgggggagtcagtgctgtggggatagggctcagagcccagaaacagacaagcccacacaggtagccagtgtcgacgaaacaggagaggctgggacctgtgccctggaaggacacagccagcgggtcctgggtcacccactccggggctgaccgggcacagtttcacagagcagtatggcccagccagctgtgagaggatcggacagacgggcggaaaggaggggagacagcgggtgtgctcggggctgtgccgggaggggtccttggatggaggagggggtcgccaggaggcatctgcatccccggggtggtgaagacccagcgtgtatggccgacctcgaggacagggcgattgctccaccagaatgttcccagatggcacagatgcttctggttctggcactgggacctgcagcaggattcccgggtggcttaaagaggttccttgaagtttgtgatcaggaattcaaagtagcgcagattgggacggctgggccttctcccctcagcacactccgcgaagggcagtgcaaacgcacgctggcaggaagtggctgggaagcaggcagagagcgaccaggaagcggccaggaagcaggcaggaagtgggcaggaagcaggcagaaagcggccaggaagtggccaggaagcggacaggaagtggccaggaagcaggcaggaagtgggcaggaagcggccgggaagcaggcagagagcggccaggaagcgggtaggaagcgggcaggttttaccgagcggcgtgacggctccagaggggatgatggagtctggcagagaatggggcgggaggctggaggtcctgggcaggccctggagcagaaggggaagggaggggtggggtgatgggactgcagtgaaggtctggccccacccgagcaaggtgagggtagcacaggtcattacatgtcagggaattgcttggccagggttggggacaattctctcttattagaattgccaggaatcaagacagggtggagctagaacaagggagagggagtggcagagagatggggtgcttggggctctcatgtgatgccctgaggacactgcatgaagactcacggctgagctgggtggaggtgggagaggtaggcaggcaccaaggcccagggccctgagaggtgaggggaaaagcgctcctgcctcacgaggccacaggagctccctcagcacggtgcctgcatggaagaattgctcagctaacatgagctctgaggcttgcgcacatgttacagagaatgaggtggaagcatccacgccaggaggtctccaggccatctggtcaacagaaagccaacaacatgcaaaggacaggagcccacacctgtgccggtctgtgccagaaatgctggaaggcggccgggcgcggcggctcacacctgtaatcccagcactttgggaggccgggcgcggcggctcacacctgtaatcccagcactttgggaggccgggcgcggcggctcacacctgtaatcccagcactttgggaggttgggcacggtggctcacacctgtaatcccagcactttgggaggccgggcgcagtggctcacacctgtaatcccagcgctgtgggaggccaagacgggcagatcatttgaggtcaggagtttgagactagcctggccaacatggtgaaaccccatctctactaaaaatacaaaaattagctgtgtgtggtggcatgcacctgtaatcccagctactcgggaggctgaggcacaagaatcacttgaacctgggagacggaggttgcagtgagctgagattgtgcccctgcactccatcctgggcgacagagcgagactcagtctcaaaaaatataaaaaaataaaaataaaaaatcatcattctaagtcaagaaaaattaaaattttaaattattagcatgtatttaccatttatcttcatattgtgtaatacttggcttaaatgcaaatagaataggatttaactcatacagaatcaacaaaattgtacaattcacatttttattttaattaatttattagtttgtttatccatcttgacaaggtcttgctctgtcacccgggctggagtgcagtggtaggatcacggctcactgtagcttaaacctcctggactcaagccatcttcctgcctcggtctgctatgtagccaagaccacaagtgtgtgccaccacgcttggctaatttttatattttttgtagagatgggggtctccctatgtttcccaggctggtctcaaactcctggcctcaagcgatcctcccgccttggccacccaaagtgctgggatcacaggcataaaccaccaggtctggcctacattatttatttatgcatttagttttgagacagggtctcactatgttgcccaggtgggagtgcagcctcaagctccgaggctcaacaaccttcccacctcagcttcccaagtaactgtgactgcaggcacacaccagcctggctagtttctttatgtctgtagagacgaggtctccttgtgttgccccggctggtctcagactcctgagcttaagtgattgctgcactgttccccgggcaaagttgcacaattcgcattttgtaacttatagattaatatttattttattttcaccagaacggtaggaaccctgcacaaaactggttttattttgctctttacgtacgcacatcccaccagcaccctctacctttggcttccggagggttgccctccctgctccctccctgcagctccctgcccccctgctcccctccctgcagcccccctgcccccccgctcccctccctgcagccccctgccccccccgctcccctccctgcagctccctgcccccctgctcccctccctgcagccccctgccccccctgctcccctccctgcagctccctgcccccctgctcccctccctgcagctccctgccccccctgctcccctccctgcagccccctgcccccccgctcccctccctgcagctccctgcccccccgctcccctccctgcagcccccctgccctccctgctccctccctgcagccccctgcccccccactcccctccctgcagctccctgcccccccgctcccctccctgcagccccctgcccccccgctcccctccctgcagctccctgcccccccgctcccctccctgcagccccctgccccccctgctcccctccctgcagccccctgccccccctgctcccctccctgcagccccctgcccccctgctcccctccctgcagccccctgcccccctgctcccctccctgcagccccctgcccccctgctcccctccctgcagctccctgcccccctgctcccctctctgcagcccgctttccccctgctccccccgctcccctccctgcagccccctggtccccctgctccccccgctcccctccctgcagccccctgctccctctgctcccctccctgtagctccctgcagccccctgctcccctccctgcaccccttttgccccctgctcccctccctgcagccccctgcactcccttcaccccctccctgcagcctgctgtgccccctgctcccctccctgcagccccctgcaccccctccctgcagcgccctgtgccccccactcccctctctgcagccccctgcgtcccctcccctctctgcagcccccactgttcctcccactgctgcccatcattggctgcttgaaaatgtcagactccaagggcccctgtgactagcccagcagcagccctaggtctccaccctgccttgggtggggtccgggataggcctggcctccccccgcctgcttgaacccactgagtatgcccccctcccgccgcaacctcagaattccaaagccagcctggtctccagctcagtgcggtccacacgcagaccctccttggatttcgaaagcccgtgtggctttgccagaggacattccaatcctcgattgtggctggggatggagggagatcaacccatcgcacttacagataaagaaactgaggacggagtttgtcccaactccggggccagggtcagtgtcctccgagggagtcagggaggtggctggggtctgccagtgggggggacacacgacctgggacccccaggccacttgagactctctgggctcgttgggctgggcccaagctcccaggccccctcctctccatttctcaacctgctgccacctaaggcagataccctacactactgcctggggggcctcaaagggtgatcacccagcacaagctctcctgcctggcctgggaccgagagtcccagaagcccctgggctggccggatgctcaaggcctcactgagggcatgcgtatcttcggaaacaagaaccagctgacatgtgtgaggctttagcccggctctccctggggtactgtgcgagccctcaaggaggtggctgttctgtagctggagagctccgtgggtggcaggactgaacttgaacaccagaaacaacccccaagccttgtgacctgggaggcaggaggcgggtctgtctccctgggacttgggtggctgagccgaggtactcgggaccctgtcccgcgcatggtgagtctcggggagcggggagccgggagccaggggttgtggttttggggagcgtgcagccaggttgaggcccagggctgtaatgagggcggaaagcccctctcctctctgactgcctgtgatccaccgtcagcgagggagaacctcagagagtaggcatctacagcatagcatggagcaccatcacaggcagtgaagggcgagagtctcagaggatggaaccgggtggggggcctcagctcgtgccatcacgggcagtgaagggtgaggctctcagaggatggaaccggcgggggcctcagctccaggcaggggtgagagggtggcttctggggtgactgtgtctggaggatggggtagcaagggtggggaggccaggctgaggggccctgacctcatgggagctgggagcctgttgggaagtccctgagaagtgcttcactgggattcactgggaggaagagctcgcgccctggtgcagatgtgggctgtgggggatcagagtggtgggggcaaccgtggggggcctgggcagggtgaggagggatgtggggaagccaccagcctcagggtgggctggacgctgggagggaggcgttgggggcagaagtggggtgccggccttacggctgggcctgcagattgaggggcctgtggactcccccagtgcagacatcagcctggtcaggagccagaagagagagtccggggctgctgagcctgctgtgagccaccggggcctcccacggagagagacagggccgggctccccgtggagctgcaggctcccgatgttcccttctcaaggcttattt

SEQ ID NO: 6998 - DNA, 6000 bp, Homo sapiens
tacatttgtatgtgtgtacatttgtatgcatgtgtgcctgtgtgtgtgtgcctgtgtgtgtgggtgcacatttgtgtgtgtgtgtgtgcctgtgtgtgtgtgtgcacgtatgtatgtgtgcacacttgtatgcatgtgtgcctgtgtgtgtgggtgcacatttgtgtgtgtgtgcctgtgtgtgtgggtgcacatttgtgtgtgtgggtgcacatttgtgtgtgtgtgcgcctgtgtgggtgcacatttgtgtgtgtgtgtgcctgtgtgtgtgcctgtgtgtgtgggtgcctgtgtgtgtggggcacatttgtgtgtgtgtgtgcctgtgtgtgggtgcacatttgtgtgtgtgcctctgtgtgtgtgcctgtgtgtgggggtgcacatttgtgtgtgcgcctgtgtgtgggggtgcacatttgtgtgtgcgcctgtgtgtgtgggtgcacatttgtgtgtgtgtgcgcctgtgtgtgtgggtgcctgtgtgtgtgtggggcacatttgtgtgtgtgtgtgtgcctgtgtgtgggtgcacatttgtgtgtgtgcctgtgtgtgtgtgcctgtgtgtgggggtgcacatttgtgtgtgtgtgtgcctgtgtgtgggggtgcacatttgtgtgtgtgtgtgcctgtgtgtgtgggtgcacatttgtgtgtgtgtgtgcctgtgtgtgtgggtgcacatttgtgtgtgtgtgcctgtgtgtgtgggtgcacatttgtgtgtgtgtgtgcctgtgtgtgtgggtgcacatttgtgtgtgtgcctgtgtgtgggtgcacatttgtgtgtgtgtgcctgtgtgtgtgtgcctgtgtgtgtgggtgcacatttgtgtgtgtgtgtgcctgtgtgtgtgggtgcacatttgtgtgtgtgtgtgtgcctgtgtgtgtgttgcaggccctggatgccagacactgaataaacgcaggaagacgtctgtcttcattctcctcgtgggtcgctggtccagaaacacctggatggaaagtgctctgcaggaacggtgcctctgcctgtggcggggaccctggtgagcggatgggccagccccacgtgtcttccggccactcagcatgcagtgtttccaggggcactaagagaccaaaatcgagatatgattagctgtaggatgtcatctaatcacagatcatcccgaggctaatttatctcccccatgaccataacacatcaaaaagttgactttttgcagctcggctgtgcctcatcttcccacgaagccccgacaggcacatccagtgaggaaccacagtgggagtcctgtggcagggtcaccccacttccgatgccctccagctgcatcttggcacgaaaaaggctgcccagttctcatgccctttcaagtcccgggctggggggtagcagtggaggctggggttaaccgccgtccgtctcaaaggcctcattgtggagctgcaaacacgaacgtccttgaaatgtgaggggacagtgctctggggcaggggctgctcactggttcatggccagaggtgagcgggctctgggtctgggtctgtgaggtgctgtggacgtcgggggtgctcctggggcagggacacagccacggccctcacaccagtggagccgtcttccttcccgaggcagaggcttggccttctcacaccttgggacccttctctcccctgtgctcatgctggaagcacagcgtgagggggcaaaggtcatgggaggcaaaaggctgggctgaggccgaggctctgtggctgtggccggataccaggtcctgtggtggtgtgggcagggcgcgctctctcctctgagcagcctggggctgcgtgtgtgaacagaaacaggcctgccgatttgaagatggtttgaccaagtctcccaaagctgaagagaggtccctgcccatgtcccccgggtggcaatccacagacgcacctgtgtccatcagacggtatcgttgatagggagtctgaagccacccagacgtggtctgttcacgccgtggacaccacggtctgaggcagacggttacagccaccggcataggcgaatctcagccagagagagtgaactgggacaccattcacgtgatgggccagatgggctggcagcggctcgctggagccgtccgggtgggaacgctgtgtctgttggtctggtgctgcttatgtggctggttcaggtctgtcatccgtcaacctgcatatttatcactggtgcattttcatgtatgttgtacctcaattaaaacattttagggccgggcgcggtggctcacgcctgtaatcccagcactgtgggaggcggaggcgggaggatcatgaggtcaggagatcaagaccgtcctggccaacatggtgaaaccccatctctactaaaaaaaatacaaaaatttgccgggtgtggcggcacgcgcctgtagttccagctactcaggaggctgaggtatgagaattacttgaacccagtaggcagaggctaccgtgagccaagatcatgccactgcactccagcctgggtgacagtgagacttcgtctcaaaaaaaaaaaaaaaaaaattaaagcagatggggtgtgggggctcatccctgtaatctcagcattttgggaggctgaggcggaccgatcacctgaggtcaggagttcaagaccagcctggtcaacatggtgaaacctcatctctacaaaaaatacaaaaaatagccaggtgtggtagtgggtgccgtagtcccagctagttgggaggctgaggcataagtattgcttgaatccagaaggtggaggttgcagtgagccaagaatgcaccactacactccagcctgcgcgacagagtgaaactgtctcaaaataaataaatacataaaaattatatgtatatatatatatatatatatttttttttttttgagactgtatctctgtttcccaggctggagtgcagtggtgtgatctcggctcactgcaacctccgcctcctgggttcaagcaattctgcctcagcctcccaagtagctgggattataggcgtgcgccaccacgcctggctgatttttgtatttttagtagagatggagtttcaccatattacccaagctggtcttgaactcctgacctcatgatccgcctgcctcagcctcccaaagtgctgagattataggggtgagccactgtgcccggcaataataattttttttttttttgagacagagttttgctcttgttgcccaggctggagtgcaatggtgcaatctcggctcacggcaacctccgcctctcatgttcaagctattatcctgactcagctgggattacaggcacccaccaccacacctggctgattttggtatttttagtagagacggggtttctccatgtcggccaggctggtctcgaactcctgacctcaggtgatccacccgccttgggctcccaaagtgctgggattacagccctgagccaccatggctgacaataataaaaaattttaaagcaaaactaaagatttataaattgtaaaatgcggttgtaacaagtatttactgtaccagtaaatatgaaaaatattaatgtcctcacacacatggaggtggcttgtgagtggtgtgagcatttcatggtcagagtttggcagttgggcgagagacaggatggattttaactcgaacatcgcagacacaaaactgaaaaccctgatgcggtgcctgcaccgttgcctcctttcctgcagctgtaaatgggacgagtaattccatccccctcccgcttccacccttcagcacagacgcagtcttcagcaaggaagtgctgggaacgccctggagtgaacccaggaagatgcctgcagtgggtgccagggcccctctccaccgtccctgctgggcttcggggccacgcccgactgctgtgaacggcctgcggagcaccacgtgcgacggctggaggcgagaggtctgcctttgatgtggctgttggtgcagggcctgtggtgccttccgcagcggaaatggcgcgccgcccggggagggcgggagcagcgtcccgggtgcccctgtgaggatgagcgacgagatgactggagggtccctgaagacctcactagggtgcccccagccggtccgctcccaggaagcgacacccccacagccccagggctgcagctgagggggtcgccactctggctgggcgaggctgggcccttgggggcaggcgccagagtggcctcaggctctacaagatgcctgaaaacaccaacctctccagggctcactagcattggacgctttcacgctctgccctggccggaagccccctcaccccgcgcgatgtgcaaactcctgcagggctcactcagtttccagaactttaattattggaaagttctccctggtccagcccccaaatctgccgtgaacgttgacagctgagttgctgctccatgcgtgctttggctgagagcagaggggacccctgtcctccctgagctgctgacgaggggaggggtgaagggtggggcctctggagagggcaggtcccggggaagctccggactcctagaggggcggccaggtgggggccctggtgaccaggacagactgtggtgttttttaacgtaaaggagatccgcggtgtgagggaccccctgggtcctgcacgccgcctggtggcaggccgggccatggtgggtgctcacgcccccggcatgtggccgccctcagtgggaggggctctgagaacgactttttaaaacgcagagaaaagctccattcttcccaggacctcagcgcagccctggcccaggaaggcaggagacagaggccaggacggtccagaggtgtcgaaatgtcctggggacctgagcagcagccaccagggaagaggcagggagggagctgaggaccaggcttggttgtgagaatccctgagcccaggcggtagatgccaggaggtgtctggactggctgggccatgcctgggctgacctgtccagccagggagagggtgtgagggcagatctgggggtgcccagatggaaggaggcaggcatgggggacacccaaggccccctggcagcaccatgaactaagcaggacacctggaggggaagaactgtggggacctggaggcctccaacgactccttcctgcttcctggacaggactatggctgtgcagggatcccagagaagacttctgggctccctcaactccacccccacagccatcccccagctggggctggctgccaaccagacaggagcccggtgcctggaggtgtccatctctgacgggctcttcctcagcctggggctggtgagcttggtggagaacgcgctggtggtggccaccatcgccaagaaccggaacctgcactcacccatgtactgcttcatctgctgcctggccttgtcggacctgctggtgagcgggagcaacgtgctggagacggccgtcatcctcctgctggaggccggtgcactggtggcccgggctgcggtgctgcagcagctggacaatgtcattgacgtgatcacctgcagctccatgctgtccagcctctgcttcctgggcgccatcgccgtggaccgctacatctccatcttctacgcactgcgctaccacagcatcgtgaccctgccgcgggcgcggcgagccgttgcggccatctgggtggccagtgtcgtcttcagcacgctcttcatcgcctactacgaccacgtggccgtcctgctgtgcctcgtggtcttcttcctggctatgctggtgctcatggccgtgctgtacgtccacatgctggcccgggcctgccagcacgcccagggcatcgcccggctccacaagaggcagcgcccggtccaccagggctttggccttaaaggcgctgtcaccctcaccatcctgctgggcattttcttcctctgctggggccccttcttcctgcatctcacactcatcgtcctctgccccgagcaccccacgtgcggctgcatcttcaa

SEQ ID NO: 6999 - DNA, 6000 bp, Homo sapiens
atcacatttctgtcatatggatattagccattccgaaatctgtgtaatcaacttcacattattcaagttacaaatcactgtgtccatagaaaaactgtgctggtatttgctggacaaagggttgggccccttttatttttacctgccacccagcatctcccccacctgccccttctgggtgacacagccggtaaacggaatcacgtatggttctttctgtgggtctgtggcacagcaggaagagcccggtgccgccagcaccttgtggaagaccacacatgggtggtcccacagcatgggaccaggctggcctgagggatgcccagttgtaacaatgctgctgtcactgtctcattaaatatacatcctttagcctggtgtgtgtgtggtgaattgcggacaaagtaagagaaattggtctgttgacatacaagtcatttgcaggcttaggaaagacagcctttgccatccaatggggttgaatgtaatctggtgtgaggcgaagtaacatgtcctgattggttgggagaactacctgtggtatcacacagacgtgttgaacgtctctgggcccaagctgttctccggcctccgcctcccgggcccaagctgttctccggcctccgcctcccgggcccaagctgttctccggcctctgtctcctgagtagctgggactacaggtgcatgccaccatgcccagctaattttttgaatttttattagagacagggttttaccatgttggctaggctggtctcaaactcctgacctcaggtgatcctcctgcctcggcctcccaaagtgctggcattacaggtgtgagccacggcgcctggccaggcattgatttttcttagtgtccgatgtccttccagaaggacattcccaccagcagtgtatgacagtgcccattacctatagcctcgacagcagattgtgttgtcatacctttcaatgcagtgtgagaaatgtatctctgtcattttaatttgcatttctctaatcatgagtgaggtcaaacttttcatatgtttcaggatctatttatgaattatgtgcccattttttcgattgggttcttggtattttttcttcttaatctgagtttctcacatattgggaatattaacctgttatttgtgagatggaaatattttctttgtgaattgccatttgactttgtgttattttctttcctatggcaaagttttactttgcttacatttttatatggtcacattgattaatatttatttcatctaggttttaatgtctggaagggctagtctcccctttgcaatttttcttttccttttttttttttttttgagatggagtctcgttctgttgcccaggctggagtgcagtggtgtgatctcggctcactgcaagttctgcctcccaggttcatgccattcttctgcctcagcctctgagtagctgggactacaggcgcctgccaccatgcccggctaattttttttgtattttttagtagagacgtgtttcacctcgttagccaggacggtcttgatctcctgacctcatgatctgcctgccttgacctcccaaagtgctgggactacaggtgtgagccaccgtgcctggccatttttttgtatatttttagtagagatggggtttcaccatgttagccaggatggtcttgatctcctgaccttgtgatcctcctgcctcagcctcccaaagtgctggtattacaggcgtgagccaccgtgcccggcctcaatttttcttttttaaaaaacgtcttctgctgggcatggtggttcacacttttaatccctgcacttttggaggtccaggctagaggatcatttgagcccgggagttccagaccagcctgggcaacacacagactccttctctaccaaaataattagctggtggtggtggcatgtgcctgtagtcccaacactccagaggctgaggtatgaggattgcttgaactttggaggtcgaggctacagtgaaccaagattgtgccactgcactccagcttcgatgatggagcgagaccgtctcaaagaaaaaaagttttcctggcgattcttacacatatatgagcttttaaaagcatatatttaaataacattttaatgacaaaatttgatgctctcaagtatcaaaatggaaataccaacagcaaggtttccagggatgtccaacaccacagagcagggaggcctggctgggcctccactgttgaggtcatcatggtgcttccgctttattctgattaacttttggttacacacattgaaaaatgacctaagagagttgttttgagtggcgctttttctcattgtacagctcctgctagcagtttactgcaacactgatttctctggaacctctcagtttccagtcatcattagggctgttactagcaaggacctacaagccagcctcaaaatgtgagagggctgccgacagtcttcctgtggttagctgccacagtgcccagggaccatcttccctctcctcctcccccactgccagctcctgttccagccgcatcagttcctcatttgagagatcttcttcatgggactgcagcaactggtccacagcagcctcagcaacctcttcaaaggccacatttctggcaagggtcacaatgtttttttgaagctgtgcaatgttatctgcctgggaaaaacgctgggcctgaacacactcaggccaaatcttcttccacatgctgttcattagtgctggtttgagctcctcccatgcgatggccatgtccacagcatccatgatgctgtagtttctccaaaattccctgatcatagctgtgtcctcaccatccgctgcttctaggatgtgctgaaaagtccttctcagataatgagctttcaaggtcgagattacaccttgacacgtggtccggattgagtcagctgtactgtcatgaaggtattatactcttgtacttcttttttttcttttttttttttgagacggagtttcactcctgttgtccaggatggagtgcaatggcgcgatctcggctcaccacaacctccgcctcccaggttcaagcaattctcctgctttagcctcccgagtagctgggattacaggcctgcaccaccacgcccggctaaatttgtatttttaatagagacggggtttctccatgttgaggctggtctcgaactcctgacctcaggtgatccgcccgtctcggcctcccaaagtgctgggattacaggcgtgagccaccgcgcctggcctgaaggtattctactcttagttatcagaaaggtcgctcaaatttacagagtggcatgacgcactgtctagtatgagcagtgctttgttggtgagattattttgggcactgtatttttcaacggcaaaaaaagtaagtgaaccattcatgaaagatgctcctggtcacccaagcctttctgttggagcgccaaatcacgggcaaactgggcttcaagaacccttcagagccttgcgggtttctgagcggtacaccagtaagggcttcaacttaaagtccccagctgcactgccaccaagcagcagcatcaagcgatctttggatgacttaaaccctggctcagcattctcttcctcggaaataaacgttcctttgggcattctcttccaatcaagtctcgtctcatctacgttaaagacacctggggggtgtactcaccttcttcgatgatgcttttcagcatttctgtgtacatgtccttgttgctgggagctgcgctgttcatcttgaagtggggcaaacagtggcactccttgaatctcacaagccacccttgacttgcatgaaacctctccgtttgagaaccttcgccatgttcacgctgtaagtcatcaaactcagccttctcctgaacgatggcggcgctcaaggtcgcatttggctggctctggtcttccagccacaagctcagcagctgctccatgctctccatcactgcacttcgatggcgagtcaaccgagaggctctcagaggagtagctatttgtgaactcgctttgattttttctttactatctcgaatggtcgccactgtagagatagcaagatctaaggcctttgcgatctgactgagcttctcacccgcttcaaatcgtcgtaacacttccaatttgaggtcaagggtaatcgctttccgttcccttttggcactagggatgacagttgcatctgtgggcctttccccaggcatttctgcctccaaaatgtcagaaaatcacagcggtctcaagcgcaagaacgctgtggttcctctacgtccccttgcagaactcggtcaacagaaaacgaggctgcgaagaggctcaggctgatgtcctggagacgtggacgggtccccatgggcaggcccagccccactgcctagcccagctgctgcttcactgtccactccgaggaggccgcgcgggtctcccggtaccgctcgaagtccgcgtgttggggccgtgcggccgcaggcacatacaagcggcctgggtcctggggctccagagaacaaccgaccaagcagacaaacggaactccgtgagggggacactgcggcagaaacgtccaggggcggttttccagtgcagcggagggcggaccgggcgggtgttgtttcgggagctgctttccatggaggaccccagaaataagtgttgatgccgatgcccgatttaagataagtctaaaggcgctggctatccccttagggcccagctgtctgggcagggcgaggctgcgctggcgatcaaaccctcgaacggtcaggcgacggcgtggacacccaagacggggccccagccggcgccgcgcccctgccgcgcctgcgcgagtcctccctgcgctcgcggggccctaggaccgctctcccattgcgcatgcgcgcgcccgggcggcgcgggatctgggtctggggatgtggtaccggctgctggcggcggccggcagtagagcggtggccaggccgctggccttgctgtggcgatgtggtggcccaggaggcggcaggacggccaagaccagcgcgagggccctgggcaaggcccgacaggtgagcggggaggcgctctccgccggtgccgggcggctggtctgctctggacgccgcgtgacgccattcgcctgcgccggccgcgggggagcgcgggagggcggcggccctgacctggtccgcgcagtgaggccgacagcacctggccagagcttcccgcccccccgcctcctccgtctccaaactcctgctcttctcctcgctacctcttccacccacttcttgcggaattcccgctgtttactggatgcccggtcccctcggacatcggaaccgggacctccagcctccttgctcggctttgtaaagcgccgggcgttgagcgatttgcgcttgagtcccacctcctcgcgaaccagctttgtggccccgcgtgccagcccgtgtcctcctgggctcggcggcgttcggctttatccacctcgcagttactcagtgaaccagacacgataagaggcgtgaaagggttttgcaaactgttctttatacagcgaccagtcactgtcgttaacagctaatgctgagagctaagggctttacgcggattatctaagtcttatacccgccctataggtagatatcgctataaccctattgttatttattatattatttttaaaaatttgggagcggggccggagtctcgctgtgttgtctaggctgatctcgaactcatgggcacaagcgattctcctttctcaacctctggagtagctgggactacaggcttgagccaccgtgccctgctcataaccctgttttatagggttagggtctaagaccggaatattctgcattttaagattgctttatttttgtattgatacatcccagtgagcagcagtaacgttgaattgtttttctaatgcagagtttttgaattttgatcccagaaagctgtcatggttttcagacagcagtaa

SEQ ID NO: 7000 - DNA, 6000 bp, Homo sapiens
ccccactccgcccctccttccatctcctcactctgccctcccctccttccatctccacctccgcctccaccacgtccttgatctgtgtctgggctgggaagagtgagagcagctaccccaacgacatgagacccttccctggggccccaacgtgtgtgctgctcttcccttccctgaggccccgacgtgtgtgctgagctccccttccctggggccccgaagtgtgtgctgctctccccttccctgaggccccgacgtgtgtgctgctctccccttccctgaggccccgacatgtgtgctgagctccccttccctggggccccgacgtgtgtgctgagctccccttccctgaggccccgacgtgtgtgccgctctccccttccctggggccccgaagtgtgtgctgagctccccttccctggggccccgaagtgtgtgctgagctccccttccctgaggccccgacatgtgtgctgagctccccttccctgaggccccgacgtgtgtgccgctctccccttccctggggccccgaagtgtgtgctgagctccccttccctggggccccgaagtgtgtgctgagctccccttccctgaggccccgacatgtgtgctgctctccccttccctggggccccgaagtgtgtgctgagctccccttccctgaggccccgacatgtgtgctgctctccccttccctgaggccccgacgcgtgtgctgctctccccttccctgatgccccgacgtgtgtgctgagctccccttccctggggccccgacgtgtgcgctgctctccccttccctggggccctgacgtgtgtgctgctcttcccttccctggggccccgacgtttgtgtgctgagctccccttccctgaggccccgacgtgtctgctgctctcctcagctcctggggctcctggggctgaggggctgcatctgtctcagcctggccgtgacccactcagccgtgcttcccctctttcagccggtggctgctggcagcggaatcccccagatcaagtgcttcctcaacggggtgaagatcccccacgtggtgcggctcaaggtgagggtgcggtggccctggctgggcagggtgggcgcccgctctttgctggttcaggagcagctctcttggctgcctgccttccagaactggcctcagccaccctgtgtactggtggcactgtgtgcagatgggctggctgggtgtgaaggggtcacctttttttctgaaagtggtaacaactggtatttgcacatattaaattacgtaagaaatgagtagtcatacagaaatgcttgcgtggtgcatgtgtgacacagctgtgcgacgcgtctgtgactgtgggctgcgtggtggtgactgattcaccgtggaagctgtcgtggtagtgggcgtgtagcagtttcccgctttcagtttgcctcatggtcatttacacttggtgttatcagagcatctggttctggaggtgctgggagtcctgacccagttccgctgtggttgcttctgtctgtgccgccatcgttccttagcctgagacttgccgcagccccgtcccgtctgaggatgggtgggcagcatggccgctgccccctgggggtgcttccggggcctggtccccgtggccaaggagcgggaccagtgtgtcccctctggcgaaagctcccaggtgaccttggggtgcccctgccctgtggtgggagatcaggtttactggagcagctgggaatggcgacccgcctgtcacccgcgccaggctggcctgaaccttcttggatgttgctctataacttttgttggctgagggttgagtttgctcggcatctttaacatacagtcctcccccacacactcagcgcccttgtgtttagggtctgcgcccttgtgggttctgccctggggcagggaggctgataaacaccttacacaccttctcaggtggagaggatgaggcccctgggggcggggagcagccgaagggagagggggcatcgtggagccgcaggtgaccagccttccagtgccaggggtgtatgaggagccttgctaggcggggctagcgggaacacctcccctgtgctggccacgctggcggaggcaggtgtgcctgtaggatgcggtgggcggcccagctttgcctcaggaaggaaggaaacgaaagaaccccttgcctgctcagtgctgaggccacagagggcaggtcccccgagtgagtgcgggggacgcttggctgctgtttagctccactgtggccatggggagacccagcctgggggtgctggccccctcccggaggccccgtgtcccagccactctgcctgatcggggctgtgtgtgctgttttacggctcaggtccaaagacagcgcctgccttttcatcagaggccatgcgtctccctgtgtttcagacgttggtgatcaaagtgtccggtgtgatcctgtccgtggtcgggggcctggccgtgggaaaggtaacaaagtgcacatggccactccagctggagcctgaggccgccgggcccgcgagggccgccacgcccatgtgtgtctctgagcaccggtccttctggtctccaggaagggccgcgtcacgcgtgtctctgagcaccggtccttctggtctccaggaagggccgcgtcacgcgtgtctctgagcaccggtccttctggtctccaggaagggccgcgtcacgcgtgtctctgagcatcggtccttctggtctccaggaagggccgcgtcacgcgtgtctctgagcatcggtccttctggtctccaggaagggccgcgtcacgcgtgtctctgagcaccggtccttctggtctccaggaagggccgatgatccactcaggttcagtgattgccgccgggatctctcagggaaggtcaacgtcactgaaacgagatttcaaggtgagttgaaatcttgtgtgggtgggctccagatgccatgggcacgggcacgggcaccactcagggagatgggcttccctcagcacccccaggccgagagccccagccccatctgaggacagcctggcgggtggctcccagagccagcgggcacagtccctgcccggcaaggcctccctacggcccgctgcttccctccttgggtcccctgccacacgtgcatcagtgtttcccgtgggagggtctgtggctccaagcggcttctcagaggagtgcagaacctgagaccaagtgtgcccacctgttgtttatttgtcaagacacactttggaacactttttccccaaaaaagtccccagcatgttgatggggattgagctgcatttgtgtgtgattgtattttttttttttttttgagatggagtctctctgttgcccaggctggagtgcagtggtacaatctcagctcactgcagcctccacctcccaggttcaagcaattctcctgcctcagcatcccgagtagctgggattataggtgcccgccaccacgcctggctaagttttttgtatttttagtagagatggggttttgccatgttggccgggctggtctcaaactcccgacctcaggtgatccgcctgcctcggcctcccaaagtgctgggatgacaggcgtgaggcaccgcgccggccatgtgtgaatttagaggcaggcagcgtcccgcaggacaaagaacagcaaggctgggtttccatccgtgcgcttttcgttagagggtagaggtttttggaatcttgcgtgcgctggaaagtggagctcctggctgggtgtttgcgtgtttccctgggctgccggtggtggtgctgaccctgctgtctcttgccgtggtctgcagcacggtgctcttcaggaatcagagctgctgactcggttgtcctgaaagccccttcccctgcacagcccctgtcctggcagttgctctccctttctgagagccgtgccctcaaggaacctgccccgaccctggtctgtccctgttgcagatcttcgagtacttccgcagagacacagagaagcgggacttcgtctccgcaggggctgcggccggagtgtcagcggcgtttggagcccccgtgggtgaggagggccgcaccgggtccaatgctttgccctcgccctgtgtgttggaaggaacggtctcctctctgtaggcccagtgcccgctgagggtggcagaggcttggagtcacggccggggcatttggaagcggccggcagtgtacttgggtccagccctcagacctccctcagggtccctctctgtgtggctggggcccaccccattagcttctttctgacgtggtctgggttccctggagcctgggggagggagttggtggtgggcatggtgccctgtgtccagctggcacccgagccggccgcctgccttccaggtggggtcctgttcagcttggaggagggtgcgtccttctggaaccagttcctgacctggaggatcgtaagttcctgctgatggctgcctcctgatcagggtgcatgctgcgctctcatttcccaccatggggtccaccttggggccacccatcgagctgcggctggagctggaccccctgtgggtctgtcaggccttggtcctgcccaaagcagcggtcctgcctttgctgcccagttcgcccttggtcctgggcaccattgccagccctgggtggctcccgggtaggggatcaaacagccgggaacccagccctgccccaccttcccctcttgctctccactggcaagtccagagagggctgggccgctccttgcccgcacagtgcgcccacccctggctccagccccttcccttctgccttgggcggggtctgcagactcctggccccggggctgacaggaggggcgatggtccctgctggtccgtgagccctgggctgggagcgtggctctgagggcgctggtttcctgccctctgccgcagttctttgcttccatgatctccacgttcaccctgaattttgttctgagcatttaccacgggaacatgtgggacctgtccagcccaggcctcatcaacttcggaaggtttgactcggaggtaacctgccccatcgcccacctcgcccacctcgtatcctggtccaggaccctgtttgcttaaggcccaggttgagaatttggtcctttagaaaactctggttgatagctgtggagctgagagctcttgtgtaagctccagggccccgaggggctgcaggaagacaccccaagctgcccctcaggtcagggcaccatgtgaccagcagggcacctgggatgtcacacagttgctgcgtgcatggggcctcccacggcctgggggcacgtgcagcagccgctctcggggcaggtgggctcaggcctagtttccagggtagcctggggcctgggctggggagactctccgtgccatcgatagggcggctctgtgcgcaggaaactgggggaccacgggctatgttcccagtgcttggggccctccccgccccgggtgctgagggtggcagggtctctgagagcctcgctggccaccccgccaggcaggggccaggcctgctcagaacacccagtgtgtttctcccctgtggacttccgcagcctgcgtggaagggcgggaaggctctctgtggggacagctctcttaagatggtggtccttgagtttcagcagaaaggagctgtgggccttttccctcacatcctctgccttctccctctctctgcacagaaaatggcctacacgatccacgagatcccggtcttcatcgccatgggcgtggtgggtaagggcttctcccagcaccgcagggacggcctgcgggcctggctcagctgtgacgtggccatagagacgaggactggaggctgtggctccctggagcctgccctcatcccagggccacccgggggcctccagattcttccatgggcagtacacgtggggagtggggagcccaaagcttcgcttctgtggcttcccgttgtttatctctgttggcaaaaaccacagggctgca

SEQ ID NO: 7001 - DNA, 6000 bp, Homo sapiens
cgggggcgagcacccccaatgtttcttcgggcccgtctccccaaaacggcgctcccattggctagcgctgggcgggcgcgctcgcacgtacgagcccggtgggcgtcgggggcgagcccgcggcgccagtagtgttgtgacgccagcctcgcgaccttgcggactgtgcgtctctttggattggtggacagacagccaataggccagggcccgtgctgtgattggccgcagcagtgttgacggatacgtgagaagaaaacggcgtggtagctcggagtgtggaatcgggcgcgaacctgagttctgagaagtgtggaagcacgtctgaggcagttaagcgcaccctttcctgggtggagtatgtgcttctgcgctacgttagcgtagccgagcggcgctgggcacttggtcattttcttcatagcaagaaagcagaggggtgtttttcaaattccagtgtttctttctttctttttttttttttttgagacggagtttcgctctgtcgcccaggctggagtgcagtggcgcaatcttggctcactgcaagctccgcctcccaggttcaagcgattctcctgcctcagcctcccgagtagttggaattacaggcgcgcgccaccatactcgctaatttgtgtgtttttagtacatacggggtttcaccatgttggccaagctagtctcgaactcctgacctcaagtgatccgctcgtctcagcctcccaaagtactgggtttgcaggcgtgagccaccgcgcccggctcaaattccagtgtttctttttcttttctttttttttttttttgactcgctctgtcgcccaggctggagtgcagtggcccgatctcggctcgctgcagtctccgcctcccggggctcaggcgattctcctccctcagcctcctgtagccgagactagaggcgccaccgcgcccggctaatttttgtaattttttagagacaggatctcgccttgttgccaaggctggtctcgaactcctgggctccaacgatccgcccgccccagcccccaagagctggaagcccaagcgcgagccccgcgtccggccgccagctgctttcttgggggcgctccctgcctcgcttggctctgtggagtccggggcccggcgatggaacaggccctcagtcacccaacacctcaggacactgccgagcgcatcgactttcccagaaacgcttgacccacgccctccgctccgaaactagaaaagcggagcccagggaaggcctgggccgagaccgccgcgtgctggaaaggctccgcctcgggatgcacgggaagggaacacgcccaggaggggaggatgccgcggttgatcggggctgtgacagcgcgccctccacacaaaggggacccagacgccggccctgcgccgccgtctctcctagaaaaagctcgtcccgcttctctcttgcagagcggaataacctggcccccgacgctcgggcctcggagctgcacgtgcgtgcccgatcgccttcggctctttccggccgctcggggcgcttcgggagtcctcggggccgcctcgctcaccttcggctatttccgcgttcctggcgcgccgttgtcccggcaacgcgcggcggctcagcggcctggcagaggtgagtggccttagggctagggcggccgacccaggtccttaggagccaggccggggtttggggccgaggatgtgaccggtggcgggcgtcgggaccctcccgtctcctcccacgatcccggcgccgccgagtccccgcggcccctcgcgagtcccatcgaggctggggcgggcttggcgcggggtccaggtcgctcgtcggactatggctgtcgcccccgcccggcctcgaatcgcggctgattccggtagctgggagagtccctttggaatgggcggggtggggaggtgggcggcgccatcacacccccgaggcgaaacgggacaaacgagagatgcaaaacaaaaacatgctatgtttggtcactcgctgggtcggccctgagggtcgtgttgcatcaaaccgccagcgcatggcttctcagtaccgtccgctggatgcagcgaggaccctgcgcaggccgaaggctctggactgtggcctggagggcgaggctttgtagggtggccccgggtgcctgtccccgagagtccaccgtggagccccatcccggagttccctactcagcgtcaccgaggaaggctactcaaagccctgtgaccccgtgccgcttagctgaatgggcttaacagattctttcccaaaagctggtttgatggaggcacttgtagaggctctggagacgctggacgcctgaaagtgagaggagtacttcggttagaataaatacagtttttctcctgttccccaaagttgatgtatttcccggttttatgttccagagactggaactttgtttcaagaaaaggaaaggtacttgtttccgacctgaagctattacagattgtcatcaagtacataactattttattgtcagccatctctcctccttgtgttaactttttaaattatactgataatactcattttgggaacttgttaagaggccgttgaaaggaactatgaacaattatattaatgcattgtgtatggaactcattcaggcaggcctggaacccgtttcttatattgatacaacaggaagaatctctctccttgctaagtttcatccgcgcagggcctgttctgtgcaaggcactgttgtaaggaggtgggaatactgggtgcctcctgctctctggggaagataatatggggggcaatgtgtgagcagtgaaactcacatttacggtaaagtctaaatgcagccacggagaagcgcaacgttgtgtggggacactgggcaagaagcacacgacaaaggtaaagccatcaagccctgagagagctcccttacccaaagccggggggaaccttgaaaaaccccaggcaggaaagaaagcaattagggccgtttgccttcatagttattgcacagtgtcgtattaatgtatcactcatttttcagagaaatattttcacagagtaaacttattagatcctaatttcccttagcccaggatttgtaaccttggggctggctgcaacatgttaaaacccccttttttttttaaacagttttgctctgtcgcccagactggagtgcagtggcaagatctcggctcactgcaacctccgcctcctggattcaagcgattctcatgtctcagcctcctgagtagctgggattacaggcaggcaccaccacacccagctaatttttgtattttttagtagagaagaggtttcatcatgttgtccaggatggtctcgatcttctgaccttgtgatccacccgcctcggcctcccaaagtgctgggattacaggcatgagccaccatgcctggccaaaactcattttaagaggtaatcccagctacttgggagactgaggcaggaggatcacttgagcccaggagttcaaggctacagtgagccatgatcacaccactgctctccagcctgggggccctgtctctaaacaatatatattttttaatttaaaggtttcttttgctattttaaattgcccaggttttgatctggagtgtttgtttgttgttcgggtttcttttttttttttttttttttgaggcggagtcctattctgttgccaggctggagtacagtggcgcgatctcagcttaccgcaacctctgcctcccaggttcaagtgattctcctgtcttaggctccggagtagctggaattacaggtgcctgccaccacacctggataaccttttgtatttttagtagaggcgggtggcgttcgccattttgcccaggctggtctcgaactcctaagctcaggcaatctgcccacctcggcctcccaaattgctaggattacaggcatgagcctgtataattttaaatggtggcaaacccggctacaagtatgttcttctctgccagttaacttccccaaattgactgaggtgtaaaaaagtgagcagtaaccagaccgtcactttatttatcaccctaacccgcctgaaaagggacgatgtgtatatcttttccagatctgaaaggaagaatgaaagagagagattaagttcacgtaagtgatcaagctcaacttctcacagctgctgcggctgtgcattcttgactctctaatagaggaagacttctgtcttctaccacctgtgagtcagaggtaaaagacagtctttgattttatgctttattggaaattcagtactggttttttttctgtaccagtactcttttctggagcagtttgcatttattttgtttgaaaatgttgtttaaaaggcagtggtggcccacggctgtaatcccagcactttgggaggccaaggcaggaggattacctgagccaggggttcaagaccagcctgggcaacatagtaaaaccttgtgtctacacaaattacttaaaaattagctgggcatggtagtgcatgtctgtagtcccagctacttgagaggctgaggtgggaggatcacttgagcccaggagtttgaggctgcagtgagccgtgatcacaccactgcactccagcctgggtgacagagcaagacttggtctaaaaagttaaagggaactacagaaatagaacttgtccttattgtgactggaatgaaagttactgaggattgcgtgtgtagttaggctgcaggccttttctttctttcctcctttgatggccatgagttgtattcgtttctgtcacagcctgggtgattccgggtctaactgcttctcttctgcatgtctccctgttggagatctcctcgcatcaggttgcctgctcagtccgcaaggcattttcaagttgccgatggtcttccgatggtggctttgggatgcttccttttcgtcattccatgtacagtcatattgtttgttttatttaaaactgattggacttggtcatttttttttccctgcaggtttcagcgctgaggaggcctgagttccgtcatggccctctattatgaccaccagatagaagccccggatgcagcagggtcaccctcatttatcagctggcaccctgtccatccattcttggcagttgcttacatcagcacaacctcaacaggcagcgtggatatttacctggagcaagtgagtgctcagaagcaaggagcctgactgtggtagcttctggctcatgttgtttgtgttgctgttgtccttgtgtgtgtgcacatgtgtgtgtgtgcctatgggtgtgtgtgtgtatacatgcatctgtgtgtgcgtgtatgtgtattggtgtgtgtatgcgcatatgtatgtctgcatctgtgtgtgtgtgcgcacacgtgggtgtgtgcatatgggtgtgtgtgtgcatctgtatgcttgtatgtgggggggtgtatgcgtgtgtgtgcacacgtgtgtgtgtgtgcgtgtggtgcgtgtgtgtattttcaaacgaactctactctagcttattcatgaagaaaacgacatctatgaggccaggcgcagtggctcacgcctgtaatcccagcactttgggaggccgaggtgggtggatcacttgaggttaggggttcgagaccagcctgatcaacatggagaaaccccatctctactaaaaatacaaaattagccgggcatggtggctcatgcttgtaatcccagctactcgggaggctgaggcaggagaatcgcttgaacccaggaggcaggggttgcagtgagcggcgatcacgccattgcgctccagcctgggcaacaaaagcaaaactctgtctcagaaaagaaaaaaaagaaaacgacatccgtcatcagttttcacagaggccaaatcccagggttataaaagccctagtatgtgggcagttctttcacgctggctattttggtggcttggggacatgtttaggaatccttcatgcttatcagcattaagccactatcagttcacagtcat

SEQ ID NO: 7002 - DNA, 6000 bp, Homo sapiens
gcatctgtactcctcagctacttgggaggctgaggcaggagaatcacttacttgaacctgggggccggaggttgcattgagccaagatcgggctgcactccagcctgagtgatagagcgagatgccgtctcaaaaaaaaaaaaaaaaattactggtgtttgggcatttcatccacaggatccattgaattagacattttcaaatatttactgtgtacccgtctctcaaaaaagataatgtcctagataaaggattaaacaaaaccagtcaccctcacccagcatcactgcccattgggacacaccccgagctcccttcttggtgcaacatccagcgccttgatgacatgggcccagggtctgcgcctttcctggctcattctctgcactgccactcggaatgactcgctgctccccatacacagtctgtctccaggatcctgtaatgtccttcctgtcccaactaatgagtcattcaagaccggcttcccatgtcacctccccccatcaccctcccgggccatctccctgtcttgctcgctgtctcacacacgcaattaattcctgtcttctcctgaatcttgccatactttatttagcatccgtcacagcaattacagtgcatgcaagtgttcagggactgtgaactccttggattaagaatgttatcatcggccaggcgtggtggctcatgcctgtaatcccagcatgcactttgggaggctgaggcgggtggatcacaaggtcaagagtttgagaccagcctggccagcatggtgaaaccctgtctctactaaaaatacaaaaaattggcaaggcatggtggcgcacgcctgtaatcccagctactcaggaggctgaggcagcagaatcgcttgaacccaggaggcggaggttgcagtgagctgagatcacaccactgcagtccagcctgggcaacagagtgagactccgtctcaaaaaaaaaaaaaaaaagaatgttattttcatttccaaatccttagtaccttgtacaagtgcccatcagacagcaaaaacttggcaattgttgaatgaacaaatgcttttttgtcttgtataccctaaaagaccatggattctaccggcctccattaattgactgtcctccgtgcctcagtgcgcatacacgcggatctttgatgctggctggctgttgcagactcctggtgtcaatattgggatgttgggtcctcccctgaaggaaaagcaccaaatgtgaccagcaccacacctgtggcaaagcgagcagagccatggttggcggctctctttgtgcatcttggggcggttcacctgtggctttatcaaggcccccttctttccatgagtggatttctctatgcctttgtggacaggctttcatggagggaggtgtaaccaagctcagaatacaacaggaacacatggcgtaatgggtcttgtgcccctcactctggcctgtcccttctgttcatgggtctcaagacccaccacccccagggacctctgctccatatatgcagatataaaaacttcttttgaaagggctcataagggccaggcagcatggctcatacctatagtcccagtactttgggaggccaagatgggaagaagattgtttcaggccaggagtttcagaccagcttgggcaacatagcaagactccatctctgcaaaaaatataataagtagccaggtatggtggcatgtgcctgtggtcccagctgctcagggggctgaggcaagacgatcacttgagcccaggagcaccaggctgcgatgagccctgctcacgcaacggcactccaacctgggtgacaaagcaagactgtgtaaaaaaaaaaagggcacataggaattgggtggcaaattcaagcctatggtgcacacaaaaatacctgcaaaccacaaataaagaaatggaggaggcaatcggtgcgggtctttggacacaagaagacagccacagctgtggcacactgcaaacgcggcaatggtctcatcaaggtgaacgggcggcccctggagaagattgagccgcccacgctacagtacaagctgctggagccagttttgcttctcagcaaggagcgatttgctggtgtggacattcgtgtccgtgtggagggtggtggtcatgtggcccagatttatgctacccgtcagtccatctccaaagccctggtggcctattaccagaagtatatggatgaggcttccaagaaggagatcaaagacatcctcatcctgtatgaccggaccctgctggtagctgatccccgtccctgcgagtccaaaaagtttagaagccctggtgcctgtgctcgctactagaaatcctaccgataagcccatcgtgactatcaaaattcacctgtataataaacagattttgaaggattttaaagtttcaaggaaaaaaaaaaaagaaatggaggagtttgggatttctccaatttgctgctgagcactggccgcctgaagagccacagcgcttgttaactggcacagccgatggctcttgagctgacaacagttactggaaagaccatttgtagaagaatttgtgccatcaagagagttctgagaaatgagcagcctgcagtatgcgctcactctgcaccgagtcagttgcttacctaaaaaacaaacattgagatactcaatgatatgtgtgatgtttaatattttaacagtaagcaaaccttttatagagaggggaaaaggtttgccttccctttcctgactgtgtcccgggactagtgaagagagcctcttcaaagggaagttcttgaagctctgctcttgtcctcttgctgggcagaggcggcagctttaggagtggctggagtcctgagtgtttaacttagagtagctgatgggggctcagccggggccggtcctgggcctcagtcatcagcacttctggagactctgccgcctcggcgtcaagtgcagaaggaacattaacttctttctcttgtgtacatttgcttttgtaacaaaaaacttgccagattttgtaattctaggatctcttcctttaaactccttttgctgaaacagaacagatgcaagcgtagtgttcagtgagactttaggtaaagcctcacacgtatcaggcaacaagctgggtgccgtgggggcacagagataaaacctcggcagggcacagtggctcacgcctgtaatccccacactttgggaggccgaggcgggcggatcacttgaggtcaggagtttgagaccagcctagccaacatggcaaaactccgtctctattaaaaatacaagaattagccgggcgtggtggcatgtgcctgtagctacttgggaggctgagatgggaggatcacttgaacctgggaggtggaggttgttgtgagccgagatcgtgcccagcctcggcgacagagcgagactctgtctcagaaaaaaagaaaagaaaagaaaagaaaacttctattaaggtgatggggcttaggggtcttttttacctttcagtttctgatgttatgttctaggagtgatatgcaaaacttgtatgaagttggaagttgttctgtgtttttaggacccacaggttgtagtagtgtagtagttagaagacagacttggaagttaaaacaagccaaggttcaagccctgacttggcagcttcttgctgtgtgattttgggccaggcatttcctccttgtttcttcgtctgcaaaagggtgatgttccaggtcaggagatcgagaccatcctggctagcacagggaaaccctgtgtctactgaaaaatacaaaaaaaattagccgggcgctgtggtgggtgcctgtagtcccagctactcgggaggctgaggcaggagaatggcgtgaacctgggaggcggagtttgcagtgaacagagatcgcggcactgcactccaacctgggagacagagtaagactccgtctcaaaaaaaaaaaaaaaaaaagggtggtgttgccagaagccaggagaggatgaggaggttgtagaagcagagtgcttacaagcaggaaagcagagtttcagctgggtacagtggctcacacctgtcatcccaacactgtgagaggccaaggtcggcggatcacttgaggtcaggagtttgagaccagcctggccaaagtggtgaaaccccatctctactaaaaatacaaaagttagctggatgtggtggtgggtgcttgtaatcccagctatttgggaggctgaggtaggagaatcgcttgaacctgggaggtggaggttgcagtgagctgagatggcaccacggcactccagcctgggccacaagagtgaaactctgtctcaaaaaaaaaaaaaaaaatagagcttatattctttttttttttttttttgagacagggtcatctcggagctgatgactctgagttagcaccatctcggttcactgcaacctccacctcctgggttcaagcaatcctcccacctcagcctcccgagtagctgggacaggcacacgtcaccacacctggctaatttttgtgtttttagtagagacagggttttgccatgttggctgggttggtcttaaactcctgacctcaggtgatccgcccagctcagtcttccaaagtgctggaattgttcaggcatgagccaccgtgcccggccaggtgtttattttctaaatccaaaattttttatcagatctgctcagttttaagtaacatcctcaaaatctattttgctcttctgttttctaacttggtaagaggtgttttataattattttccaaattacactcaaacaccttccatctgtccaaaggtgctggagagtcatgcctgtgagccctgggcacctcctgatgtcctgcgaggtcacggtgttcccaaacctcagggttgccctgccccactccagaggctctcaggccccaccccggagccctctgtgcggagccgcctcctcctggccagttccccagtagtcctgaagggagacctgctgtgtggagcctcttctgggacccaggtgagttccctggtactgccctgcagcctgtgtgggaaggggggtggtctatctttctgaccttctctcccagccctgggactggagaggacaagattaagcatggggatctttcctttcttggccagacttccagtaagggaggttgtctgttcctctaaccagaagacttctttgaactgtgacggttttatattcctcacttggtagaggcagaacgttcatctcagccaaccccacgcccatctggagtgtacttccccgggatgatggccccaaatggaggcaccggcctcttctttttgcctaaaccacttctagaaaccttttataaaccacaggccttaatgtgtatctttaagtcactgctgttttattcatcatcagcaactgactttgagacaggtcttctaccttattaattttaaaagaattgggataatttattaagttgccccttaatagcacttcatactattttagctttaatttcttcactttttaacaatatgattcattaaaagtcatattttaaattaatttttaactgtttgcagttgtatttcatgtaaatatttattgactaccctttaaagcataaattttgaatattattagatatcaacagccacatcttaaaaaaaaaaaaaagcaagagttttaatttaaaaagagccttgatataaatgattttcaatggactgaaaccaaaccaaaagtaaaatgggtcatttaaaaaaaaaaaaaaacccttccccgtgcgctggagtctcccgggtcattgtcggggagcgctagctcatggtgatctaggaatgactcgctaattgtttgcctttctatcccgtgcatcttaacctggctgatggatgatgttgggtttggatcagccatgagtgtggagctgagcaactgaacctgaaactcttccactgtgagtcaaggaggcttttccgcacatgaaggacgctgagcgggaaggac

SEQ ID NO: 7003 - DNA, 6000 bp, Homo sapiens
gtgccaggctgtactaagcactgaggatactaagaactcagacagagttacttactcacggggagcccaaaacttaggagaaatgggggttggggggatgctgctggttgagaagaacaactttcaagtatagaagctgaaaacaagagccaaaaggacttccatttactacctcagagtgagttaggaactagaggagagctcagtaatatgaaaactgtcaccgttgtaacttccccccctttttttctttgtattttcgtttatcccccatctagttccccatagtgatgaacagtaaaaatcctccacgttgaaatggtgtgtgtgttcttgttttcagggatagcaggaaggctgattgttggggagccagtattttctattatgaagcagagaactcttaaggagtggagtggatgatggtaattaccaaaagagaggacaaagtccttgggatctgccacacagaagaaagaaaaacatgggaaagactcccagctgagagcagcctgggcctatgcctggtctctttttggttagactttattattatttatttttgagacagtgttttgctcttgttgtccaggctggagtgcaatggcacgatcttgactcactgcaacctccacctcctgggttcaagcgattctcctgcctcagcctcctgagtagctgggattacaggcatgcaccactgcacccagctaattttgtatttttggtacagacggggtttcgccatgttggccaggctggtctcgaactcctgaccttaagtgatctgcccgcctcagtctcccaaactgctgagattacaggcatgagccactgttccctggctttgttttctattttgatatgagcccaaccctatgaggtaggtagcgggaggactattcccatttttacaaacggacaccaccccgcccacaaagaaaaaaaacaacaataaaataagctctgaaagatgaaaagacttgtccaaggccacacagctagtaagtgagtgaatgaagacccaagcccaggtcttctcacaacaaaactgtgtgtttttcctttaaaccacgtgcctatcaatcgtcattgcgatcagtatctcccaagcatatggctcttgggagtttctgaagtactttctcatgcttattttcatttgcttttcacaacaaaagagaggcagggcaagcatttattactaccatgggtacaaactgctgccctgcctttcaaggacttctgctgcaactggacacaaatggatccatcccaggcttgttgccaaagactgcagaagccacaagctacacctatcctcagtgccagtcagaatatgatcccgtgttctccaggcagaagctcaaaaatgtgagctttaaggagaaacaggccgggcacagtggctcacgcttgtaatcctagcactttgggaggccgaggtgggcagacagcctgagctcaggagtttgagaccagcctgggcaacatggcgaaatcccatatctactaaaaattcaaaaattagccaggcatggtggtatgcacctgtaatcccagctactcgggaggctgaggtaggaaaatcactttaatccaggagacaggttatggtgagctgagatcacaccattgcactgccttggcaacagagactttatctcaaaaaaaaaaaaaaaaaaaaggagaaacaaatgttacttgcaaagggaacacaaagtcgtaagcgtttccccctccacactttcatttcactagaccagcaattccacagagcactttccccatctcctgagctgtggatatctgtgagagctgcgaaggggtttaatggtgctccccgacagtgctgggctgaaggcaatgggagacaagacggtctctgtgatttcttgctgaaaccactgatcatttgaagtataatgggactggccaagttcatggctgccaatggctgcaactctcccatgtgagctcagagatcttttacagagggcagaagagcctgagcccagctcttcaggggcatgatttgtcttaagtatagcattttctttacttcacacagagtataggacaattccaagtgggtgaggaatgtgtggtccagatgttctggtctgtgatgtctgtagcaggtgcagttccctatgaaaggggatgatgagctgtgcctcggtcgcctaggatccagtgggaccactgtcctgatgattttctttctttctttttttttttgagacaaaatctcgcttttgtctcccatactggagtgcaatggcatgatctcggctcattgcaacctccacctcccgggttcaagtgattctcctgccacagcctcccgagtagctgggattacaggcacctgccaccacgccttgtatttttagtagagacggggtttcaccatggtggccaggctggtcttgaactcctgacctcaggtgatccacccacctcggcctcccaaagtgctgggattataggcgtgagccaccatgcccagccacttgatgattttctttttttttctttttttttttttttttgagacagagtctcgccctgtcacccaagctggagttcaatggcacgatctcgactcactgcaacctccgcctcccgggttcaagcagttctctgcctcagcctcccaagtagctgggattacaagcacccaccaccacgcccagctaatttttatatttttaggacagacagggtttcaccatcttggccaggctggtcttgaactcctgacctggtgatccacccaccttggcctcccaaagtgctgggattacaggcgtgagctaccgcgcccggccaacctgatgattttctaaaaacctttttggactgggcgcagtggcttatgcctctaatcccagcactttgggaggctgaggcaggtggatcacttgaggtcaggagtttgagaccagcctggccaacatggcaaaatcccatctctactaaaaatacaaaaattaggagtagtggcgcacacctgtaatcccagctgcttgggaggctgaagcaggagaatcgcttgaactcaggaggtggaggttgcagtgagctgagatgacaccactgcactccagcctgggcaacagagtgagactctgtctcaaaacaaacaaacaaaaagccttttcaataaaccacaagtgactttggttcacagtaaatacacttctgcccgaactaagataaaatgtaagcattgcttttcaaaccttagaaatgcaagaatcagctgggtgcgttggctcattcctataatccccacactttggcaggccaagttgggaggactgcttgagtctcgttcgagaccagcctgaccatcatggtgaaaccccgtctcttactaaaaataaaaaattagttgggcgcggtggcaggcgcctgtaatcccagctattcgggaggctgaggcaagagaattgcttgaacccgcgaggcagagggtgcagtgagctgagatcgcgccactgcactccagcctgggtgacagggactccgtgtcaaataaatgaataaatactaaagaaaaattaaaagctattattattattatttttagaggcagggtctctttctgtctcccaggctggagtgcagtggcacggtcacagataactgcagcctcgacctcttgggctcaagggatactcctgcctcagtctcccaaagttcgggattacagacctgagccaccgcgcctggccggatgcagagcgcctggccggatgcagaggcttttgagtaggcccggtggacagggatttgctttagacctgggcccctgttccccctctgcctcttaccactggtgtgacctggggaccgacagtttacactctcctttagccgggggtttcctgtctctgaaatggagctaatttctcccctctctacaggaagaggtagatagtgctggaaggcgtgctaggtacaccgcaaagactccacagcaaatcctgcacacaaaatcgcgaatgctgcagccgagaccccacgcaagcaagcaccgcaggagacgtgggctgacagctgcgccccacgtgacctcccacccgcgccagtccgtcccctcggtatcagggcgtggcctcgcggggcggccgtacctggattggccgggaggcgggaccggtggtgcgcgcgcgaaaggagaggggcttgggggcgtggcccagggggccggagacggctgcgattggcagtggggcgcgccgggggcgtgaccgcggcattgggtcccgggtggggccgaggcagcgggagtcgcggttgctcagcgtgcacctgagacccgacgcccggggtcctcgaagacgcgtccgccgccgtgcccgtcgccatgaaccgcttcagggtgtccaagttccggcacaccgaggctcggccgccccgccgcgaggtgagtccggcccgaggaccgggcgctgtcgcctcgggccccgtccggctgcccctccccctgcccggaccccacaggggtgccctccagggccgtctggaaccccgagacctccatccccggggaaccccccttcaggccagggccccggcgtccgggccgtttcgtcgccgccggagggcagagtccggcactcccgtgactcgctctggcgctcggtgaccctggcggtctgcccgcctcgcccacctcgccccgggacccccgaggcggcgcagccctcctagccggggcccaggcctgcgaggccgcctgccttcccagcttccggtcggcctcgccgggagccggggctcggggcgctgccggcgcctggctcctcctccctgccgccccgggtcgcccctgcccctggctgggctgtggggagacgcccctctctcctctggccccggcgagcccaagtgtgtcagtggtggggagggagcccctcggccgcacgcgcccctccctcgggtttccgccggtgcttcctcctctcgccgctggcgcaagctctttctttatctcggtgatgctgccacggctgggtggggcctggggaagcctgagcaggtggagccccaaagaattgctgagccaggtgccgggagacccttcggacccccgaaacggcaggaggactgatgaggggtgcgccttggaaacgatgtcagctctgctcttccgctttccgtgttatttgtaaggcctgggagtgtcctccgataactgggcctaggagttgacctcaagtgaccccatcagggtcccagagcaagtcagggcagtctgggtagaggttccgtttttgtagtgtggactatatttcctctgcttccactttatgctgtgctaagctgctggagacatcccggtgaacacaacggcattttccttcccctgtggcacttgtagcctcatgagggagacagcaagcagacaaacaagagcattggaggttttcataacgacattgaagaacacacatgagggactgggatggagaatggagggggccagtctcagtagcgtggtcaggaaaggctgcctggagtagatggcattttagctgaggccagaagggtgagaattgagaaagagcctggtggagaaatggaaagtgagcatgagtggatggaggggatggccggagcagtatggtgacagatgagtccagagtggtcctgcagaacccaagggccaccggaagaagttgggttttattctgattgcagtgcagagccattgaaaagttagggggaggggctggataccatgactcacggtaatcccagtactttgggtggactgctttgagctcaggagttcgagaccagcctgggcaacattgcgaaacccctctgaacaacaagttaaagaaaaaaaaattagccaggtgtggtgactcactcccgtggtcccagctacttgggaggctgaggttggaggatctcttgagccgaggaagtggaggttgcagtgagccgagattgtgccactacacaccagcctgggcaata

SEQ ID NO: 7004 - DNA, 6000 bp, Homo sapiens
gagaatcatttgaacccaggaggcagaggttgttgaggttgcagtgagccaagatcgcaccattgcactccagcctgggtgacaagagcaaaactctgtcttaaaaaaaaaaaaaaaaaaagctttttgcattcagctgtaacccgacaatccactcggactcccgtctccactttggagagctttcttctttcccttattaaacgttcgctccaaccccacccttgtgtccacgctccttagttttcttggaggtaggacaaagaaccccgggactagttcagacaaggagaaactgctatattaaggtgcactggcaagaccgcaacagtatcaagccaattagacttgccgtggctcctggaatggcccacgcactgcactggcaccaagacaccacccaaccctggacactgcactgggacaggaggcctgaagagaagaatcctctcaaaggaagcttgaagtacatgctacaaaataaactggcttctatactcagggccagcttcatgggctcactcagaaggtccctggcttgctgcaaccatttgctctgaccatcttgaaattcttaatagttttctgggttttttagtaagtgtccccacgttttcattttgcattgagtcacacaaatcatgtagctgggctgtcttcaaaaatgtcaaggtagtaaaagacaaaaggctgaggagccttccagatgaagagatcaaagagacatgacaactaaaagcaactcctgggttacagggtcaggggcggacaaaaaggaaaagaaaaaaaaagacattagagggacaattgaaggttagctgtggatgacatcacagaaatgtcaatgggagttgtcctaatgatatttgccctgtggttaagaaaatgcccttgttcttaggagattcatggcgaggtatggggtaaaggatcatgacatctgcaatttggttgccattggttcaggaaaaaaaaaaaacaaagtacaaatgattgagtaaatcaggcaagcctaaaccactgctaaacatgaataacagttctacgagagttctttatgctctccttgcaacttcctgtaggtttgagattacctggagataaaaagttaacatcaccagcaccgcccgccagcccgccagccgaaaagagcgcaggtaattcagtccgagctgaaagcggccaccctgggacttgagtcacgtgaggcgagcccacatgacccgaggccccggtccaatatggcgacctccacgggtcgctggcttctcctccggcttgcactattcggcttcctctgggaagcgtccggcggcctcgactcggggtgagtgcagctccctgggccagcctggttcggggggtcccccctgtcctccgagctcacgaggacagccccctgagctcacggccgcccgtccccgcagggcctcccgcgacgacgacttgctactgccctatccacgcgcgcgcgcgcgcctcccccgggactgcacacgggtgcgcgccggcaaccgcgagcacgagagttggcctccgcctcccgcgactcccggcgccggcggtctggccgtgcgcaccttcgtgtcgcacttcagggaccgcgcggtggccggccacctgacgcgggccgttgagcccctgcgcaccttctcggtgctggagcccggtggacccggcggctgcgcggcgagacgacgcgccaccgtggaggagacggcgcgggcggccgactgccgtgtcgcccagaacggcggcttcttccgcatgaactcgggcgagtgcctggggaacgtggtgagcgacgagcggcgggtgagcagctccggggggctgcagaacgcgcagttcgggatccgccgcgacgggaccctggtcaccgggtgaggaggcagggagccccgtgctgtcgagggcagagggcctgagatttgggttgtagccgtgcctccgtgttcaagtcacttaaccaagctgagcccctgtttcctcctctgcagaatggggataggaatcgcttccttgcagagtttattcatcatccagtatcattgagcacttgcttgtatcaggcaatgtgccgcgccccggtgagatagccgtgaacaacacagtctttgccttaacagccctcccccattactagaaaaatcaacaaaagccgggtaaatagctaacatacattctgattgctgtgtgtgcagcaaagcaaccaacggggtgaacccgttgtaaatagtgttgattttagggagggtgatctggaacacgcctctccgaggtgacctttgagtgggaacttgaagatgaatcactaagtgagccaaggtcagaactggaggaagagcgtttcagtccaaaggaaccccacgcacaaaggctcagaggctcaggggggcttgtgtgtatgagggactgaaaaaggagtggggtgtcagaaacatcaactcatcaagactgatgatttttttttttttgagacagagtcttgctctgttgcccaggatggagggcagtggcatgataccggctcactgcaacctctgcctcccgggttcaagcgattctcctgcctcagcctctggagtagctgggactacggacgtgtgccaccacgcccggctgatttttgtatttttagtagagacgggatggggtggggaacgggggagtgggttcaccatattggcctggccggtctcgaactcctgacctcaagtgatccacccacctcagcctcccaaagtgctgggatgacaggtgtgagccaccacgccctggcaagattgatgatttgaattatttaaaattatcttaaaaattatttgagtctcaaaaaaaaagtatttgttgatgataaagcttgttctgatcctgagtgggaccaggtgggagagagcagtggagaaacaaggaagccaatgaagggccgtaacagggatcaagtggtagttgggctgggtatggcctggggattgagggccatagatggatttgagctctgttgggggatggtcatttctgttaaatgaaacagactgtttgcaaaggcttgtggggattgtattgtcagaaccctgtccagcttcagctctgacaacagggagattcctagggctgttaagttgtcccagctacactcaggccccaggaggttcctggggcatgagggggaatctagcagccaggttgggatggctagggagaaagagcctgactatctgcagttgcccctgctggtgagtgagcttcccaccttccccggatccaggtacctgtctgaggaggaggtgctggacactgagaacccatttgtgcagctgctgagtggggtcgtgtggctgattcgtaatggaagcatctacatcaacgagagccaagccacagagtgtgacgagacacaggagacaggttggatggggaggctgttggcaacaaccctctcgagaaccaggaccagtgggctgggcggagctgttcttaagtctttcaacaagtattgagcagctactttgtgcccagcactattctgggtactggggattcatggggaggaagataggcttatattgaatatataggacaaaaaatagttatagaatatgctgaaaagaattgataagtgctcagaaacaaaaataaagttaggggaaaggggagagatggggaccggagctgtgggtacaggaagagaaaagtgaagagaaaaaaatcttcatggacctgcaacatcggcgtggcccaggagcttgtttcaaagccccacaccctcagacctgcagaatcagaggcaaggcccaagagtctatgttttaacgggcctccatggtgactctgaccgacactcaaggttgagaaccactgggatgcagaatactgggatggggacaggataccatgaccattttagagtgggcagtaagctaggtgtggtggctaacacctataatcccagcactttgggaggccgaggcgggaggatcggttgagcccaggagttcaagacctgcctgggcaacatagtgagacctatctctacaaaaaaaaaaaatacaaaaattagccaggcatggtggtgtgtgcctgtagtcccagctacttgggaggctgaagcatgagaattgcttgaacctgggaggtggaggttgcagtgagctgagatcatgccactgcactccagcccgggcaacacagcgagactctttgtctcaaaaaaaaaaaaagagtgggcggtcaaggaaggcctcactaaggaggtgatctgacaaaggagcaagctagagaaaagcacagttcccagccagagggaacaggaagtgcaaagtggctgcagggtggtgaggggacacccaggagctgaggcaggaggaggaagaggctggggagggcatgctggctctttggattttgttctaagaacaggggaaaccattagagggtcttcacctggaggctggcatagcttggtttacctgtaagaagagaccccccggctgccctggggagactgggatgtgcagaggggaggcagggagacgagcaaggaggctgctgtgcttcccagggaggtaccaggtagctcagaccagtgggaagtggagttaggcaagaagcaggaggcctcccaaggggcggtgatcagccaggctgcttttccttcaggttcctttagcaaatttgtgaatgtgatatcagccaggacggccattggccacgaccggaaagggcagctggtgctctttcatgcagacggccaaacggagcagcgtgggtgagtcctgggagctgaggccccccggccggggctcagtcctgctaggaggaacgttgacccaatgacagccaccctctgactctacctgctttctgggatgttgacacctatctgtcccccctcccagggccccctcaccttcccacaggatgagggttctgagatctttgccgattccaagaactcatcatcttcagctttaggcctcacctttcctgaaccctagataggatacaaggaaatggtcacaaagtgagcagggagaagatcttggttccaatcccagcttagccatcgatgacttgtctacccacctatgccgtagacaagtccctcggcctccctgagcctcatttctagcccctgtaaagagagtgttttggtttgctctggttgcataaccagcacaaatttagcaacactcagcagggaatgttcttttgtttgtttgtttctttgagacagggtcttactccgtcgcccaggccagagtgcagtggtgcaatctcagctcactgcaacctctacctctcaggttcaggtgatcctcccaccttagcctcccaggtaactgggattacgggcacccgccaccacacccagctaatttttgtatttttagtagagatggggtttcatcatgttggccaggctggtctcgaactcctgacctcaggtgatccatctacctcggccttccaaagtgctggaattaacaggcgtgagtcaccgcacctggctaatttttgtatttttagtagacacagggtttcatcatgttggccaggctggtcaacttggaatgttctatgttcagggtgtcccatggacaaaaccaagatgctggttaggcagggctcttctcttatctggaaagaatcctcttgtttaggttgttggaagaatccccgtcgcctcctcagttgtgactgaggtcttggtttccctgctggccgccatctggggcctcagctccttcaagctgcccaggttccttcccatgtgtgtcctctcccccagttgtccggccaccctctcatccccctcgtatttcaaatctcacttcctattctgtcaccagccagagaaggctctctgtgttgaacactcctgtgattccagtggctgcacccagatcctccgggccgtttcccctcccttaaggattcctatgccatgtaacagcacaggcatgggtgtgatctcacgtgttcacagcttccggg

SEQ ID NO: 7005 - DNA, 6000 bp, Homo sapiens
tgcctggcagctggtcggtgctcagcacacagagctgtgacgggcctcatgcaatgtgcatggtgcctggcagctggtcggtgctcagcacacagagctgtggctgcccctggtgccgttccagggatgctgtatttttaggatttgccagcttacgagcctctcaagcatcgtcccttagaagtcagccccgttgtggatcctcagttgtatcacgtacctccctcatcagaattggctcataataattttttgtgtttcataaagtcagatcctcagaggaccgtaattgtcaaggttgggtactcataaaaaggctgcaggctctgacagccttatcagaagccacagtctcagagacactggggacacatgcccgccactgatggaatagcccgctgaggttgatactttgaaggcagcaaccttggtttggatgtgtagtcttggggatttctttaaaaacataaagttctttacatcacagccatacgttaggttttagttttcatttgctttgccagagctgtccttataaaaataacttcttcccatgtgtgcacagaactatgttgtgcttctggactccacactccccagatcccagtatgactacatcttgcctcaagtttctttcaccgcagtgggctaccataaacacatcaccttgatttttaatcccacggtaagtaaaagagggagttaaaaaaaaatccatgggctgggtttggtggctcacgcctgtaatcccagcactttgggaggccaaggctggtggatctcttgagcccgggagtttcagaccagcctaggcaatacggtaaaaccccaactctacaaaaaatacaaaaattaaccgggcgtggtggaacgcacctatagtcccggctactcaggaggctgaggtgggaggatcacttgagcctgggaggttgaggcctcgatgagccatgatcatgcccctgcactccagcttgggtaacagagtgagaccctttctccagaagaaacaaaacaaaacaaaacaaaacaaaacaaaacaatccatggggtggcgaaagaaggcatgtccatacaacctgtgctccaggtcgcaggttgcagggcagatatttaaagggctcctggcattgggtcactttctcattctgccttctggattctgggcttccccagattgtttttagcttttctgagcactgatgcctgcgattccctttgaggaggaaactggtaataagagcagtgtaattgtttagatcggtggctcaggaatgattttgggggaggagggacaccactatcgctggtgtggcgtgtgcttctccatgagggagcacatggtacatggccacgcaaacccctagaaccaactgctactttacaggaaatagggaggacccaggagcacgcaaatgactccacagggatgcaggacaaccacctggagcctgatttgtttgacaaataaattgcaaggaaaaaaaaaccaacaacagatggacagaatacctgtgggttaaaagaaacttaacttatcgcttaattcattgcaatatgtggcccttactatttgcaatatgtgtatctgttgcatacggtctgtcctgtatccgataggctggaacagtggaacaaacaaaacatacacgtatcttttaccttcttgataaaattgtttagtgattcctaaagctcagatgcagtattgtcacctgatgattaaacagacacatcagcaatagcaaaaacagagtccagggctcagcctcaggactgctgattctgaacttgacggggtgaaagtgtagcacaggagtctgcattaaaaacaaaaatctggcctcatagctactgtgttggttgttgcttctaggccttttcagtgggcagaataagaactttattgttttcaaaagatgtaactgtaagtggaacaatatcctccgatcctcctttttccttttttgataacgacacagcattcctctgtgtggatataccgtgtgtcttaggccatttgggctgctattttgtatcttagactgggtaacttataaacaacaaacatttatttcttacagtactagaggctgggaagtccaagatcaaggcattggcagatttggggtctggcgaggacttgctgtctgcttcatagatggtgccacctagctgtgtccccacaaggcggaaaggggcaaacaagttccctcaggccactcttacggggcattaatccctgacttaatcacctcctaaaaagggtgtcctcttgacactatcacattatggattagggttcaacctatgaattacgtaggcacagacacattcagatcctggcactacatgtaggatattcagttagcccctggttgaggggcgtttgtgttgttactggttttctgctattacacataaccctttaatgaattgccttacgcatgcatgtttttgagtgttcgtcagtctctctttggaatagactcccagaagtggaattgctgagtcaaagggtaaatgcatacggaattttgattgatacggccacttcccatccatgggggttttactgttttatattcccgccagcagtgaatgagtacccttttttccccaacagagtattttgtcaaatttttcaatttttgcaggcttatagatgagaagtgatattatctcactgtacttctaattgcatttctctcttttcatgtggttaagagccatttgtattttctgtgaactatttaacctatttttctatagaatttttggtctttttcaaccattttcagctctttgtatactaggaatattaaccctttgtaatgtttgttgtacatatttttcccaatttgtcatttatcttttcacttggtttctgcaaagatttactttatttctgtgttaaatgtgttgattttttcttattgcttctggattttagagtcataggaaggttttcttcattcccagcttttacaggaatttatcgtgtttttttcaggcagacttttatagtttctgtttttacatttaaatctctctatccatttggagtttttcctggtatagatgtgaagtatggctccagattgtctttttccacatgctatccagttaccatttcatgcttttcaaacgccatcctgcatggaaggtggacaggaattacctttcatttagagatgagaagatgggaacctagaaggagatgtgagcagcccaaggtcaccagctcacgtggagcagtgctagggcttgagcagagctctgctgctgattctgggcttctgtgaagagtgattcatgctcagtgagcctgtaaatatgatcttacctgaacaagagagtttttctcatgacccacgaggaaacacttccttgttactcacagtagagacctggttagaaagtgctggagagggctaggtgtggtggctcacgcctgtaatcccagcattttaggaggctgaggtgggcagatcatttgaggtcaggagttcgagaccagcctgggcaatgtggtgaaagtgaaaccccatctctgctaacaatacaaacattagccaggcgtggtagcacgcacctgtaatcccagctactcgagaggctgtggcaggagaattgtgaacctgggatgcagagtttgtagtgagctaagatagccccagtgcactccagcctgggcgacagagcaagactgtctcaaaaaaaaaaaaaaaaaagaaagtgccagaaagataagcatatacaagaaccacttacctttgcttggggctgcattgtggcccagttgctgggagaggcttctgtgaaggccgttgatagctgcaggcagtgacattctcaggggcccctagcagacaactcatccgggctcagggacacacctgggagccagtggcaggaatgtggagacactgcttggtggtggccgagcagcccagcctcgtagctgctgcctgtcacttctgagaatgtaagaaactgtgccctggtgtgtgatgttccccttcctgtatacctatgtaactaacctgcacattgtgcacatatatcctaaaacttaaagtataattaaaaaaaaaaaaaaaagctgtgcctgctggggcttggattcccgagcagggccaagtgttgaatgaagagagcgcccactctgtgccaccccgtacagggccctcacaggttgatcctcacaacaagccttcaagcaggtgtgccattcctcccattttcacagaagcccagaaagattgagtcacttactgagtgttagcagaaccaggactcaagtgaggcagtttgtctcaagccacatggtttccacctcgttctgccctccgcgtgatgagtggctcagcattgcatgttcacgggggctttgtaagcacattggtttccttctttgttgatgtgactgcccacagcctcgcgactggattttactcagtattccatgccctgctgagcatttcacatactcctttcatcaagtttcacagcatccacccccagtgggtgttgttcatatgatctccatgtcatagttgagtaaactgagtctcaacgtggttgcctgagtttacccagtgaggcctgggacctgagcctagactgaatcactcttaattcctgctgaattaaacttttatttatttattcattattatttttttctgagacagagtcttgctttgttgcccctgctggagtgcagtggcacgatcttggcccactgcaacctctgcctcccgggttcaagtgattctcacctcctgagtagctggaattacaggcatgcaccaccacttctggctaattttgtatttttatagagacggggtttcaccatgctggccaggctgttctcaaactcctgacctcaggtgatctgcccacctcagcctcccaaagtgctgggattacaggcgtgagccactgcacctggcctgaattaaacttttaagtaagtgtttacttcagtggaaaaatgggttgggttctaagagatgtccagagatacaggagtaggcagttgttgatggaaatctgttcctgcccttattctttcatttatgaaagggcatcccaggtacagcggcccccacagtcactctctagcccagcagttctcggatgggttggttgcaggacccctttatactgttaaaaattattgaggattttaaagagtttgagtttgcatggattatctctgtgtatatttatcatattagtaattaaaaccgagatgttgaaaacgcaagaactcacaagctacacattccgttagctgtgggcgtgatgacatcagggtgcgtagtctctggaaaagtccactgtgtgcttgcgaatgaaagagggcggaaaaggcacatcacatcttactattggctgaaaatagctgtggcctcgggaacctctgcgagaggagtcccggtatcctacactgagaacactgctctggctcattaacttgtttttatcattattgggaagttctccttccatttatttgcttcctttatgagagtagagtgggccaatgggatataggttcacttgatgctttagaacccagcatttcaggggctttagcaagatggaaatgtctgtctcatgtcaagtgtccaggagtgaccagtgcagagatagtctggtagctccaaggcgtcaggggacccaggccccttctgtctcattgtgctgttccagtgcattgcttttctccaaaatggggcaattggccaaatgctgtctacccagcaaaagggagggcacaccacttccctagggtccagccagggtgtggcacttaccgcttctgttcctgtaccattggccaaaatttagttccagggctgcgcctgctgcagggaaggctggaaaaggtgatctatattgtcggtggcccagataaaagttgggggttctattgggagaaagggagaatggccacagggatgctagtagcagtgcctgctttgc

SEQ ID NO: 7006 - DNA, 6000 bp, Homo sapiens
ttttcaacagatatttggggcataaattcaataccaggcaattttacatgtaccatggaaacagcaaataaccaaaagagagcccttgctggtagagagcttacatttaaaaggcagatacatttaaacaacaactatgtgcaatgtgatagatggcgacaagttctgagggggatgaaaaaacaaggatgagggatagagaaatgtgggtgttatttgacataaaatgatcagagaaagtccctctgctaagcagaggctaaaagaagtaaaagagtgaaccaggggcatatctgaagaatagcattgcaggcagtcagaatagcaggtgcaaagtcctgaggtaggatcttgtgtctttcctgcaaggctgactgcctacacttggacagccaaaagtttgaagaattgctcactgcagagggtctagggatgcattttatgaatttgtccatgtgtttactcaagaagtacttactaggtactgatgaggactgcagagacaggcttcctgtccacaaacatctttttttttttgggcggggacagagtctcgctctgttgcccaggctagagtgcaatggtgtgatctcggctcactacaacctccacctcctgtgttcaagcgattcttctgcctcagcctcccgagtagctgggactgtaggcatgcaccactatgcccggataatttttgtatttttagtagagatggtgtttcgccatgttgccgaggctggcctcaaactcctgacctcaagtcatccgcccaccttggcctcccaaagtgcctcccaaagtgctggaattacaggcatgagccaccacacctggcctctgtccacaaaggtcttaacagccttcagagggagacagataagttggcaggtgagtgtaattggaagcagccctgagaggcctaggagcagagaagaggagtacctgtggagttaggaaaggcttcctgggccgggcacagtggctcacgcctgtaaccccagcactttgggaggctgaggcaggtggattacctgagatcaggggtttgagaccatcctggccaacatggtgaaacgctgtctctactaaaatacaaaaattagctgggcgtggtggcgggtgcctgtaatctcagctactcgggaggctgaggcaggagaaacacttgaacccaggaggcagaggttgcagtgagccaagatcatgccattgcacccagcctgggtgacaagagcaaaactccacctcaaaaaaaagaaaaaggaaaagcttcctggaagaggtgataacgtaggaggaggctgggtgaagagtgatgcaggctgagggaatagcgtatgcaaaggcttgaagatgaggaagaggccagacaaccacagattggctggagcatgcaatgtgtggtggagaagtcataggtgaggttggaactgtaaagaggggtcagatcccagggagcataaagtgctgggaatgggagataatgctgacagatggtacactggcctctggctgcaggggagaaaacaaacaaaaataagaatgaaagcagggagacctgttgggcagctattaaaatgactctggacagggcgcagaggctcaggtctgtaatcctggcactttgtgggggcaaggcaggaagataatttaagccaaaatgtttaagaccagcctgggcaacatagcaagatgctgcctctacaaaacagtttaaaaattagccagatgtggtggcctacaactgtagtcccagctattcaggaggctgaggtgggaggattatttgagcccaggagatcaaggctgcagtgagcctatgatcacgtgactgcactgtagcctgggcaacagagcaagactcttgctaaaaaaaaaaaattaccttcataaggaatggtggcccgaatttggattggtgaggtggagatggagaagaaaggattattggaaatgggagcagagggagaaaggaaggagcttagaaaggaagaggccaagtttccagcttggatgactgggaggcaagtggcacctttgattaaaatagatcatacaatgaggaggagaagatttaggtgacttgatgagctcagagttgcacttgctgagtttgaggtgtctcaagcatctcagcggcagtgagaggtccagcaatcaataggtagatggaactgaagttcaagggagtagcgaaagctggggatacggattcagaactcaccagcctggagatggtatgtgaaaccatgagataacttgatacctcccagggagagtttatgacgtgaaaagaaaaatgggacctaaccagcattcttagagacaggatcttgtagcaacagagcagaaatctccaggtagaaacaggagaatcaagaaaatatgaacatgcggagtcaaggaaatgcaaggtacccggaacaagcagtaggcaaatccaatcacaaaggagcagaaacaaactacccagtggatttggctataaagttgtagctacatggttcagattggaatggagaagccagaagagggatggaggaactgactttgaaaaggaggaacatcgccttatcagaagttggagggggaaggggtggaggatggagaccagtatttatatgtttacaggggaaggagcaaggtcaggtgttgtggcctaaattgtttttgaagtagggtaccagatatctgctgagaaaggtggtgtgagtgggtgataatagctgcagagaccatttaagaggaatgggaaggttaagagtggccactggggagactgggatgggcacctggccagactgaatggatcagtaggtgatttagtgggcccagttgtcacaagttccacattttagagactatttattctccagttgctctgggagtagagaaggtggcttgtagcaccttttctttttccaggttgaggttttgtagaaggtgttaccaatgccaagaccctcctgctcccttgactccagttgccttggctccttaaggagtcccagagtgacagagaagaagcagtggccattttttctgcaaaagctttggctcttttatgaagtccatgatttctaccatgtcatgaaagccaggtccaagcctggagttaataagtccaagatcctctacagcctcttctcagtctcatgccttccaatctctagggcagcctacatatcaaaagggatttacaggggctactctggtgcttcttttgtccaagaacctttgtctgtcctttgccattccaaaatccatcatcaccaaattagccattccaaaactgctcagcattagaaatccggagttgggtagattctatggaccaataaatggaatttttcgaaacatccacactcccttctttcctttcctatgtgtcctcttagtctaactggccccaagctcagtggccttcagacagaagcagaaatgttccaagatgattagctaggaacacaaggtacaactgaaaatccattgtgcaaacaagtgcctgtttgattttctcttcacttccctttgggtattaagcttcctttcaattcgtgtttggtttctggtaataaatatggcaccagtttcattgattaattatgaagattaaatgtgagaagtcaagaacgcaaagcagtgcccagcatgttcagcattcagcacacagcactattgtttgtaggaagcattcgcacaatgctgagacagctggaagggttgacattgtgaggggagggcccttctttcaccatcctttgcgtaaatggcttatctcacctccactcaacaagcccagtgtatggcctagaactcccatcatacctgtgcaccaattgaggagagacacatgggtgggaaattgcaataaaaagacggcccacagcaggctgcattcccatggctggccagaggaggaacgctttgtgttctcatcggaggtaagtcctgctttaagccccaggaggcttcctcctaatcctgggaaatcttgatccactggacatgctaggattctttgtttctggaaatttttagaacccagcaagtagtttggaccctggccattgtcaagtgctccaggtaccactctatgtccaactcagtcatgcttccagtcatctgcgatgctccaggcctacggacgccaccctcttccttgtcccagatattcccaccagggaactaggtctctattgggatctcatctctaagaatcaccaatcctgggtgcttccctatccctgctgtctcatagcatactcatggtatccctgcccgaaaccgatctctattttccactgaagtcttccagaggttgtaggaagttatccaaagatttggccatttagggaaagtatttcccagaaaagtaaatgccatccaaatgctggcaggcttttttgcagctctttctttctgcctcgccaccgcccccaacccccattgatttatttattcatccttaatcctctactgagtactccttgtgtgccagattctgtactaggagcaaggaacatgaggctcggtttggcatggttccacagtcacagaaatctacatccatagaggacatttcagggggctcttagcagcacccaatgcataaaactaagaaagggcagccattacttttgtgtgcaggtattcacaggtaccatatccctttttctctatccaatctccaaagagcctctacttccacctgagcagggaccatcctgagacctttctaggacattctgcagtactagccagctctaagcttgcctttggtttgcttactgtcaattttatcacccattatctcgctctatctgtccataagtcacacctactttgaaacaatgcagctctttatgaaggaagtcaacggatctgtttctaagaacatagacctatgccctaatcttatcttggtcttttctttcccatagctgcatgggaagtctgcatacagcaaagtgacctgcatgcctcaccttatggaaaggatggtgggctctggcctcctgtggctggccttggtctcctgcattctgacccaggcatctgcagtgcagcgaggtaagtattctgctcacctggcatctcagatgtcaaggaagacctagcaagtgaggatagaagtgcagagaaggtggctcaggtaaggaagaggaattggcagttctaaagcaaaaactcagagctagaagtcaagggaaacataatgagaaacaatggaaatcaagtcacaatctctcaaagagcctaatcagaaattcctctgaaagggcagtgggagccagttaacataatttcccatgcccatatctttgggagattagagaccccagattaaagaagatcaagaaatacataactcagtcaccttgtgctggcaagtgccttctccttttcctgaaagggctagattaagtgatctctttatgaagtgggcaattcagatacttgcagaaaggagtctcaggcttagaattagagtgcaaatttcagcccctggaggagggtgggagagggtactgagctcattggaggcctccagtggaaaaatacaatctaagaataacaaatgcagtgattccttgtcttaaaataagtacatgcatgagcaaagtttgaaaatctttttttctgaaaggcccttctaatgtgtattataagcatgtgcaaagcttgaaaatctcttttttttagaaagcccctttaatgtgtattgtaagcacatgatcctgtgtgtgcacttagctccttcttcaggcatctacagcattcaacaaaatagaactagagaagacaattagcttgaccctggtgctgtgcttggcattttacacatattatcacatttaatcctctaacaatcgtttaaggctttctttccccaaatgaggtgtatatattccaagatggttctgggggtgcctggcaaactcttaacaagtttttaatggctgtatgtttattttttatgcacatctaaaaaatata

SEQ ID NO: 7007 - DNA, 6000 bp, Homo sapiens
tgagatggagtctcactctgtcgcctaggctggagtgcagtggcacaatctcggatcactgcaacctctgcctccccgcttcaagcgtttcttctgcctcagcctcctgaatagctgggattataggcatgcgccaccacacctggctaatttttgtatttttagtaaagaaagggtttcaccatattggccaggctggcctcgaactcctgacctcaggtgatctgcctgtctcagcctcccaaagtgctgggattacaggcgtgagccactgcacctggccagatgcagtagaaaattatccacagcctagagctctggaatgaactgcacagggggcctggacatgtctgaggcttcagtgctattctcccagggcctccccatctctttgcaccttgacccaccaactggttgcattgagcttgacaaacacttcgtaaagcaattctggaaactcattcatccatgcttctgtgattaggttaaagcaactctgtttatctttattgctaatctgatttatgtctgttgtaatcagttcatttataataacaaaactaaggttacactttccatctctattttctcaggctatttggaattccttgggactcatggaggttgtacatactttggctttcagccaagtatatttgacctgacctccccgggaattagggctctgtccatcactctgatttatatgtgaagcttctgatcttgtttcccccctctttcccacctcctctatccctgagggatggtcacaggtgaatttttcctaaactgcttgtccatgagctcatgttagcccaagtgcatcagaatcacctgggaaagtgaatttaaaatctagatttctgggctccaaccccagtgaactctgatgcagtagttctggggtggagcttgggaatctgtaattcagcatgttctccagaggggcctggggcacagccaggtttgggaaccactattgcatagaacccccagttctcctgtgagttttcaaaatggttaactagctaatacttgggttgggtttcaggcctaacaactgccttttgcattttcttgtcttaggaaaaagggtcaagcaaccacaacctgctggctgcacctcgagcagcgctgactcggcttaaccagcaggcccaccagctggctttcgattccgtgttcctgcgcatcaaacaacagctgttgcttatttcgaagatggacgtgagtttctcactgaccacatcaatttttcccgggtcctgcctccaactcaagcatactgagtgtgggcttaaccctccctgttccaagagctttgggaagatcccgctttaactttcccaagccggaaagagccactttccaatttcacctcattgcttagcatgaatttcttatctttattgtagttactctgatactttattcacaggcggttctcaggattattaaaattgcttgattaactttccctatttggagcagcagagaagtaatagagattatgtgcagcttcgtaggttaggccaggtcagaagagctaattgtcttttgagattgaattattttcacaccacacgaatcatttctggagaattggttctggaactttactcaggggagtaccttatcagaattgaacttgtgtttttgagggggctttggagggttctgttcctttctttccttgataccttttctgtttggctgtttctagaatcgactcactttcctttcctcacaccctcttctcttttctggttgtccgaattatttttcaaggcattgcctgttctattttctctacttgctgtctttcccctgctccagatcttgttactttccttttggattactgggcgggacagccccctggttaatgtatcttactgacccttcagggccatttggattccagttatgggcctttaataaccaagagatctttttacaaaatgacaagaactcatctggcaaaatcaaacgtgctctcctttctgccaccctctagaaagcctgcaaggctgggagtccagggctcctgcatggtctcagtcaggcctcaccccctcactgggagtcaggattcccatccgtaaaattgctcagttaaacgacatgatcgtgaggttccttctacccttgaagtttgtgattttcactctttatgatttttctgtgcaaaatgccatgagatctatttcaatcagattttgtatttgtagcgcagaaggggacgtaaagtggaggagagctgtagcagaaatgaggcgggtgccatcacatggctgagttattccttcctccgtgagcctccgtttcctcatctgtgtgatggggatatagtaattcttatatagattgatgaggattaagtgagattttgtatattgatagaatttagcatagcactggccacagagtagatgtgtaataagtggtagttttcttcttttctgtgattctcatttttaagaagaatgacttacttgatttttttaaaataaaaattgtataggtatttatttttagaaactcaagcaatacaagaaaatacaaaaaaaaaaaatctaataaatacctccaagatcccaccattgagaaataatcagcgtcagcagtttgatgtccagcaacccagacatctctttctgcacgcctatacatgttaaaggctgattgggcatcagtggatagatctataggaagaaatggaattatactataatgctgtttttaagaaaaacaagatatgcacaatataattttatttgaatttaaccagaaaaaagagacactaaatgaatctaaaggaattattgaacttgagacatttttcttttcttttctctttttttgagactgagtctcactctgtcacccaggctggaatgcagtggcacaatcttggctcactacaacctctgctgcctgggttcaagtgatcctcctgcctcagcttctcgagtagctgggactataggcgcctgccaccactccaggctaatttttgtattttttggtagagacggggtttcgtcaggttgcccaggctggtcttgaactccagacctccagtgattcacccacctcggcctcccaaagtgctgggattacaggcatgagccaccaagcctggtcgagattttttttttttctccacgaaagatactcattccccagaagctctctccaaggttatgaaaaaaagattatgagtatgaagagattggagttgccattgctttttgttaatcctgtttccattgcagacagatactgatacatatgatccattgaaaaacgaaaggattagctttctttgtctctctcctgtcccctccctcacctgcagattgggttgtttgtattatttttattttgtcaaagctgacggtactgaccttctgttctgaaacctcagtgcttcccagcttagttctacatttaaacaggggtggtgcttcccccgtccttttccctctacttctgcattccagagttcattattgatggtggagttcctgggtgcttggccctaccttctcattccggcttcaccacagcaccgtggccccttgggaatgggcgcaggtggctttggagattaggaggagcactccgagggtgccagcacacaataccaaggcaaacactctggccttaaggatttgaaaattaaaccctggtcatcaaatgtttgttttcagcatttgctggtaaattctattgcccttttatattccgagactacaaaccaacgctatatttgatttcaaaatggattattgaagtttacctattttacctggtgacagatggatagaaaagcccatttgaaggacactttaaataaattttgaacaattaaaaaatgacctgcagcatttccctattgccctcaagtgacattctctgctgttttccccccccccttttttttttgagacaaagtctcactctgttgcccaggctggagtgcagtggtgtgatctccactcactgcaacctccgcctcctgggttcaaacacttctcatgcctcagcctcccaagtatctgggactacaggcaagcgtcaccacacccggctaatttttgtatttttagtagaaatggggtttcaccatgtaggccaggctggtctcaaactcctgggctcaagtgatccgcccgcctcagcctctcaaagtgctgggattagaggcatgagccaccgcagccagccatctgctgctttttaagcaccctcctatttcaagccactctgtcttgcgcttcttccaaacttctttcccactccagctgttctttccctctctcctctgcctgttcatgttttgaggctgctcctcctgcctcccctttgaggcctttcctggggcctccaggctgcagtccctgggatggatggcagcagtgcttgtcttcgccctgcacattgttacctgctcttggtctcctggaagccgttgcttctccccacactctgcttcccagcctgtcaccatctgggctcccttgctgcacccctctttgccgacaaaccaccaaggattgctgtcccttccttttctctgtgtcccacacctgtttccacaggggattctcatcatctctgagctgtttttgagcttttcatctgccccccaccccaattttctgcagagctgctgtattcaccttcacaaagcattgttttggttttatctctcctcattcaaaaccctccccagggctagtctgattgtctgtttttagcaacttcttatggaccttttcacgcatacacagaagtagggagaagagtataaggaactccatatactcatcacctgctccaaccatgatccactcctagccatcctgtttcatacataccccctcatctgaaatagaaggactctaaaaataatcacagtaccatagtcaaccctaaaaaagaaaaagaaaaggaattcctaatgtcatcagtgttcaaatttccagttgttttataaatggcataatttattttaaccctttgagtcaggatctaggatccaggatcctgcacgtagagatttattgggatgtcttttttgtcatttttgaatggtaagtttcctctctctttctttttcccttgcaatttacttgttcaaggtaaaggctttacttagcctggtgtttaaagctgtgccttctccctccagcctctgtctgcctctgtgtaccgcatacatcctatggccagccgcttctctaatcgccctgagctcttcttgctccttgcctctgacaccgagagctctagaagtgggaggcagcactcatgtgtctgcaggggggagaggggaggggccagaacaggataggaggtgtgggggtgtacagggtgggagtatgtcagggggtcttgcttccccaagtagctcccttctagagagcaaggagcaaatcttacatttctttgtctcttctctgcaaagcttagcacaagacactcgacatcctgggtacttggtaaatgtggatggttggcgtgttccttctcgctggattgggagttagctggaaaaaatgtaggctcttttgagacaaaagagcattcgcaggcaagaacaaagagtctagaaaactgtaggacaagggttgggggcacctggggtggggaagaaaagagctcatttacatcaaagaaaataagaccgaatcaagtgggcgctagagagcacggggagggctgccgaggctgagcctgggctgggagcccagggttggacatggtcattcctttcccggaatgctacttaaaggatcaggcaaccggatccaacatcaggtggctgcagacagcagttcctacatgaccgccggagtcactcccggagttcagccagaaagggccttgttttccagggctggctttagagtggctcaggttggaagtaagaagcgagatttttgtgtgaaggtgtgccactctgaagtctgtgagcacatgtgcacaggt

SEQ ID NO: 7008 - DNA, 6000 bp, Homo sapiens
ttttattttattttattttattttattttattttattttatgatggactctcactctgtcacccaggctggaaggcagtggcgcgatcttggctcactgcaacctccgcctcccaggttcaagcaattctcccgcctcagcctcccaagtagctgggattactggcacccgccatcatgttggctaatttttgtatttttgtagaaatggagtttcaccatattggccaggctggtctcaaactcctgacctcaggtgatccacccttcttggcctcccaaagtgctgggattacaggcgtgagccacctcgcccggcctctctctgcctttctgttttgagcacgcatgttctctctctctcttttctgagcacgcatgttctctctctttacctctgtctctctttgttctctctctctctctttctttcttttgagcatgcatgctctctctgtctctattttgagcacacatgttctttctctttacctctctctctctcttcatacacatgtattttttgagcacacgtgttttctttctctctctgtctctattttgagcatgcatgttccactttttttttttttttttttttttgagatggagtgtcgctctgtcacccaggctggagtgcagtggtgcgatattgtcttactgcaaccttcacctcccaggttcaagcgattctcctgcctcagcctccctagtagctgggattacagggattacaggcatcggccaccacacctggctaattttttttgtatttttagtagagatggggtttcaccatgttggccaggctggtctggaactcctgacctcaagtgatccacctgcctcagcctcccaaagttctgggtttacaggagtgagccaccctgcccagccgctatctctctctctattttgagcacacatgttctttccatctctctctctatatatatttttgggcacacgtgttctctgtgtgtgtgtgtgtctattttcagcatgcatgttctctgtctctatctccatctctattttgagcacacatgttctctctctctctttctgatttcaacacgcatattctccatctctatgtgaacatgcatgttttctctttatctctactaatcatctttctctctctctctctctcactccatcctccaagccactctcaggcactcaggcatgtggtaaacatccccacccgtctccatgtcacagtggacagtggggacccctctaacgggcccctctgccccaatacagaatgcagcttctcttctggagtcttcctgctttcccaggctctccccaggaagcaaaacgcagaacccctctgctcttggaccccacaaacccacatggggtcccctccttggatgaggggaggggctgcaggcctgggtctcccttccttggggacctggaacagcttctccctgtcccttcttgttctccttcctctcaaagtcgggaaaatcttttccagtctcgtttagtgtctgaaatctttttttttttttgagacagagtatcactctgttgcccaggctggagtgcagctcactgcaacctccacctatggggttcaagtgattcttctgcctcagcctcccaagtagctgggattacaggcacgcactaccacacccggctaacttttgtatttttagtagagacaaggcttcaccatgttggccaggctggttattgtctcaaatctagggtcctaacctgagttttctgaaaactcaaaaactagaagaattttcattttctctttctgctttctcatccatttgctgaggtaacaaaatttagggctgacttgcttgaatgggagaaggactgttggggaaaaggaaactctggagtggaaaaaacatgtaaatatttgaacataggatcccatcatacatacaggcacagggagaagaaaccattggcggaagtaggacagaatgttaacggggtgctgttttcaaacggtggacccatgaatgaactttttaaaaaaattttatttatttattttttattttttttatttttatttttgagttggagtgttgatctgtctcccaggctggagtgcaatggcgtgatcttggctcactgcaacctctgcctcccgagttcaagcaattctcctgcctcagcctcctgtgtagctgggattacaggcatgtgccactacgccctgctaatgtttgtatttttagtagagacagggtttcaccatgttggccaggctggtcttgaactcctgacctcaagtgattcacccacctcagcctcccaaagtgctgagattacaggatgagcccctgcacccagctgattattattaatatttttgagatagtgtcttgctctttagcccaggctggagtgcagtggtgcagtcacagctaactgcagcctccagctcctaggctcaagtgatcctcccacctcagcctcctgagtagctgggactacaggtgtgagccaccacacctgtccagatattttcttatttaaatttttctgaattttacaaagtttctagaatgtatattgcttttatcattacacacacacacacacacacacacaatttattccagttcatttgcagtttgtattttatgcaagtcaaattttttgcatgagaaatgcctgaatccaagcatagtaaacacaatgtacatttcaaaacaatgcagagtgtacaaaatatagagcagaaaggagggttcattcacacactcaatagcttgggttaggttctacaatggcaaacaatcacttttgttataaagttaggagtactgggccaatttaggggtgttggaacagctaagcatgaaagagcaaccaagtaaactaaagacttcataatgtacatatttctttgtttttgttttgttttgtcttgttttttatttatttatttattttgagacaaagtctcactctgttgcccaggctggagtgcaatggcacgatcatggctcacggcagcctccacctcctgggttcaagcaattctcctgcctcagtctcccaagtagctggaattacaggcatgcgccatcacgcccggctaattttggtatttttagtagagacagggtttcaccatgttggccaggctggtctcaaactgctgacctcaggtgatccacccacctcgacctcccaaagtgctgagattacatgcatgagccaccgcgcccagcctgttttgttttttagagacagggtctcactctgttgcccaggctggagagcagtggtgctacctgcagcctggatctcctggaatcaagggatcctcctacctcagcctcccaagtagctggggctactagtgcacaccagcgtgcctggcttattttttattttttgtagagactgaggtcttgctatgttgcccaggctgctcttgaacttctgaacctggtatggcttagtgtgaaataactttcacaaaaatcccaacctgtttcaacccagcctaagacagtggtgtagttccttcagatggtcagctaggaggtccaagcaggataaggacaaggaaggggctgacagagtggaagagagactgagggatgaaggtaccgtgtaggtcagggcacagggataaggagaatgaaagggtgaaaccgttgcatggagaggaggctgcaatcagagaaagggacattggaactaaagtggttctgagtgtgacaagggcccagtgcagttgtggcgtgggggataaggtctccaaagaggtacacccactgagaggctgcaatgctggctaagctgtaccttggacattgaagacaccaaggagagtggcaggatttgtgatggagatgaaggctaggggccaagctaccaagttttcagtaactgtgaggggatgaccaggagggccaaggatgacaaagaggacggggagaaggtggcagagctgggctgcatgaccctcaaatcagcagggatttttttttttttatttttacacaaggatgaaggagacatgaatgagttgaaacttgcaaacagggtggaccttaccttcaaggaccctggcagaccctctctgaacaaaactggagacatctaccaggagcaagggtggtcacggccattagaaggtgcccttccatgcggagttgtcttacatctaaggcataggaatctctaagctctacgaagacagggacctcatcatcttgttcatcaggcaggcatgtcatagcttataataaatgcatatttattggctgggcgcggtggcttatgcctgtaatcccagcactttgggaggacgaggtgagcggatcaactgaggtcaggagtttgagaccagcctggccaaagtggtgaagccccatctctactaaaaatacagaaattagctgggcatgttggcccacatttttaatcccagctactcgggaggaggattgcttggacccaggatgcaaaggttgcagttagccaagatagtgccattgcactccagcctgggtgacaagatcgactctgtctcaaaaaataaatacatgcatatttatttatttattttatttttggagagtgtgtctctctctgtcgcccaggctggagtgcaatggcacagttatagctcactgcagccttgacttcctggctcaagcaatcctcccacctcagcctcgcgagtagctggaactacaggtggacatcaccacacctggccatttttttttgtagagatggggtctcactatgttgctggtctccaactcctggtttcaagtgatcctccctcctaggcctcccaaagtgctgggattacagaggtgagccacttacctgacccataataaatatttattgaacgaacgactgaattcaccaattaatcgctatttcctgatagcccaccgggatccgctggtgcaatgataaagagcgcaggctttgagatcaggcggatctgtattgggactgcggctctcagcctccgcttgtacctgctgtgcagtgaggactccaggaactgatgatgaaccggcacggtcctcggcacgtggcaagttctccataagtgggctcagtaaaatccctctcccgggaaagcgccccaccgtgtttggtggggtgactgggacgcgaggatgcggctgggagtgtgatgagaagggcggggatcggcgaggactccaggctggggttgcaggcccagccaggggcggagccttctccgggtcgggcggggacagagcgctcccttggaggcacccagggacctggccagccgtgcagctgcccaggcgctatggcgagtgcggtcagggggtcgaggccgtggccccggctggggctccagctccagttcgcggcgctgctgctcgggacgctgagtccacaggtgagagccagggaccgacgccaagtccccaaagtctggtcgcggggcgcagggggcggcgtcgcacttggggcgagggcgcggcggggccacgggggcacctctccctccctcacgcctgggtggtcccaactcggccccaacggagtaaaagcctcctgggtttggggagccgccagttgcccccaacaaatacctagctggggagatctgccagcgtggaaaggcaagagtagacagagcaccccgcctcttcagcagggagaggtgtagtctggggtaggggggcacctgggcacgaaagccaggcctcttaaaacttctgggaatcctggcttcctttgaaaatatgattgacttcagggccctctgctgagaaatgagcctgcacgcccagttttgcaatttcagaggctttacaatacggtccccttacccatggctgcaccccaggttcagaacctatgggataaatgagctgggagtgtcagtatctgctcccacggtgccaggaatagcagagtcttacagaaatgcagccaggaggcaaaagtcgcctggcctaagaatccaggtgtcccgcctagaaccccc

SEQ ID NO: 7009 - DNA, 6000 bp, Homo sapiens
ttgaggccaggagttcaagactagtctgggcaacacagtgagacaccgtctccacacacacaaaaaaattttgagacggagtctcgttctgtcgcccaggctggagtgcagtggtgcgatctcagctcactgcaacctccgcctcccaggttcaagtgattctcctgccacagcctccctcccgagtagctcggactacaggcacgtgccaccatgcccggctaattttttgtatttttagtacagacagggtttcaccgtgttggccaggatggtcttgatatcctcagctcatgatctgtgctgggattacaggcgtaagccaccgtgcctggccacaaaaaaatttttttaaagactaaacactccaatcgtatgcccacatccagcacccacatctagaaaaaaaaataaaagcccccccgtcctgcttctctaccccagagaaaccacacatgagcaatgcacaccctgtctctttattaaagcactttcattcctggtggtatccttgctggctgaggctggagggtcctgtgatgaatccagaacactttgaaggcttcgggatgatgctgctcatgaccaggaggtccccacaaacggaagtggttaacgagtggcaaaagagtagttttgaggcatgttctagggacaaaaagggggaggcatgagaagccaagagcatcaaagaggggtgggctcatcttccaaactgactgttaggaagagctccataaaagagacagagccttttcactctttagacccaaggctcatgtcttttttatttttctcgagacaggtctccctctgtcagccaggctagagtgcagtggtgtaatcatatcttcctgcagcctcaacctgggctccaatgatcctcccacctcagcctcccgagtagctgggaccacagctgtgcaccaccatacccggctaattttttaaacctcttgatagcaggaactctgtttcgttcactgcaacaccccagcccctcgagcagtgctggcacatagtaagtgcttaatttttatttatttaattttttggagacagagtctcgatctgtggcccaggctggagtgcagtggtgcaatctcagctcactgcaacctccacctcccgggttcaatcaagtctctgcctcagcttctcaagtagctgggattacaggtgcgtgacacaatgcctggcttttttttttttttttttttttgagaaagagtcttgctctgcagcccaggctggagtgcagtggtgtgatctcggctcactgcaacctccaactcctgggttcaagcgattctcctgcctcagcctcctgagtagctgggattagaggtgcataccaccaacccagctaatttttgtatttttagtagagacagggtttccccatgttggccaggctggtctcaaactcctgacctcaggtgatctgcccgcctgggcctcccaaagtgctgagattacaggtgtgagccaccgcgcctgacctaacgtttgtatttttagttaagacaaggtttcactatgttggccaggctgatcttgaactcctgacctcatgatccacccgccttggcctcccaaagtgctgggattacaggtatgagccaccgcacccagctcctcctactatttctttctttcttttcttttttttaaatttttctttttgagacagggtcttgcactgtcactcaggctggaatgcggtggcatgaacatggttcactgcagcctcaacctcctaggctcaagtgatcctctggcctccgcctctcaagtagctgagaccacaggttcgtgccaccacacctggctaatttttttaactttttatagagatggggtctctctatgttgcccaggctattcttgaactcctgggctcaagcgatcctcccacctcccaagtaactgggatcacaggcacatgccatcatgcctggggtatcaccatgttgcccaggctggtctcaaactcctggacgcaagcgatcctcctgcttcagcttcccaaagtgctgggattacaggcataagcgaccacacccagccaggaaagtgtgtaaggctctaaacaaggcacataaagtctcttgagtcccctcttaccttgcctgtagactccagctgctaaactgcttctccctgccctaaatacacacagatgctcacactggctctgcgaagactgctctttgcctttgttcatgcaaccccaactgcttgaaagactcctactaacctcttttttttttaacctggaaaattatttctttttttttttgagatggtctcactgtcgcccaggctggagtgcagtggtatgatctcagctcactgcaacctctgtcaccatgttgaccaggctggtctcaaactcctgccctgaagtgatcagcccacctcagcctcccaaaaatgctgggattacaggtgtgagccactgcacctggtggaaaattatttctttaggtgctacctccttcaagaagctccaaagcctgtaatcccaacactatgggaggccaaggagggcggatcatgaggtcaggagatcaagaccatcctggctaacacggtgaaaccccgtctctactaaaaatacaaaaaaattagtcgggtgtggtggcgggtgcctgtagtcccagctacttgggaggctgaggcaggagaatggcgtgaacccaggaggtggagcttgcagtgagctgagatcacaccactgcactccagcctgggcaacagagcaagactccgtctcaaaaaaaaaaagaagaagctccatggctcctgtccttcctgtccaattgaagctgggataagagtactatcccactgtgtccatttctattatggaaacttatccagactgtattataattggccatttccttgtctgtccccacactgaactgtgaactcttcaagggctgagactgtaccattcatttcagtgtcccaagctcctaagacagggaccaacatatagtgcaaactcaaaaggtttggttaatatcgaatagccttggcagccatggaccctgcatgtaccttttcaccaggagttggcaggaggtatgccttgctgcaggtacggtttctgtccgagcaggagatggtggaagagaggggagagggctgagaattcagaatttgaggatcagggcagaatagaatggaagtgcacggttcaaaaattcccccaccctgctgggatattgtgaaaccctcactctctcccctccaggttcctcacctctctcccaggacaaagagcatctcccttgaagcctcactcaccaggtgtctgtgcctcaggtcttggtgaagaatgctggaagtagaggacctagtcagagaaaggactatccccgtggccagaagagatgcggccagggcagacggggctaaggggattctcggccagcagtgaggagtgggtactgggttagcgggtgagaggggcatttcacaggtcctagggctggctgtgagatggatgagatgggcacagactcctggagagttcagctaggggtgggaggggtcagggactgtaaccaggcatagtgggggcagcggttctctagacacggtggtcctgaggcagggggttaccgcgtttggatatctgagtcgcttggtcttgtgactgcttttttttgatgggcacagggttcaagtggcagcaagcagtgcacaaagcctcctccatgagttctgcactgatctgggacaggtattcctcagaacgagataacgaagcctgggaaaggaaaagccggaggggttcagcctgggagctcccacatgggagtgctggctgtgggagttcccaggctggggcctgtgggtccaaggagcttgctcctgaaggactgggccttgagatttagctagaaagctctggacctgggggaggggggtttggtgggggtttagagtcagggcctagtgctgagagctatgagtcggggcttcaggactcagggttgaggctagagtctcagggcccgtggctcagacctggcacggggtgcctctgcctgggaggctttcacttcattacattcccacctctagggttccctgcagtgctcaccggacctcctctcaaggagggtgcagcttgagatggccagctgctcttcttctccccctcattccccatcggagtggacgccatccccctgggaacagtcgaagcctgagttgacctgagaaaccagcccgctttcccccagaacccagtccaccaccattccccgggcccaggtttaaacaaggcctttagaggaaacatcccgctgcctcattccctctcacaagaaaaaataataataataataaaggttgctttatatcttcgggagtgagagggaactcccgcaaccccctacccctcaccccttcgcctggtgggcctctccttccttcttccctcccaagcaccttcccaagccgaggcagccgacttgacgccccagacctggcagatgggtggaaaccttgggctactcggcaaaaggagagacgtggaggcctaaggacctctggtataggtcgtgggggatggagaatgggagatggggaggaaggctggaaaagggggagccggctccgtgtcgctaccggacgctataaaacccttggagtctgcagaggttccgcagcctcgttgctaggagatcaggggttctagaactaaagacagaggaatttcctagcgcgccccgtttgctcctccagcctcccctccgtacccctccaggtgcctccttgagggcagtgaccccaagcgccagacgcttgagaagcttgggaggatgacgtagggtggagcctgcgacctaatcctcccatcacaaggggcacgcgaaaagcaacccatctgcagggcgctctggagcctctctagccgcctagagcctgcgagagcaaaggcggctggagacttagggggcggggagtaaagtgaggactgcaccaaatctcctggcctcttggggacgcaaagactcaggaggaggaattttatcgccttatctttgcctccaggaagtcataccctccacaaaaggaaagcagagatttttattcggtcttctcttttaccctttccttttccgtttctaactttgcttgacgttaatggttccttcctccctctcctcctctgcgctttggtacgagccaagggagaggggcggagggaggaaaagggaaaggaagccgacaggccttaaaggggccgcaactatttttttaagccactttttcctctctccaattttgcaacgacgggcgcggaggaggaggttcccggaagccacgcgcagctggagcagcggcgaccgcagctggaggcccggagcgcctgcggggctggcagaggcgagggaggttgcgggtaggaagggcggactgcgcgcgccccctgcgtcccgcgcacctcggggccggtccatgctcccgacggctgcgggcttcagcatctggggccaggttggggcggcggggtccagggcgcaggtggtgcggccgatgcgccgggccggaggctgaggccgcgctgcggggctgggacagcactggcatctccagagcaggcccggggcagcaagggaggcgccgcgatgccagacgaaaatatcttcctgttcgtgcccaacctcatcggtgagtgctgcccacggccccgggccgaacgagagggcgaggggccttggcgggctccctgatcctgccctgtctccccgcgtcccgttccaaggttatgcccggattgtcttcgccatcatttctttctacttcatgccctgctgccccctcacggcctcctccttctacctgctcagcggcctgctggacgctttcgatggacacgctgctcgcgctcttaatcaaggtgacagacacccctctcagccagccttggggttcaacaatcccctcctcccttcccctgcctcctcgggacct

SEQ ID NO: 7010 - DNA, 6000 bp, Homo sapiens
aaagccggcattgccgaaggtgttggcactcataaagcttcgaagccccctcagtgcccgataggcccccgggcaccggcggcagttgctgggttggcaccggcctgcttggtacagcaggagctggtagcacccgggggccagaggtggggaccagccccgaggcggaggggtagtccctgagaagtcccagctcacagccccgaagtcccgcaaaatggcagggaagctgctctccaggagctccacgtcgtgccgctgggcgtcccgcggcacaaagggggctgaaggcaggtctggtaggaaaagcaggcctgggcgctgaatacctaggacccctggccctctcccagggcctgggccaccctgagctgcccgcctcactctacccatcccagcccaggagtagcgccttgcgtaggcccgaagccgccggctcactaggccttccgtcctaggtccttccccgggatccccaggaccccctgggcttggcccgccggcctccgagcatcccacaggcccaccacgaacacccccagctcggctcccagcccctagggcctgcatgtcttgggagcccaggcggtagcagtaccagaggaacagggaagtgagggccccgaagagcaaggtgagggccgaggaggccaggggtagtggccacgggagcatgatcagggaggccctggccaagaggcctggggcgtcctccggaccccagttcccctgtccccccagctccccacctgtcccttccatggctgccccctggctccccgctggactgtttcccttccacattccactctgggctgtctctctctccttccgcggtcctctctccacgctgaagctccctctcccctccttcatgcacctccaaccctcctctctcctttctctcccctttctctctccttctacctcttcttcctcctctccctctgtcgcctcctcaccctcttctttctccttccagcagcctcctctctctcgctctgcttctctctcccacctcaatctccccctttcctccccacccccgcttttcgctcgctctctctccccgcttcctcctagctcccctgggcagcggttcctaccctgcctggacctgcagtcccgggaacccgcagcctgtcttcctccgcggcagcttctttctctccggcctcactgctctctccttgccctcgctcctcactagccccgaccctgcggtcctgcctggctctcgctccctctctcctactcgctccttcctgggctcccactcaccctgacgtcactccttcccggagccctctcagctcagccacccccgaaccctcccagtggcacagcaaatcagccgggtgccgggggaggggggagagttgtcgctggaggtgcctccccaccccccccgcccggaaagggcgccacgtggggcgcaggggccacggtgccagcctccagccgtcccgcaatgcgaaagaaggggcgggtcgtatcgggcggggcctgaggggcggggcctgaggggcggggcgagcgcggactgacggctgggcaggcgcccgggactgcgggcaaggatgctgaggccagtccgtcgggcggctggtccgtcggtcggtcggcctgtgactcccgctggccctaggcagcccgggagcccgcgagcctggcaaacaccgaaagcggcctcagccaatcgcgggcggcgtcgggccgggcccgccccggcggggcgaggggagctgtccgcgcgccgctggtgctgaaaagggcgctccggagggaaaatcagagccgaggccgcctgttagctggccggggtcagggtttatggaagaggaggggtctgtctctcctccccaaaccccggcccgtcacccacgagacttgtcacaatcgtggaagctctctattcccctggaggagggagagcccattccacccgagctactgtaaaaggggaagggaagccccttgggaggtctgaatgtgaacagggggcataattgggggcctagcaggcgcgaaccaagctatgcagcccctcggcaccctgggaagaggagattcagattccagatgtgctggaatggcaggcggagggggctaattactgctgggaccagagagtttcctttgcctcccctaggggccgcgggagtgaggattacggccctggctcgtatgatccctccctcctccatctgcacttcctcctcctccctccccgtcaaataaatcccaggcccctccctccgcccgtccccaggatctgacgtgggctcgatacctttctcagcttctccctcccgcagctccagtgcccgagcttcggctctcccagttccccaacccaccccttcccctccccgacaagccccgctagagcccagtggagaccccctcgatcctcgaccccaccctaaacccccagaagctgtctttctcctccccagtcccctagcttggggtccagacagcccagtggacccaggcgcctgagcaggagggtaacccaggccacccggccccttcggccctctcggccccaccccctgcagccggagccgcgccccctccaccacagagccgcgagaagaggacagaggagactgagcaaaggggggtgggctccaggcgacccctagcccaattctgcccctccatcccaaggggcagagaaattgtctttctttgctgactcctacgaggaaaaaaaaaaaaaaaaaaaaaacaattaaagggaaagataaacggagacggaggaaaggtggcagccagattacttagagaggcacagaggagagagatcggggtgagtcgccatggggactcccagggcccagcacccgccgcctccccagctgctgttcctaattctgctgagctgtccctggatccagggtaaggacatgagactgtgggggtgggccccaggaaggcgtccagcggggtcctccaccctcctttctcttaatatcctgggtcttccgagcacatgggggaggggagaggcacagctgatggggaaggggcaagccagagctttcaggcttgaacccgaagccccttaaccctcaatattgagaaggcagagaaatgaatgagagaagcttttagcagtgtctcaggggctagatccaagaaggagggctgggaaagttggggggatgtctgcggaggcggcagaagcatggagggacctgggtgggagatggaggtgctgagagagatgccaggcgctgtacacacaactgttcttggatgaatggacaaagacagatgagcagaggcagggctcaaagaccagattttcagtcccccactctgacccccagccagactccagggaaggaggcagagactgcagaggaccagagagagagagggtgggggggagagagagagagagagagagagaaaagacagccacactgcagagacagaaacccagagagaaagccaggcactgcggaagcaagggctgggaggtgcggccagatcctctgcagagccccagggttggggggagatcaccactgaggtgaaagggaaggcagcaccggcgacccctctgccttgctggcgctgtccagggtccataagagctaaggtgttcaatgaaggcccacacagcccagggagaagggagaggggaggggagagaagaggtgtgggagtgggagtatgagggcagctgggagcccctcctccgatcttggccctcagtcgagcctgggaccatctgagcccctgcaggcccagctgatggaggagggaggaagagttctagaaaatatctctctggagaaggaaggggtgtggggaagtggagaagctcacacaacttcacctcctaggtctgcccctgaaggaggaggagatattgccagagcctggaagtgagacccccacggtggcctctgaggccctggctgaactgcttcatggggccctgctgaggaggggcccagagatgggctacctgccaggtgaggcccccagagtggcaggagtggcctagaggcagagggagggatatgggctcagggagatggggagccaggctagagaagagcaggcagagagagactgcagaggaaagagcctgcattcctgtgagattcagggaacacagaacgagactgtcagagaaagtcaaacctgggcacagacagaaccagagagacagagacagaatgattaggtgacagtcagacagaaaaacagacacatagaaacagagatggaaattcagagaaccagactcagagaaatggtggaagacagagacagagagaatgaaacacaaaaactagtggatctcgaatcatgaaatcagagtgcaatcagaatactaaacagggaaatggggaaataaagagttcgagagagaatgagacagaggagagaggagataaccagagagagaacgtgatctgagtgaggaggcagagagagaggctcagggagaggagtatcagggtggaaggggctgggtggagagaagggaccagaagagaaagaggggggactcaggctgtggaagccttgggaggaggtaggggctggggtggggaagggaaaggtggggggtgctgtaccttgtgcgggaggcttttgtggtatggcaggggaacccctagcttccctcagccctgctccccacccaaggtcctccatgtgctcctcctgtgctctgatattccctgcactgtcccaggatctgatcgggaccccacgctagccacccctccggccggccagactctcgcagtgccctccctgccacgggccactgagccggggacagggcctctgacaacagccgtcacccctaacggggtcaggggggcaggccccactgcgccagaactgctgaccccgcccccaggaaccacagccccacccccacccagccctgcctccccagggcctccccttgggcctgagggaggagaggaggagacgacgaccaccatcatcaccacgacaactgttaccactacggtgaccagcccaggtgaggcgacagcaaggggatgggggtgggaggaccggagaggtacacgctggggatggatgggagagaggctgctgggaactgtggaaggagtcctgggtacagatgggagaataataataacaaaggtagcatttctgtacccttactatgtaccaggcagtgttccaattgtttcagctatataacagttgggaaagggagttctggctcaggtgggagagggagcattgcttaaagatagtgatggacatggtggctctagcctgtaatcccagcactttgggaggccaggcgggcagatcacctgaggtcgggagttcgagaccagcctgagcaacatggagaaaccctgtctctactaaaaatacaaaattagccaggcgtggtggcgcatgcctgtaatcccagctactcagaaggctgaggcaggagaattgcttgaacccgggaggtggaggttgtggtgagctgagatccagccattgcactctagcctaggcaacaagagcaaaactccatcttaaaaaaataaaaataaaaaaataaaagatggtgaggggggcacagcagcgcacagctgtaatcccagtgatttgggaggccaaggcaggaggatcgcttgaggccaggagtttgagtccagcctgggaaatgtggcaagaccccatttctacaaaaagttttaaaaattgtctcaccatggtgatgtgcacctgtgggcccagctactcgggaggctgaggagggaggatcacttgagcccaggaatttgagactgcagtgagccatgattgcaccactgcactccagcctgggtgacagagcgagaccctgtctcaaacaaaacaaaaagatgatgagaagtgctaaggagaagggagatgaaggccagagttgcttggctgggagggcaaaagcacaggcattccttccatcccagccatttgtatctcctcagttctgtgtaataa

SEQ ID NO: 7011 - DNA, 6000 bp, Homo sapiens
ttcgtcctgcttcctttcttattctggagagccacgaaggaaacctaacggttgcctttactttagaaatattggccgggtgcagtggctcatgcctgtaatcccagcactttgggaggccaaggcaggcagatcacttgaggtcaggagttcgagaccagcctggccaacatggtgaaaccctatctccactaaaaatacaacaattagccaggcatggtggtgtgcacctgtaatcccagctacttgggaggctgaggcttgaacctgggaggtggaggttgcagtgagccaagatcgtgccactgcattccagcctgggcaacagagcgagactctgtctaaaaaaaaaaaaaaaaaaaaaaatatatatatatatatatatatatatatatatatattattgtgctgggcatggtctttggctcacacctgtaatcccagcactttgggaggccaaggtaggaggatggcttgaggccaggagtttgaaaccagcctgggcaccatagtaagacccatctctacaaaacaaacaaacaaacaaaaacagattagccaggcatggtggtgcatacctatagtcccagctacatgggaggctaaagtgggaggatcgcctgagcccaagagttcgaggatgtcgtgagctatgatcttgccactgcactccagcctaggcaacacagtgagaccctgtctcaaaaaaaaaaaaaaaaagaaaaaggaaggaaagaaggaaggaagaaaggaaggaaggaaggaaggaaagaagaaaagaaagaaaaagacaagaccaaaatttggccaggcacagtggctcatgcctgtaatctcagcactttgggaggccgaggcaggcggatcacctgaggtcaggagttcaagatcagcctggccaacatggtgaaaacccatctctacaaaaatacaaaaaaattagccgagcatgatggcgggtgcctgtaatcccagctactcaggagtgtgacgcgggagaatcacttgaacccgagaggcggaggttgcggtgagccgcgatcgagcaattgcactctagcctgggtgacagagcgagactccatctcaaaaacaaacaaacaaacaaacaaacaaagaaataccaaaatttattattttaatgtattctttggaacaggtaacctatgcatgtggcacaaaattcaaaaaatacaaaaggatgtacgttgaaaagtaagtctttcctcttcctgccctgtctccccagaggtcaccatagttatattttcttctgtgtatttattatttttttattattatttttattttttcactctctcagcttgtcaagagacacagttaccattcttgtgcaggcctccagaaacaacatatgaacaactaagcaaacacggctaagctctttccctctcaaatggcagtattccaagcatgcttctctgcacttgcttttcttttttgatttttttttcttttttctttttcttctgagatggagtcttgttctgttgcccaggctggagtgcagtggcatgatctcggctcactgcaacctccgcctcccaggttcaagcaattctcctgcctcagcctcccaagattacaggtgcccgccaacatgcccagctaatttttgtaattttaatagagacagcgtttcagcatgttggctaggctgatcttgaactcctgacctcgtgatcctcccgcctcggcctcccaaattgcggggattacaggtgtaagccaccatgcccagcctgcactttgctttttttttctttgagatggagtctcgttctgtcgcccaggctggagtgcagtggcgcaatctcggctcactgcaagctctacctcctgggttcatgccattctcctgcctcagcctcccaagcagctgggactacagttgcccgcctccacgcccagctaattttttgtatttttagtagagatggggtttcaccgtgttagacaagatggtctcgatctcctgacctcgtgatccacccgccttggcctcccaaaatgctgggattacaggcgtgagccatggcgcctggcctgcacttggcttttctaagttaaaatgaaactgtgaaatgattctagggccaggcacagtggcgcacgcctgtaatcccaggactttgggaggccgaagcgggaggattgcttgagtccaggaatttgagaccagcttgggcaaagtagtgagaccttgtatatttaaaaaaaaaaaaaaagatgattctaaacaagagcaaaacagcctcttgtggctgcaccctatttcactgcatggaattacatcatgactgatttaactggtcccctgcttctgggtatctcagttgtttccagtcttttggaacgtgctacatttaagaattttgaacttcatggccaggcgcggtggctcacagctgtaatcccagcactttgggagaccgaagcaggcggatcatgaggtcaggagttcaagaccagcggggctaagatggtgaaacaccgtctctactaaaaatacaaaaacttagccaagtgtggggcgtgcgcccctgtaatcccagctacttgggaggctgaggcaggagaattgcttgaacccaggaggcagaggttgcggtgagccaagatcgcaccattgcactccagcctgggcaacaagagtgaaagtctgtctcaaaaaaaaaaaaagaaaaaaagaatttgaacttctattatttggcttatgggttggcatatctgtaagataaaatcctaaaagtggaatttctgggtctaaggattttttttttttttttttttttttgagacagggtctcactctgttacccaggctggagtgcagtggagtgattatagcttactgcagccttgaccttctgggctcaagagatcctcccaccatcacgaggtcaggagatcgagaccatcttggctaagaaggtgaaaccccatctctattaaaaatacaaaaaaattagtcaggcgtggaggcgggcacctgtagtcccagctacccgggaggctgaggcaggagaatggcatgaacctgggaggtggagcttgcagtgagccgagatcacgccactgcactccagcctgggcgacagagcgagactccatctcaaaaaaaaaaaaaagaaaagaaaaaaaaagaagagagatcctcccacctcagcctcttgagtagctgggaccacaggcacacaccactatgcctggattttttttttttttttttttttttttttgtagagacagggcctcaccatgttgcccaggctggtcttgaacttctgagctcaagggatcagtccgtctcagcttccccccagcccagacactttggctttgcccattttatgggtaataagtgatatctcagggttttttgtttgtttgtttgtttgtttgttttgagactgagttttgctcttacagcccaggctggagtgcagtggcacgatctcagctcactgcaacctccgcctcccgggttcaagcgatcctcctgcctcagcctcccaagacacataccaccacgcccggcatttttagcagagatggggtttcaccatgttggccaggctagtctcaaactcctgacctcaggtgatccacccacctcggcctcccaaagcgctgggattacaggcgtgagccactgcgccccgccccctcagtgttgttgactttacatttctcttacttttttttttttttttttttaagagactgtgtctcactgtgttgcccaggctggcttcactcaagcgatcctctcgccgcagtccctggagtagctaggattacaggcacccgccaccactctcggccccatttctcttatttaaaaaaaaaaaaattgccgtgaaatacgcatatcgaaatgtaccatcttcaccatttttaagggtaagattaggtggtgttaggtatgttcagttgtcgtgcaaccagattgctgttttaaataacagcacttagagatgccgacttcgtgccaggcccagtttgggacattagggactcccagatgaatcagccgctccagtggaactccctgctggtgggggaggcactggcgaagcggtgctgagccgagtcctgacggcgctggagctgaggggcagtgcgggatgccccaggaaggctcctaggaagaggggacccacggtgacttcctaaggaagcgcggttcccaggtagaggagcgcatgtgagccaagatccctaggcctgagccgtctaggtgtgtcccaggaactgcaggaaacggttgggtgagtcagtggtgggcagcgagggtgataagccccttcgtgtcttcgggatggtaagtttggggcacaggtgagtgaagaccgaaggccaggggtggactgacactccgtggcaggcgcagggccgggcaggggggcggcttgggggtggcaaggtttgggtgagaaatggcagcccatggggaactaccgcagggctctgagaccttcagagccaagccccgacgccccttcccacctgcggggcagaactggggatggcaggggggagggtggttcccaaaggagataccatccctggtaaggggacatgggcccctgggagttgggttgggccacaaggagagaggcctgaacggccaaagggagggggcgtgggggaagccgcagcatcagacctctgcctcctccctcagatcgtgaggctccccagcctggctcgggagaccccgagatccccggccggtgacagcaggcgaccccctgctcctgtcaacctgtgggtccctacggacgtggggaagggaggagggaggccccagctccctgcgggggaggggcgtgaagacgcgcgggggtggggggagatgagccggcgtcgccatgacaacgaggccggtggtccggccttggggacccgggagggagggaggcgccgtggccgcgcgcgcgggcgggggcggggggccaggtctcccaggagtagttggggaacacccggcgattctggcggctgcttcctggtggcgcagggagcccgcgtgtttgcgagtgcgtgtgtgtgcgaagttctccgggtaagtgtgccagcgcgcgcctgggtgtgtgcaagggtgtgagcgtgcacacgtgggcacgggcgtgtgcgcgcgggggtgcccggttggatgtgtgcacacgagtgtgtgccggtccgcgtgcccctgcgtgagtgtgcgcgcgcgagcacacgtgtgtgtgcgcgctcgcgtgcgctcccgagcgggccccgggtgggagtccgagatcccgccccctccccagccccagcgcccctccccgtcccccgccgccgcgccggctgcatcctcgcctccacctcgctcaccccctcctccccgcactttctcggcgctccctccctctcggctcgcacagctcgactccgcgctctcctcgccggccgccgccgcccagcctgcgcccgccgtccccccagtgcctgggcacctgttggaggcagaggcaggtgcagggggctgggcaggccgggggcgtgagggtgcggggaagcgtgccagcctgtgtgcgctacgggggtgttcggctctcctgcggctgcaatttctggctcccctgaggagccagaggtggcatctgaggctggggtctccaccgtgggctgtggtgagcgagcgggggaaccaggcaggcagacaggtcctggggctgaatgaggggacagtgggcagttggagcctagaggggtgggtgacaccctgactagaccagcgcctggtgcagaggaggacagagcctccgagaaacagaggcggggccctgcagggccccttgggggacaggcaggctcaggagcagaggggagccccggaggagaggaaggagctggcaagatgatacagggacaacctagaagtgggtgggtgaggacggggtggtgcaacctcgacttctgcaaggagtgggttggcagcccagcccctgt

SEQ ID NO: 7012 - DNA, 6000 bp, Homo sapiens
cactccagcctgggcaacaagagtaagactgcatctcaaaaaaaaaaaaagaaaaaagaaaagaaaagaaaagaaaagaaattgtctaaattgagtgtttaaaacaaaaaattgggataattaggatgtcgaattgccccggatgaggaatattaaaagagtaataaggatgctaggagcttagagaagaggtttgcctggtggctttcaatggccacagatggatgggtctcttggggcttgcctcattgggggtgaagaaggctgctggggggtctgagggtgttgtgttgaggtgttctcatggccgtctttttctgccttcttggctgcaggcaggcatgaccctgctgttcgcagtgggttgcgtcttcttcccgttgtgcttcactgccctgcgctggggcttgcagaaccacaccaacctgcagatggagagacaagaggctgtcctggtagcatccaagtaagaggaccagggtgagggtgtccttcctggggccatggctggtggaactgatcttttactttcagaatgagtttgtggtgaaagcagaagcagagtgtggagtggagctggaatgtggagtcaaaagacaccagcaggctgggcgtggtggctcacgcctataattccagcactttgggaagctgaggcaggtggatcacctgaggtcagtagttcaagaccagcctggccaacatggtgaaaccctgtctgaactaaaaatacaaaaattagccaggtatggtggcaggtgcctgtaatcccagctactctggaggctgagacaggggaatcacatgaactcgggaggtggaggttgtggtgagctgagatggcgccactgcactccagcctaggtgacagagtgagactctgtctcaaaaaaaaaaaaaagaaaaagaaaaaaagacaccaacagtggggtcttttgtgagtcatttaacttctctgaacttcagatccctcactggtaaatgggcttaataataacaccccactttcctttcttcgtggagatgttgtgtgaggatcatatgaatcagcgtctgtagagcaggggttgaaaactgctgcagataatatgagggctgtgggctctgcagggatgatataggctggaggactcaccttctctgctgagggccagtgctgctcagctccagccactgataatgttatatggttagaacgtgggccaatattttcggagttatgattctttgtcgttgttgagacaggttgagacagggtcttgctctgttgcctaggctggagtgcagtggcacgatcatggctcactgcagccttgaactcctgggctcaagcaatcctcctgccatagctgggactacaggcaatgcaccaccaagcctggctaattttttttttttttttttttggtagagacagggtctcactatgttgcccaagctagtcttgaactcctgggctcacaggattgttccttctcagcctccgaagtgctgggattacaggcatgagccactgtacccggcctcttctttttttttgagacagagtctcactgtgtcacccaggctgaagtgcagtgacaccaccatgattcactgcagccttgacctccctgacaagtgattctccctgagaatcgggctgactcctgagtttcttggactacaggtgtgcaccaccatgcctggctaatttttgtactttcagtagaggcggggtttctccatgttgcccaggctggtcttgaactcctgggctcaagtgatcctcctgccttggcttcctgagtagctgagactacaggtgcatgtcattgtggtgggctgtctcccaattctttttatttttttgagatagaatctcactctgttgcccaggctggagttcagtggctcaatcttggctcactgcaaccttcacctcccaagttcaagcaacatttctgcctcaacctcccgagtagctggtattacaggtgtgcaccaccacgtccggctaatttttgtatttttagtagagacggggacggggtttcaccatgttggccaggctggtctcaaactcctgatctcaggtgatctgcccactttggcctcctaaagtgctaggattacaggcatgagccaccacgcccaacctcttccaattcttgaatactgataagtaactaagaatttatttaagaactactatactgacaactgcatactggccaaacaaaacatgtctgtgggccggattgggcccttgggctgcagatctatgacctgtgtgacaaagcttaccataaaagtgcagtatcagcaaaccacaggaggcgtaggaggtacacggaacacagattttactagggtgtctacgtggattccctggcagacaaaaaaagcctgtctctactcatccaaagtgaaaccacagttccatgaccagccttgtagtcctcaatcgagtagttacggtggccgcccatcacccagcctccccagcctctgtcctttttgcagttttgctcatgagtggctttggggttatgcaactatggttttttggtttttctgttttcttttaagatggagtctcgctctgtcgcccaggctggagtgcgatggcacgatctcggctcactgcaacctccgcctcccaggttcaagcaattctcctgcctcagcctctcaagtagctgggactacaggcgcatgccaccatgcccggctaattttttgtatttttagaagagacggggtttcgctgtgttagccaggatggtctcgatctcatgattcgccagccttggcctcccaaagcgctgggattacaggtgtgagacaccttgcccggctgcaaccatgggtttgaaacccagctttcatccgggcgtggtggctcccacctgtaatatcagcatgttgggaggcagaggtgggtggatcgcttgagcccaggagtttgagaccagcctggctaacgtggtgaaacttcatctctacaaaaaatacaaaaattagctgagcatggtggtgtgcgcctgtagtcccagctactggggatactgaggtataaggatcatttcagcccggggaggttgaggttgcagtgagccatgatcgcgccactgtactccagcctgggggacagaatgagaccctatctcaaaaaaaaaaaaaaaaaaaaaaccccacaaaatttctaaacctgtttcttctgtaaaacagggataccaagtaagaaccagtagaaatcacctggtactgtgcccagcatgtagtaaaaactcagggagctggatcccctttccccctcccgtgaagggctgaggacaggagctaggtccgctattgtctctacaaccgtctctaaatcagcgtgagacttcttgggtgctttcctacagattgccgctagagggcagcacaaaacagcaaatcccagtccctggcctttctttgggggaggcgaggagtgggctctggcagagaaaggcaaaccatagggttgactattgaacttggagaccaaaggagtttgcataacaggcccttgtcatgctgaagtccacaggacagttgggagcaggatgggaggccagaagtcaaagggggcagtgtctctggctcaggtcccacagctccacccgggcccagtccccaggcctcactttccttatgggccagtgaggagcttgcaccagcccaccccgcagtcctttcccactctgaaactaggctgtatgtggaagttgcagagaaaggggagctagtagcattaaggaaactgaggaaaaagtgaggggtgggaatttagagaaggccaggaggggctggcagtctgaagaacagggcctgggcatcctagggctccctgggacttcctgagaggcagctgccccgcgctctcgccaccgtttccccttcttccactccttgcccctccaacgcctgcaatgagagggctgtgccacttctgaactgggtgacctcagggagcctcaggatcgttgatggccctgtgggaaggacagacgcagtgacctcggagctcctgcagcagacaggacatgggcagccctgcagcacagtcaggtgccccctctggccaatgtcagcttccttccccgccatcgggtgagggggcctctggctctgaggatgctgtgttgagatgtttttgctcctatcccctccttcagctcttccttctgagaaagcaccacttactccctctcccagggaacgctctcttccgctggaatggccacccaaagctcggacccggggcaggccacagagggatggcttggtgagggaggagatgccaggcatttgcaaagtgctgatgggaagcagggtcaggcccctgtgggggctcagggccccctcccagctggccaaggagccctgggcccccttcctccccaagagaagagctggcccctgtcccctgtccccagcagccccctgtgccaccgcagctgctgttcctttaagggcctccccctccctctttctctgctccccccatctctgtcgcagccgcggctgtggctcagagctgcatggggagacgccgctgcaggtccggtttctcggtgtctggtcggtgccatcattttcctgcccctcccccgtcctccccaagctggccacttcccctccccctccccctccccaccgagggggcagggggctgggcacggagtctctatgatgatgccatgtgcggtgtctgtgccgggcggcagggactggggcggcagcgagaggaggcagtggagccaggagagcggtggtgaccgctgaccgcttgcccggctgctcctccgctccctcccgcccacctccttcctttggggctggtactcagacccacccccaccccctccccgcctcctcgggccctcccagcctctcacgtaagcctcccctccccacctgcctggtggctccctcccctcccccatccgcatcctcctcctcctgtcccctcttcctctctgtccctcaccaagccatcccctctttgcctctccccatccctcgctggcctgctcctgctccccttctcccatcctcccctcccccgtctctgcccagccagccccctcccgactccccagtttcatcggactccctggccccatcccgtccccgccctggcccctttgtgccccttctcatcgttttctccctccttcccgggcttggcgtcccttctccacccctaactccttccactcggcctccctgccccttcacggcccgcctgcctccctgcccaagtcctgagccaccatgctgaccccgatggtggccgggggggtggtgttccccggactcttcctcctctccaagaacacgctccagcggctgccccagctacgctgggaggaggccgacgcagtcattgtctcagccaggtaaaccactttctttcccctcagcccctgtctgcttcttgggcttctcagggaatggaagggacctggcacttctctggaccctcagcggtgggggactgggagctcctgtgggggtccggggctttacccccaggcttcctctctcctcactgcctgccttgctcactgttctgggagacctcatccagcccggccatctggtctactagtgttcagcccgcctctctcttcttccccgtacaccctcccaccctccaaaacagggccagcatgcggcgaagacattcctataagacattagggactgaggccagggccagacagctaggtgtcattcagggtgagtgtttgggggccagggatggaggagtggatggtacaactctacacccctagaacagggccagagtgcagagtggaggctggtggcagtcaggagacagtgggaaagtgactggggaactcggggtcacaaagggtccagagtgaggcctgcgtcatgactggacagctaagcggggcaagaaccggcccaggctcccctcgtggggagaggtccaggccagcagttcactctcagtct

SEQ ID NO: 7013 - DNA, 6000 bp, Homo sapiens
attatatatttattaaaagaaagataatatttagaaaaaaatctcattagtcaagtaaaattttagatactctatcttgaaaaaccttctgaaaacagtataaaaaatatttgagatatgtcagtataacatagagcaatattcgattctccctccttggtgcagcaaatattttctgaaaatcaaaagtacagaatcttttaggcaggaaatacattttgtccaattataattttagaagtcaaaattgttaaggtttttggaccaggcacagtggctcacgcctgtaatcccaacactttgggaggctgaggcaggcagatcacttaaggtcaggagttcaagaccagcctggccaacatggttaaaccccacctccactaaaaatacacaaattagctgggcatggtgacacgtgcctgtagtcccagctactcggggaggctgaggcaggagaattgcttgaacctgggaggcaaaggttgcagtgagctgcgatcatgccactgcactccagcctgggcaacagagcgagactccatctccaaaaaaaaagaaaaaaaaattgctaaggtttttgggcttctgtcgtactgaatgggaaaataataagctgcctcacttcttgactttcatatgttttgtttgtttctttacactgaaatacttaatactactctattggacttctgcctccaagccaggagtttatttcctaacagaagtaagcacactgactaataataatccattctaacaaaggtttacatacacaaggataggtgccaaatagaggagtatgtggagtgtgataggaacacacaggagcgactggctaccccagagaagcaaggggattttcacagatggtaacatttgagatgatactgaaagatgagtaggtggccgccacaaagagaaagaaggagccattccaggctgaaagaacaatttatacaagtaggaaattacatggtatatattccatatacctttagtgtccttaaaacaatttttttgaatccagaagagtggattttttttattatgggtaaaatatacataacaaaatttattattttagccattttaagtatacagttcagtagcattaagtacattcacattattgtgcaaccattaccactatccatattcagaaagtttttgtcttcccaaactgaaactctgtacccattaaacatcacctccccattccttcctctttttggaccctggtaatctctattctactttctgtttctatgagtttgcctcttctaggcacctcaataagtggaatcatacaatatttctcatacaataattaatatgtaattatagggctgggcacggtggctcacacctgtaatcccagcgctttgggaggccaaagcaggtggatcacgaggtcaggagttcaagaccagcctggccaacatagtgaaaacccgtctctgctaaaaatacaaaaattagccaggcatggctcgtgcctgtagtcccagctactctggaggctgacacaggagaatcacttgaacccaggaggtggaggttgcagtgagccaagatcatgccactgcactccagcctggcaacagagtgagactccatctcaaaaaaaaaaaaaaatttaattataaataattatgctaagtgaaatatgtggctttgtccatgttgtatgtatcataatttcatttctttttatgaccaaatcacattccattgtcttgtggatgctacattgtttatccatccacccatcaatgggcattttgtttgttcccactttctggctgttgtgcataatgctgctgtgaacattggtatgcaagtaactgagtttctggtttcagttctttggagtaggtagctaaaagtaaaattgctggatcatacggtaattctatctttaactttttgaggagcctccagataattttccacaatgactgcaccatcttacattctcaccctcagtacagaagggttccagtgtctccacatccttgccaacattgtctttcaaagttttggaaaaaaaaatctaccagactgtatactggttccataagaaccattgaaaatacattcattatcattacattaaaagtgaccttttggggcctagcataagaaaaagtttgaatgagccagcatcagagaatattgacgtttgtcttattgtttgaatagtacagagtttattcaaggaaaggcctttgcggtaagaaagtactcttataaagtcagatttgttatgtatgaaataaaatcaggtggtctgcctgctctttgcaacactgttttctcttcctgcagctccctgcacaagcagcactttcttttgccatagcaacatgtgcatcaataattctttagtctgtaatggtgtccaaaattgtgcatacccttgggatgaaaatcattgtaaaggtgagtttgatgtaaaggccaacatttttgagaaaagagtggctattgcccttcattaagaacttaaaatgttattttctacaacagtgcttagcatagctgctttttgtttgtttgtttgagacggagtcctgctctgtcgcccaggctggagtgcagtggcacaatctcggctcactgcaagctccgcctcccgggttcacaccattctcctgccttagcttcccaagtagctgggactacaggtgcctgccaccacgcccggctaattttttggtatttttagtagagacagggtttcactgtgttagccaggatggtctcgatctcctgacctcatgatctgcccacctcggcctcccaaagtgctgggattacaggcatgagccaccgcgcccagcctagcatagctgctttgacaaaaatggaaacatgtaaatgttcttttaaatggatcatagacctgggatgtggtgaaaagcatactctaaacaaaagcattttttgtctacaaactgttaagttgttctaaagtgtattgtggccaggcgcggtggcttacgcctgtaatcccagcactttgggaggctgaggcaggcggatcacctgaggtcaggagttcaagaccaacctggctaacatggtgaaaccccatttctactaaaaacacaaaaaaatcagctaggcgtggtggcacgcgcctgtaatcccagctactcgggaggctgaggcaggagaattgcttgaactcggcaggcagaggttgcagtgagccgagattgcgccattgcactccagcttgggcaacaaaagtgaaaactccgtctcatccaaaaaaaaaaaaagtatatcgtggtatgccttgcccttattttgttactgttgttgaagtttgtcatttgtattgtaaacataccttatttaattgtcaaaataatttagaggttagcctgaagtatgtggaaacactatttaataaaagtcaacttgcagattctgtcttaaaacataaaagcagaaacattctatgaactgctttttttatttcgtaacatttcctatgctgtattcccagtgtgtactcactgaaagataaatgcagcttgtggtaatggttgaatgtctgcaagctggttgtcagatcactgtgtaagaactaaaggtaatcttccttttatcctctaagacagcagtccccaacctttttggtaccaaggactggtttcgtggaagacaattttttcacagaacaggggtggggcaggggggttggtttcaggatgatttaagcgcgttacatttattgggcactttattattattacattgtaatatataataaaataatcatacaactcaccataatgcagaatcagtgggagccctgagcttgttttccttcaactagacagtcccatctgggggtgatgagagacagtgacagatcatcaggcattagattctcctaaggagctcacagcctatatccctcacatgcacttgggcttctgtcatactgaatgggaaaataataagctgcctcacttcttgactttcatatgttttgtttgtttctttacactgaaatacttaatactactctattggacttctgcctccaagccaggagtttatttcctaacagaagtaagcacactaataataatccattattgttatccataatagggctcctgctgctgtgagaatctaatgccactgctgatctgacaggaggcagtgctgcgggtaatgcgagtgatggggagcagcagcagatacagatgcagcttcactcgctcactcgcagctcacctcctgcagtgatacccagttcctgtctgtggcccaggggttgaggacccctgctgtaagagttcaataaatatcttactgtggaaaggtgatctaatctgatatggctgtcgtaaatactcgacatgaagtgttttcagttaatcattcaaaaacagtaggtcatgataatatactggatgggttagtctgatgatgttagtttgctctccctggggtcatcagtagatgcgggtatacctgaacacagcagttggtcaaacctaccataaagcagaaagctaaacttgatagaacaagagtatttatttggcatagtctatatttgtatatttgatttgatttgcagaatgtatgcatttatgtgtcttctgaagaaacggaccaagaactttatcttctgtaatctatcagtactgcgattggtaactttaaccagaaattataatagggttgttttatttgtttaaaaacctaattgtaaattgcattgtctgtagtatatttggcccaagtattctgttttacctaaaaataccttactaatttgtaccaggattcatattaatgtattttgaaaacttaacgtttctcattttctttctgcagaaaagaaaaaagcaggagtatttgaacaaatcactaagactcatggaacaattattggcattacttcagggattgtcttggtccttctcattatttctattttagtacaagtgaaacagcctcgaaaaaaggtcatggcttgcaaaaccgcttttaataaaaccgggttccaagaagtgtttgatcctcctcattatgaactgttttcactaagggacaaagagatttctgcagacctggcagacttgtcggaagaattggacaactaccagaagatgcggcgctcctccaccgcctcccgctgcatccacgaccaccactgtgggtcgcaggcctccagcgtcaaacaaagcaggaccaacctcagttccatggaacttcctttccgaaatgactttgcacaaccacagccaatgaaaacatttaatagcaccttcaagaaaagtagttacactttcaaacagggacatgagtgccctgagcaggccctggaagaccgagtaatggaggagattccctgtgaaatttatgtcagggggcgagaagattctgcacaagcatccatatccattgacttctaatcttctgctaatggtgatgtgaattcttagggtgtgtacgtacgcagcctccagggcaccatactgtttccagcagccaacccttttctcccatcacaactacgaagaccttgatttaccgttaacctattgtatggtgatgtttttattctctcaggcagtctatatatgttaaaccaatcaaggaacttactctattcagtggaaacaataatcatctctattgcttggtgtcatttataggaagcactgccagttaaagagcattagaagaggtggttggatggagccaggctcaggctgcctcttcgttttagcaacaagaagactgctcttgactgataacagctctgtcaatattttgatgccacaataaacttgatttttctttacattccttttatttttcctttctctaaatttaatttgttttataagcctatcgttttaccatttcattttcttacataagtacaagtggttaatgtaccacatacttcagtataggcatttgttcttgagtgtgtcaaaatacagctagttactgtgccaa

SEQ ID NO: 7014 - DNA, 6000 bp, Homo sapiens
ggttttaagaaaaaataaaagcaacttacttgtactgcatatttgtaaaactgctctgatagttctcctagctcctccctcattttacaggtgttgggaaactcctcaagtcggtccaactgctccacttcagcaatgggatatggcttctcttttaagacctgtacaatctggaaacggcataggcctgtaatcaacagagtgtagtggggcttgggccagttactgcccacaacctgaacggccagtgcagctgtgccaatcctgaaaaacacacaaaacatcggtattacaaacattcaatacggtagaacagaaactcacttcagaaagtgttggcttttctgatacattcattaagcaaaagacatctgaagtgtaaataaattttttctctatttaacttagcatccagtatgtggcctcttctgccactaccctcagctatatggcaaagcagaccatctcactataatctgcacctcttttaaaaaattaggtaggaatttgtaaacacttggattattcaagcgtaaaaatgtaagagaaaagcagctgagaattacatatcttaaattaacattgtcaactaagaataaggcaatcttataccaggataaatattatcaatttaaatacatttaaatataaatagcataaaccaatctaagaaatctccgttccaacaccagttgtgctactaacatcaagtcagttttcttacataatcagtctatgaaacttccacatacccaccttatcacaagctgccatcacatactgggaacttatatatatgcccttaacactgaatttctaagtgtgagggctaaatattacagtccacacactgccatagactgaggagagctaaagaaagacccacatctcaaaaggtctcaacctagttctaagtggtaatcattttacctaacaataggtgaaaaggcttcaagtctcagctcctcatcagcaaatacaactctgatcaagtcacatataaatttaattcacagaaaggaagcctcatccaaactaagtcagttatataaaatacaaaaatcaacattgagaagacaattccagatcccaaaataaataatattttctcccttcagccataggaaaagtggtaattccagaaaagaaaatagaaggactagaactctcaacaccctaggaaagcggtaatagaagaacaccacacctgcccatctcaaagataataaatcatgtaatacagtatgtgactatgtgagtgaacttgcttacttctatacacagtgaattcttgattacttccttataaattactcattccgtagattacacatagcctttggcttctttctgccactcagtttattctgaactacgtctatccttttcttacctttcagtcattaccatgtttacaataaaaactgatttaaataataagccaaacaactgagaagataaattggtgagggaaaaaaatcacatacataaaaaacttgaaattatttagcaattagctattattttgacttatttgtgttgtggctgcttttcttcaatcaatagtagataatatttcccacttcctgaaagcccactcagattgcctgaggaagtgagccacctctaaactgattagagaataacttaaacataattaattgcagatgatattcatcactgtttgtacaatgctgaaagagctcacagtcctgtttgtatataaaacatccacagacaagaaactggatccccggcctaaagggtttacaaagtagaaaccaaggaggaaccagaaagagagatgagacaaatccaaatctccgatcaggagacaaatttaattatttgggctatgtcattgctaaaaggtgatgctaaagagttgttttttgttttttgttttttttttttgagacggagtctcactttgtcaccaggctggagcgcagtagcctaatcttggctcactgcaacctccgtctcccagattcaagtgattctcctgcctcagcctcccaagtagctgggactacaggcacacaccaccacgcccagctaattttttgtattttttgtagagatgaggtttcaccatgttggccaggatgatctcgatctcttgacctcatgattcgcccaccttggcctcccaaagtgctgggattacaggtgtgagccactgtggtttttttgtttgttttttagagggagtctcaccctgtcgcccagcctgacgtacaatggcgtgatctcggcttattgcactctgcctcctgggttcaagggattctcgtgcctcagcctcccaactagctgggattacaggcacacaccaccacgcccagctaatttttgtatttttagtagagacagggtttcactatgttggccaggctggtctcgaactcctgacctaaggtaatccacccacctcagcctcccaaagtgctaggattacgggcgtgagccaccacacctggccaaaaggggttttcttataaagcaaatacaatatttttgctgtgaaaggaagatgttccaaactgaagagattaagctgaatttatactatgcctacaaaaggtacagatgtatacatgccttaattgctttttacttaaaatcacttatagttgactagaaattatccctttaaaaaaatttttttttctttttttaacagagatgggatctcatgatgttgaccaggctgatctccaactactggcctcaagcaatcctcccatcttggcctcccaaagtgctaggattacaggcaagacccacctcgcccagcctagaatacatcccttttaaagaaaaacatctatgaaattatagatggctagaaacagagtacctggtgagacactgtgggtgaaaagcatagtgaaaaagaatctattgtatattgggccccaggttttatatatacaaacaggtaaataaacaaaatactcaactaatattttccttctatgatatacaaaaggttgtatatcaagtcagtcatttttctaaaaattctggctcttctattgtatgtgcattattaggcatgctcaaaaggcagcattttaattttgcaacagatccaaacttatacatcccaatgactggtgtccttccctttagctagtagctctgtaaatctacatcctaattatgatattgttcaaagaagttttgaaactcctaactcgaatctaccctcagaggttttaagataatgttttaatccaaatcctaactcgaatctaccctcagagtttgtaaaatattgttttcattcaagtgaggtctgactacaatggttacaatttgtgtaatttggaaactgacctaaataatataagagttccaaacatatttaagaaccatcaactgcagtagtgggaaaatctaaaagcagcactactggaaaaagttttccaagatgaggatattatgtaaatatctaattccagcctatatgcccagcacttgctttttttttttttttttttcctatagacagaatcttgctctgtcacccaggctggagtgcagtggtacgattatagctcactgcagcttcgatcacctgggctcaagtaatcctccgcctcagcatcatgagtagatgggagtacaggcacgtgccaccaggcccagccacttttaaaaaatttttttactcaaagcccttaatttttcttggaatctttaatcttccaagaccttcctgcaatgatgttagttcagttcagcccgtgttggaataatatggggcctccccactcctctctttaatccccttttgtgaaaatctacatttaaaactacccatttggatataggtttagaatgctttgcagtttcaaaaggctttcatatgtatacttcattttatacctcccttcaccccatgaagaaggtagtattatttccttattacaagtgagtaaatgagattcaaaaaggtagaacatggcatggtggctcacacctataatcccagcactttgggaggccgaggcaagtggatcacttgggctcaggagttcgaaaccagtttgcgcaacatggcaaaaccccgtctccaccaaaaaaaaaaaaaaaaaatagctaggcattgtggcacatgcctgtaatcccagacactcaggaggctgaggtgagaggatcacttgaacctgggaggcaaaggttgcagtgagctgagatggcaccactgcaccagcatgggtgacagagtgagaccctgtctcaaaaaaattaaagtagaacaacttaggtgtacatggttacaagaaaatgtaatagaaataaatttaagaaataaatttaaatttaaaatttaaaggataaatttaaatttaataaattgagttccttaattatattttaagacaaattttacttttttctcattacaatggacaataggtaccacttctacctacaagaattataaacataggccaggcatggtggctcacgcctgtaatcctaacactttgggagacagaggcaggaggatcacttgagctcacaagtttgacaccagcctggtgagggagactgagaagtcggcactatgaggaaatgaagccatgtaccctgaaaagtgtaaatttggaagaaagctggatgaccatcttgaaatgcttgaaaggatattgtacaggtagtactaaattatgaccccttttcactaagaaaacaatgggtcactcaggaagcactaaaaatgcagttctactaagcagaaaaatgcagggtgccctgggtcagcatgccagccaagttctatactgcaggacaagtccaaagctcctcctttaaaaaggctcctgcaggcaacatgcctgcacactaacgtgcagaaagggactgtactactcaaaaccaccaaggaagtggcagaggtaagtcaacatctaatcctgccactctgtgtggcaaagaacgctgggagcaaattacttctgctgctctttgaaggctgtgccagcgtcacctggatagcgcaaaggaaacaagagaaaggaacagagcccctcttctggcctctgggctaccatacagaaaagcaggtaactggggaaggacagacttgtgcgtggaaacaggctaatgctatggattactcagtattggtattgttaaagcctttttttttttttttttttaagtagagtgttttaaaggccctattagagaaaaaaagacattggaaactattaccaaggaatatggtacaatctttccacataggctttttaagtagcaaacaatacttctaggataactagatggtctgatgagttcttataatgccggacttctatgaagacttttcaatatatgttttctaatttaaatgattaaattttaacattgctactcagttaaaggcaataatatgaacatcaaggatcagatcacacagtacctgattattagtgattactttcaagcaggagaattgaggattgttgctttggagggattttcataaaataaattaaaaacctgaagggtatggtggcgcttgcctatagtcccagctactccagaggccaaagcaggggatagcttgagtccaggagtttgagaccagcctaagcaacatagtgagaccccatttctacaaaaaatttaaaaattagctgggtgtagtggtgcacgcctatagtcccagccactccagaagctgaggcaggacgatcacttgagcccaggagttcaatcaaggttgcggtgggctacgatcacgccactgcacttcagcggaggagacagaatgagactctgtctcaaaaaatacacaaatgaataaataataaaaaccttccaaaatcttgccagaataataccaacaaatagtgaaacttaaaatgtgactaaatcgacttttcaagttcacaatgtgcccatggctaatcaatacatatgcacagtagaaagaaaatgaagtctaataatgaccactcttgcctagacagggaacta

SEQ ID NO: 7015 - DNA, 6000 bp, Homo sapiens
cttctcaactctgctgtcatacagcagccatggatagtatttaagtaaataagcaagactgtgttccaataaaactttatttacaaaaataaatagagtagtgaacttggccttcaggctgtagtttgccaaccccctgctctaggagctgtgccatctgtccctaattggctttgcacactggtgtggtgttccactagctaccgttcatctgtctgaggtggtggttttgatttttgaaaagctcagatctctactttgatgagcataagaagtattaatatagatgagccttctggcaggaccgtggaatttgtgtatgaccagggaataatctaccccaaatgattcaattttagtatgtaaaaatatgtggaaatctattaataaaattataaaacctgagactctttgaagaggaaagagcatagactcagtcacatgggctgagatattagatgtggttcccagttctcagctctttgacctggctgttggctgtggatttccccagaagcggaccctgggacaaggatttgaatgcacatagtttgggaagtggtcccaggaatcacaggttgtgggtggggatgtgagctggggaagggagggtggccagtaatgggtttgttatcaagcaggtttgttatcactgtgggtgacaagccccttcccatttggggcctctgggatccagtgcagaacatatccctcgcaggagatgaggaactggggtgttcacagagtaattccctccctcactagttgagggctgcctctgggggtggctgaactacctcatgcagccagagaaagtcctcaggcaatgaaatacagacactggccagccagcactgaggtggcgagaccttactggctggtccccagagtgtctgcagcattgtgtgagatcttaaactggctagaaggacggtaacagcagcacctgtttcataggacgtgaagatagacgagacagccatgtcccagttttccttggtgccatgccgaagttaggtgttcagtcagtgttctctgctgttatcattgtttttgttgtctaattactgttattcaaaaggaaactaaagtgggaccagttgctgactctcaaacttggaactctaggttaggccccaggctcctttgtcttgcttttaatctttatggcattttaatttctgtggtgcagtagacttccttagagttacaggttggattgggtaccatagctccctctgcacaccagggtttccctgagtctgtgatttgatttctgtgtgactctggactgtttttggtactgtttctcttccagcggtcagatagcatcagacctgcattgaacagtcctgtggaaaggccaagcagtgaccaggaagagggagaaacttctgctcaggtaaaacccgcactctagtgagagtgagttcatggagctgtggagggggaatgtggtcccgacagtggtcttcctcagtcctgaagcttgcaaggcttagggcacgagtacaaaagaaactgtgctgtatccatcccaataatgaagggtagcaaatcaggctgtgcccgtggtgtggcctgtgtttccacgcagggctggcagtcattccctggggattgccctcatgtgctggaagagaaaggggttgtgttccccggggccagccctgccaccttgagcctgagtgagagcccgtggaaggacagaaggaagctgggctcgggaccgtgagggtgcctggacccatctaaactcagatggggatggcctagggcaagctctccagggagccgaggccattgagatgccctcccccacacctcacttgtcaaactcaggatttccagatacatccatgcattttgcaaaactgagaccgcctgagctgagtggggctggggggaaaacatggctttcttgagaaccagatctgtttgttgacccactttgggtgccttgaggtggccaccctaactccaagcagcagggccgaggtgccacctccccccaccccctgcccgtgccctctgccctacacctgtggccctggatcccactcctcttctgtggttcccattcgcttcctcagttaccatattgtcagagcactttcttatgcgaccacaaataaaaactggacaaccccaccttggcctttctgtgtttgtgccatgtggggctttcctgcacacaggcttgggtctagggtggtgctgccttcccttactggggtgcacaaggtctcctctagaagcactggtaaatgacacaagctttcacctcttgtgtttttctctacaaagaggaaacagtaaacactactaggccttcttcaaatctgttgctgggttaagattttcatatccacctatgtaattggattatgcatcatttgtgaaatggtgcatggcttctaaggggtccatgtctacatttccagttttttttttttttttttttttttgagacggagtctcgctctgtcacccaggctggagtgcagtggtgcgatctcggctcactgcaagctccgcctcccgggttcacgccattctcctgcctcagcctcccgagtagctgggactacaggcgcccaccaccacgcctggctaattttttgtatttttagtagaggcggggtttcgctgtgttagccaggatggtctcgatctcctgacctcatgatccgcccgcctctgcctcccaaagtgctgggattacaggcgtgagccaccgcgcccggcctccagtttttgaatagctggcgcagctgagatatggatgctgtgggcttgggggcatctgtgggtacagcatattcagtccctgtcttgattttccactgctgcttctagagttagcatgaagagttctggattttatatatatatatgtatatataatggaggaaagtatgtatttcacagggaaccttgctgtgcaacatttttggtcatttgtgaagaaatacaaagtccttgaataacaattagttaacagaaacctcagtgtagcccagtaagcttgtcagctccactctccctctgttctaatctctgccctgccccgctcaggctggtattagtcaggcatgcagctgcacagagcaggggttgcggtgggcggctgttttctttctaacatctcgcctcttcactcaccattttttctaacctgctctagggtcaggcttagaggagagggatagaataggacagtgagactccagcgtgtgtgtgcgtgtgtgtgtatgtacctacatgttgtgccaactacgtgtgtctgtgtgtgtgtgtgtacatgttatgccaactatctccctgtccccatctggccccagaaactcctcctttgaccctgggctggctattgatgaccactcccaccttcatgggggtcctgttacctctccaagtggtccttttgggcacagttgttttcaacaaccttaggttggttccctcctgcaggagccctatccaagctccaggacacacacagtgttgtctggagtcagtggaaggtgaacgtgctcccgtcacagctcccctggccctgtattttattggctcctgccagtttctttctgtagatttctcaagtgtatgcagccaccagttcccccgtcctttgactctcggggatacgaatggttctcttgaagttccctctcgagcttagctgaaggcaggaaaaagtgagggtaggtccagcaggaactctgaagtaaaacagcctgcctctcagctgcacccacctccattctgtcacagcctagaagcgggcaatgggctgaccctggccagcgcaggtctgcatctgggagcatgagcagcgcagatggtcaggcacctgctaggacctgggggtgcctgggcattgtcgtggactttggagcttcaaccaaagccaaggaaccatataatccatcctgtgtcttttcaaaagatccttagggctgggcacagtggctcatgcctgtagtcccagcactttgggaggctgaggtgggtagattgcttgagtccagtagtttgagaccagcctgggcaacaaagcaaaaccctgtctctacaaaaaatacaaaaattagccagatgtggtggcacgagcctgtggtcacagctacttgggaggctaagttgggaggatcccctgagcctggggaggttgaggctgtggtgagcagagattgtgccactgcactccagcctgggtgacagagtgagaccctgtctgtaaataaataaataaatagatgcctagcagttttcctttttacctctgttttcagagtcaattgaggatataaaatttgtgcagaagattggataagactggtttaaatgtttgagcaattagtagaagtgaacagaaaattcccaggatgtaaactcacggttgtcgtgttggtagcgtattctaagagtgcagcttgaaggtgcttacgtttttcatgctggtaatcatttacttaccctctgatgccgaacattctgtgtgagtcaggtcctgttcttagtactactcaagccataggcagcaggcctgccctcagggaagctgctgctccattatccgtagcttgtggttcctagtttctgcctccctgcttggcagcagccttctctttgcgtccagaacagccgtgtctggggtgccctgtaggtgaggaacctgcttaggagggaggcctgtgctcacagctgcctccttgcttcctgccccgtgtccagaccgagcgtgtgccactggacctcagtcctcgcctggaggagacgctggacttcggcgaggtggaagtggagcccagtgaggtggaagacttcgaggctcgtgggagccgcttctccaagtctgctgatgagagacagcgcatgctggtgcagcgtaaggacgaactcctccagcaagctcgcaagtgagtcgcttctccagaccacctggcataatccagatcaaaaactagtggctgaaggccgttgtcaggccgtcttctctttttaaacagatgccaacagtgaaacggcattacatgccaccccaaaactcagatttcaagcctctcttgaaaaaaccagagcatctggtaacactgggccccactggtctacctctgatgctggtactgtcagtcatctcccatggacccctttggccacgcttgccgagagagcacttgtgtgctaacctgatctaagccctttatatgaattactttaacagctctaagagggagcactgttaacccattcagctgacatacagctgaagaaatggaggctggagaggttagcactggcctggccctggcgtctgtctcccaggtcctccctgttgaccactctgcctttcagctgagcattgtacacacactcagcgcatctgtgcgtcacacacccatggttggtggcagctacagcaggtgtgtcctgtggatagagggggttttgttccagctcttaaggacagggccagcactgtgttcctcaagtgggtttgggccctggcagaccctgtgattgtgggagttctgtgctgtgtctgtgggtggaggggatgggcaggaagagacagcagggaacagcactgaagggttcctccctggtgcagagagaatttgcgcccatctgttgggggctggatgtcttggtcattgggtggtgctgagtgacagcttcatgaaggtgcctggacatggggagatgtgaaatcaaccttctggctgtgttccacagctccccatctctcctatgagagagaaaaagtcttctgttttttctagacgtttcttgaacaaaagttctgaagatgatgcggcctcagagagcttcctcccctcggaaggtgcgtcctctgaccccgtgaccctgcgtcgaaggatgctggctgccgccgcggaacggaggcttcagaagcagcagacctcctagcgctcccttgccttcctcagctgcctcctgcgccctgtgcccgactgactggaggaggcctgt

SEQ ID NO: 7016 - DNA, 6000 bp, Homo sapiens
agcatttgtttctcagtttagagaatgagtgattagtttttcatgcaaaagcaacagcaccttttttgttttgctaaacacttaggtggaaatgacccctttgaggaaggagaaaagaagagcagagcaattcaggaattaggatagcaattggtagaatatttctctttctttcttctttcctcctccttgtacatagcaacatgcacagatattgcacgctagagggcacttgaggtagaagaaaaaaagcttcggcatccattctaacaggactagttgcctatgcaggcgggagacggcaacctaaaagcagtgccctgatttccacatggcagcatctttagcaaaagaacaaacaaaaatccttagtattatccagctttgactaataaaagaagcctgttcacattctcaataattaatttcccttcaatatcttgtaacatttgtccgctgcatatacatgtggtcttctctctaataagcatcttgataactaatcacaactataaattccattttgcacatattaagataattgttttcccttcacctcccctcctccatacatctgtattcccctatatatctgcaatggcacattagtataagtgtgcaaatatcaaataatggtaatcttctaagccaaacttaaaattaattaaatgtaattattatattttagtatgaaatacactctgttataccaaagtagtagtattttagggagtggggtaccttttttactcctctttcttctttttttattcttactcttttttcttctttcttctttttacttggaacacattgggaactatttttaattttttcctccttttttctcctaagttaaacaagagtggtctagaatcttaatctagttgctattctcctacagaagaaaaaaaaagatagagaaaaacccaaacactaatatgctaagtgtgtagtccacaaaacctggactggcttatttgatagctttgtatcagtcctcttaaatctatttactaccccacccgccgcccgtccgaccaagtttctgttcagaagctgaattgaagcttatctcttttctagtacctgggaagatggaagataatgccattttgaaaaccttctccaaaatgctctcagcacagatgtggttttcagaaagtgtttacacctccatttactgaaagtataatgacaaactcaagattagtaattatagtcaatattcagagatgcaggcctaatttcagggacagctaaaaccagcaagccaagaaatgtagagcatcacaactctgaatagcaagctcaatgatgattttatgtcaagaattcataactacttctaaagaaatcaatttagtttttcaaatcccatactaaacattagtgaggtactcagacgataaatttagtgtgcttacatttttattcttcttttcaaatcttgttttttaagatagtattttgtcttaaaacagaatattctgggacaaaaacagtaaatattaacacaatacactattttatttttttccttctcatctttatacatgtcacaagagaaagaaattgcctaaagcagtgttctcagatgttagcaggtaacagaatctcctagcacatttgttaaaacccagatttctgagccccactcagattcagggtcaaagaatttgcatttctaacaaatttccagaaaatattgaggcaggagctcgtccacggattgcaggttgaaaaccactcgtctaaaggaatctccagaattgctcacattggtttaatgagagcaccataataacttctcataatcttagtaagagaatggtttaaagcaaattcataaacaaaaaagctgtcctaaatttacttaaacatttacaaacttctcaaaacttcttcttttttattttattttttttttttttgagacggagtctcactttgttgcccaggctggagtggctcactgcaagttccgccttccaggttcacgccattctcctgcctcatcctcccgagtagctgggactacaggcgcccgccactacgcccggctaatttttgtatttttagtagagacggggtttcaccttgttagccaggatggtctcggtctcctgacctgtgatccgcccacctctgcctcccaaagtgctaggattacaggtgtgagccaccatgcccagccccaaaacttctctcttaatgttttaattcttatgacttacgcttcaatattggaatccaaaataaaatttaagtttcttaagcttaatgccagagttgttacatattacttacccttgccccataccccaaataaagggcatggtttcagatatcttcatcctaatgaaacacaggaaagggacccttcatttctggaaaaatattacatggtaatttgagttgtcatttttcatatgtcatattcttgagattttattttaaatgataatacctggcaccatagatatcacattacaagcaatccaataaatctaaaggttaccagtaatcataatatggtaaatacattttgtttttagtttgttttaatttttaattctatcttgatgaatgaaaacgacgaaagattgcattttaacgcagcaaataatagttatgttccattctgtcatctcctgctccaaccagagaagctggagacttcctaacactgtctccctcttcttgagctctgtttcctatgaaccatctgattccccactctgcaactagctgggcacttggtttactgtgtcccttggtcaaaattacgacaaacattccagccatagtgaaaaaataaaagtgtattttactacatggagtccctctccatctcattcactctctacagtagactcccctgcaaaactgcctgcctgtcaccgagacccaggctagagacatcctgcctcattctactttttgcattagtcagccaaggttattctgaatgcaatcttctctccctccccccaactccttctccaattatactcctgccctatcagataattcctcacccttcctcccccgcaatgctccacaacacatgcaatttcacttgccattctaaaaagcctatgtaccacagtcctcttcccgctggaaggctgtaaccctggagaggatgttgaaaagaaaacactttcttaagggggtaggctttcaccattgtgacattacactgcatcttattaagagtgggtggaattgttaaagagataaatgccttgtctttcagcatccctgattattttagaaatatccttatagggctttctaacattatcctaatcctctatcacactgcttaatcatccaaacctctcttaagaattagtcaggaaattcctattgtaacgctttgagcagatattagcaggtatagacaggttaccctgaattccagaggaccaaaattcagggaagacaatgtatataactgctgtaagagtaaatatggacaagatgagtcaaagcaaactcttcttaaccctagatacccaaagccattggattctggctctctttaaaagccattggattctgactatctttactatgtcagcatagtttgttaagaaaatgagatttgaggatattgtctaacaatctggcttttttttttttttttgagacaagtttgttacttgtgacaatccccagctttcagtagcacatgagtttttttgagttttcatagatgtaagaagttaccccaaggaacggttcaaattatttgttcaagtgaaaatgaatatctgaaattaagcacaacccaaaatgtgatctatttctttgtccacttgggactgtctggtctagcagcagttataatttgattgagccttgactgctgctcctttttccaagacagaattagccaattccaataccctgtaagcagacacagtctgagaagagaacaaacagttacttagtgactgcctgggggaaaaaaaataccacttggttctcttcacctctccctctctgaaataatccactaagtttcttgcctatgacagctagaacatgaaacaatcagatattagagctacagccaatactctttttcacatttcacaatgggttgtcagatgcagcacacaaaaaaatgtcaaatttgcataaatatcataagcatgttgtgcctattttctcattctgttcactctttctcattaatttgagtgagacagtacaagctctacagactgtgcgtcttgtcccctgcacctttttcccccttctgttcttgctctgtccccagatggtaaaatccaccctcaggctcacgtctagtgcacacagggaagggactaaatcgggatctcctgtggaggggagggtttttttttttaaggtaagaatttatttgtcttatatttatctaattttattagaagatgatgactgtggcatcgtctacatgttagccccagtgttgaaaaagaaaagaaatctggacctcctgattcatggtcccttttaccccagggtggccatttctcaagatctgagcgcagcccatcagaagacttgaagtgaccacagacagggcaggtcttggtggaggcaggagaaccgcaaggatggtatctgagaggatatgacaagatcagggcacattgagaagacctagaaattcctcccctatttcccaagcaagttctgctttgcctgccctcctccccacaaccaactactgcgcgcccctcctggctgccactctgctgtccctcatcccattttcccaaaggagcacggggacatcaggaatgcgctccatcacagaaccgcgacacacagcctctacatagcgtctgagttgcaggcaggggtctcacaatcaccctattctgtacgcaagaggcccttggaataaagaggaggtaagctgcccacgctcaaccctttgccctgtcgcgtcctcttcctcctacggaaaatagctgcgggtcactgagacgcttttcaacataacgccagccccagagctcaggtgagacctctagagagaaagctcgcaggtacctcatccgcatgctgttattatctgccagcccacttatccaggagctcggtcctcagcgggctgcgcgcaccgcgcggaagggcgcatcttcacctcgtggctctggcggcagagacgcgcggggcttgctcgggagcgaggagcgaaaagttgtgcgcccacttgggtagggggaaagagagcgatcgagccagcgcgggagagcgaagggggaaggcggggagggggcggggaggggggactgcttacatgaatttccaagtggtagacctgcctctgcgctctgcccaatgagatccgtcaggggaggcacccggctcacttttccacatcacttcacagttacatttggcaggcaggcgggctcgcacgccggagcgctcagcccagaattagtggatttatttggaatctccctgcctcctccaagctccgccgccgccgccggcttgtgcatagacggtagcgtcaagacaccagctgcactttgggttgcggacacccagagcccagcgcgcccgccctgcgtctccgcaccaagccctgtagctccgagaggcatgaacggaatccggaggcgcctgcctagcgagcgaggaccggtcggcgcttgccgccctcgggagctaaccccgagcacctccagccatttgtgaacctggaggcttgacattcgccagcgcagggccccacaagagtaagtgttcccctaacccacccccgttttcctctatgttccgactatccagaagggaccgtttcttataggaattcccatgccccttcggacaccttgcgcgcctcctgcccctcagatggtggatgagggttcttagcataggctctgggctaagctgtgtctttcgcgatatccgtgggtgataacgtacgtacgcctcaaggttttgcctgactgtttttgcaaactgctttgacaacag

SEQ ID NO: 7017 - DNA, 6000 bp, Homo sapiens
gttttctgttcctgtgtcaatttgctcaggataatggcctccagctgcatccgtgttgatgcaaaggcatgatattattcatgccaccatgcatagtattccatggtacatatacaccacatattctttatccaatccactgttgatgggcaccttggttgactccatgtcttcgctattgtgaatagtgctgcaataaatatacaagtgcaggcgtttttcttgtagaacgatttattttcctttgggtctataaagagtaatgggattgctgggttgaattgtaatacttttttttttttttttctgagacagagtctcgctctgttgcccaggctgcagtgcagtggcacgatctcggctcactgcaatctctgcctcctgggttcaaacgattctcctgcctcagcctcctgagtagctgggattacaggcgcctgccaccacactggctaatttttttgtatttttagtacacaggggttttgccatgttggccaggctgatctggaactccagacctcaggtgatctgctcacctcgtcctcccaaagtgctaggattacaggcataagccaccgtgcccagccttgaattgtaattctgttttttttgagacttctccaaattgcttttcagagtgacctaatgtacattccaaccagcagtgtatatgtgttcccttttctccacatcctcaccagcatgttattttttgactttttaatcatagctattctaactagtgggagatggtttctcattatgggtttcatttacatttctctgatgtttaatgacgaccaatttttttatatttgtaagccatttgcatatcttcttttgctaagtgtccatccatgtcttttgcccacttttgcccacattgtttttttacttgttgaattgtttaaattccttatagattctggatactagacctttgttgggtgtgtagtttgtgaatattttctcccattctgtaggttgtctctttactctgtttatagtttccctttgttgtgcagaagctctttagtgtaattaggtcctgcttgtcaatttttatttttgttgcaatttcttttgaggacctagtcataaattctctcccaaggccaatgtccagaatggtgtttcctgggtttttttctctagggcatttatagtttgaggtcttacatttaaatctttaattcatcctgagttaatttttgtatatggggaaaggtaggggtccagtttcactcttctgcatgaggctagccagctatcccagcattatttattgattaaggagtactttcctcattgcttaattttgtcaactttgttgatgatcagatggctgtaggtgtgtggctttatttctgggttctctattctgttccactggtctatgtgtctgtttttgcaccagcaacatgctattttggttactgtagccttgtagtatagcttgaagttgggtaaggtgactcctccaacttttttctttttgcttaggattgctttgactattcgggctcttttttggttccatatgagtcttagaacagtttttttttctaattctgtgaaaaaatgatgttgctagtttgatagaaatagcattgaatcagtagattgctttgggcagtgtagccattttaatgatatcaaatgggaaaacattctatgctcatgggttgaaagaatcaatatcattgaaaggatcaatattccatttgtttgtgtcatctatgatttctttcagcagtgtttcgaaattctccttgtacagatcatttacctccttggttagatgtattcctaggattttattgttttgtggcccttgtgaatcgcactgtattcttgatttggtcctcagcttgagtgttattgatgtatagaaatgccgttgacttttgtaccttgattttgtattctgaagcttcactgaagttgttgatcagttctaagagccttttggcagagtctttagagttttctaggtatagaatcatatcattagtgaagagaaataatttgacttcttcttttcctatttcgatgtcttttatttcttgctcttgcctcattgctctgattaggacttccagtactatgttgaataggactggtgagagtgggcatccttgtcttattcctgctctgaaggagaatgcttccagcttttgctcattcagtgtgatgctggatgtggctttgtcatggattgctcttattattttgagaactcagacattgtattatggcatatgacagtacagtcgttgttgtcagacagtactatgaatcatggctgtactcctaatcagccttacgaacccaggcaacctattatacctttctaagtttttattttgccatctataaaatgaggataatataaactatgttgaaggttaaatgaaatagatgtgaaatacaaaaccattgtaaaggatgtagcagagttctagaaggaaattaagcatttaaaattaataatttccctagccacaccatgatggtattttcctttataaatctatcctgcctagaatagtgactgacaaatgggaagagctccaaagagattgtttctatgaaataatgaattatagaagagtaactagaaaaaagtgagatgtacaccacacaaaaatcactgacaatcctataaattaaaggtagtgataggctgtgtaaactggctcccttgcctcccacatagaaccttgcccctctgctgaaaatgttacagaaataacttgagttttgttgtgtgctggattggggttagactttggcaattaccaactttgtgaaatagattacaaagcttcatatatctcaagttcaatttctcactaatacagtagatgtaaaaaatgcccagcagaggaatgctggcaaaatacatggaatgtgcccccagatcatgctggcacagagaaattcgataattactggttttcttcttccagctcctctctccccactctgaagcccaacatgccatgccccagatacttgctatttgtgaccagccaggaacaaaggttgtttttaggaaaagcagaaccccatctttcttcaatttcctggtttcccttcgttctgacccatgaatgcttcccttacctctcaccagatgtttactggtgatttctgttatatggctaccagaccagctacaggtgggaagatgcaattttcatgccagtagggaacagcattctgctcagtatttatggccataaattaattaaattgtagaattagcagcaattttattacatgcaaagcaacaataaaatgatgtatttattgttctgctacagatggaagattgcactctgtcctttcctgaaagcaatttatcgttaattatcatttattatactctgggaagattttaatgtaattatttgatatactgaacatttcaagtgcatgagttgtaagatatttttgcaataatatttataatattattttaatcaccaaccaatgtaggatgtactataaatacagaaagttcatttttaaactgtggccatttttatagagcaggaaggaaggaaggaaggaaggaaggaaggaaggaaggttggttggctggttattttgcatctcaactccaggaaaatgagagaatgttgaataattgtggtgccttcttcagggttaattttagaataaaactttgtaaacaagaacataatttgaaaatctgaggagatgttgctaattaatttatttcacttttaaggaacgtcagtaatccaggtgacagcttcagatgcagatgaccccacttatggaaatagcgccaagttagtgtacagtatcctcgaaggacaaccctatttttcggtggaagcacagacaggtactgtggaatgtcactgtgatttgtgacacatggtgaataagaagtcccaggcctgaccagaacttatttaatactctgttttctcaaatatgaaaaaggaatacagagggctaccctatagggttagtgtgaggattagatacttggcctgtgcctatcacacagttagtacaccatgaaacatttattgttggttttcccatatttcacgatgacccaataacaactataatctaaaaactcaactttaatatcagaagtaagagagcaataaggactaagtcttccacagtgctctctatattcctcacataactgttgccatatctacagagagaaaaagcttccaaaggtctcctaaagatttaagtgagcatggcactcatgtgccaatatccagcaatcatgcagaattcagttattaatttatcattgttttccgtgacaggtgataatagacagtatgtgcttatatgagcattgtatatattttaaccgatttggttcactcttttaaaaattaatatttacactttaatgtattgcatgaaatatgcacctcctgctttaaacttaatatgcaccatcaaaacatttccatgaattgtatgtagcaatagacttacagaagattgtgctggaagtcaaaaagtatgagtttagtcatggatattcatgcaatgaccactcaagtatttcagtctttagggtgtttatatctgagaagaatagggttattacttgaatgtacaacaaaacataaatacaaatgctgtatagtaatttttatgatttgcttgaaaagacataatgatgcttcagtatggctgcctttggttgtaattaccatgttgaaatgattcttgctgagggcatgggatattttattcagcattgcttcctcagtgctcagaactttcttgttgtcataatgttataaacgaatatctgtgatgttgcctgcttacctgtccaggtatcatcagaacagccctacccaacatggacagggaggccaaggaggagtaccacgtggtgatccaggccaaggacatgggtggacatatgggcggactctcagggacaaccaaagtgacgatcacactgaccgatgtcaatgacaacccaccaaagtttccgcagagtaagtaggtggacttggctttcacttttccatggtgacacagccagctctctccctcctctaacctattcctgctttactgaggtatcaaaaagaaaatctagaaaactaagggcaattcatatcattcttacaaaaacaaaacacaaaaacaagacaacaacaacaacaacaatgtcggggagtagaggtagtaggagaatgaaaagatgtaaaaagttctacaaccctggaaacaaaatatcgtttttgctaagtattttgcttggtagtagtgatgcaatctagtaattaattaacccttttctgcctcagtgtcctcatttctaacctggatataacagtccctgaatcagttatcaattactgtgtaacaaattgctggaaaacttagtggtttaaaacaataaaaataataacaataatttgtttttatcatgtgtctggaatttgggcaaggcttggaggagacagcatgcctctgttctccatagcaacaactggggatagctccactggggttggaggatccacttccaaaccagcttacttgcatggctggcaagtttgtgttgattgctgcttcctttctgcgtgggctggttttggaaagtgtgatccccaagggcaccaggcagaaattgtcttgccttttgttaactagcttcagaagtttccactggaaactggagtcataagccaccaaatgtttccactggagtcataaggctcacaaatctaaggggagttcatgtagaccccacctttcaatggaagacctgtcaaagtcatgttgaaggaaaagcatgtgggatgggagatattgttttggccatgttttggaaaatacagtcttccacagtacctaattaataggattactgtttgaactaaaggagctagtgtaaaatcttataatgacaactgtctataagtcgtcaacaaattctagccattgttatctggggga

SEQ ID NO: 7018 - DNA, 6000 bp, Homo sapiens
tggtctgcagtcttcagagttaggggaatgggttctagagagcatccttcccagcgcagtgtgactctctctgtgtattgtcagggcatcgtgaacgaagtgcgccagtccatgcagctgatgctgagccagctgatccagcaactgaggaccaacatccagcttcctgcctgcctccgtgtcattggctacctgcggcgcatggacgtcttcactgaggctgagttgagggtgaagtttcttcaggcccgagatgcttggctccggtccatcctgactgccattcctaatgatgatccctatttccatattacaaaaaccatcgaggcctcccgtgtccatctctttgatatcatcacccagtaccgtgccatcttctcagacgaggacccactgctgccccctgccatgggtgagcacactgtgaatgagagtgccatcttccatggctgggtgctacagaaggtctcacaattcctgcaggtgctggagaccgacctttaccggggcataggcggccacctggactctctgctgggccagtgcatgtactttgggctgtccttcagccgggtgggagctgatttccggggtcagttggctcctgttttccagcgggtggccatcagcactttccagaaagcaattcaggaaacagtggagaaattccaggaagaaatgaactcctacatgctcatctcggctccagccatcctgggcaccagtaacatgcctgctgctgtgccagccacccagccggggacgctgcagccacccatggtgctcctagatttcccacccctcgcctgctttctcaacaatattctggttgccttcaatgatctgcgcctctgctgccctgtggccctggcgcaggatgtgactggggccttggaagatgcccttgccaaggtgagcacattctgttggttttctgctaccctgggccttctctggtaatgggtggccagatttttgtaataaacccgtctatttgacggtgtctgctgacatggagaggtctagtgtggttttggaggttctcctgattgagaagctctggccagttgcccttcatgggacctaggacagtccatgaagtgatttgcctatagtaacaattcggtaatacacgtattagctttctagtgctgcataacaaatttccacaaacttagtagcttccagcaacacatttattaccttccagttttggtgggtcaggagtccaggcacagcacaaccgggtcctctctgctcagggtcttacagggttgccatcaaggtgttggctggactatggcctcatctggaggttggggctccatttcagactcatgcaagttggcaggggtcagttctttgcaattgcagaactgaagcctcagctcctagaggctgtccactccataggcagctgacaacatggctgtttgcttcctcaaggccagcaggagagctactctcttgagtctcttcttttaggtacctccttttaaaaacttcatttgattaagtcagatgattagggactttaattacatctacaaaaccctttacctttagcatattcttttatttttattgttaaaagtgttttattttacagagagatagtgtctccctatgttgcctaggctggtctcaaactcctggactcaagtgatcctcctgctacagaccctcaaagtgtgggattacaggtgtgagtcacttgaacttgggaagtccagcatcagagtctgtgttcttaccctgtcgctatgccacatatctgtagtgtcagctaggctgctctgttggttttgaaacttctctttcctagctgttttcttacagttttccagtggttctagctttctgaaacctcggggcttagtagaaagcttgtatagttttgcttcattttcctggatccagcacagttctggttggtcctccgtggaagttaagaaccatgtattgggccgggcgcagtggctcacgcctgtaatgccaacactttgggaggctgaggtaggaggatctcttgaagccaggggctccagaccagcctgggcaacaaagcaagaccctgtctctacaaaaaattttaaaacttagccagacgtgatggtgcacgcctgtagtcccagctacttgggaggctaaggtgggagtatcccttgagcccaggagtttgaagctacagtgagctgattgtgccgctacactccagcttaggtgacagagcaaaatcctgtctctaaaaaaaaaaaaaaaaaaaccaaaaccatgtattctctctatagttttatgacactcctccactggaaccggaaactatacccgtaatgtaacaagttgggtctgaacttcacattaataaagtgacacaattgtggacaatgaccataattctgagtttaaatgagacagtaaaataatgtactgttaaattactttgttcaggaaaactggaggggcatacatttttttgcctagtttcatgcactgctgtcccagtggtgataggctgtcccagtaattgacggtgcccttgtctcttaggtaactaaaataatcctggccttccatcgcgctgaagaggctgccttcagcagcggggagcaagagctctttgtccagttctgcactgtcttcctggaagaccttgttccgtatttaaatcgctgtctccaagtcctttttccaccagctcagatagcacagactttaggtaagagaatgaaaattctgtaaactgccttactgatgtgtaattcacatactaaataattcatccatttgtgtaagtcagtgttttttagtaaatatgaatccaattttagaatatttccatcactccaaaaagatccttcatgcacgtttgtagtcattcctcgacagcatccttagtccctggcaacctactttctgttgccatagatttgcctcttctggacatttcataaaaatggaatcatacattatgtggctgtatctggctaagcggaagaagccagtcacaaaagaactacatacgtatgattccatttatgtgaaatatctagagaaatggtttttacagtcttttttttttttgaggcggagtctcgctgtgttgccaggctggagtgcagtggcacagtcttggctcactgcaacctccacctcccgggttcaagcaattctcctgcctcagcctcccgagtagctgggactacagactcgcaccaccacgcccagctaatttttgtgttttagtagagacggggtttcaccatgttggccaggatggtctctatctcttgacctgtgatccgcccacctcggcctcccaaagtgctcggattacaggcgtgagccaccacgcccgtcctaaagtcttttttccaattcactttcacgtccttgtccctttgtggtaggagaggggcttggttgaggcacagcttcccaaagggcaatgggtcagtgcatcacacgtgcaaagcctggctgccctctgctttttccctggtgctgcctgaggtctgggttcctgctgcaggcaccctacactgctgttccgttacgttctgcttcacagtatagcttcccattccctgtaacaaaggtggtttttgctgtattaaaacatagtaattgatggctgggcgcagtggctcatgcctgtaatcccagcactttgggaggccgaggcggatggatcacctgaggttgggagtttgagaccagcctggccaacatagtaactccgtctctactaaaaatacaaaaattagcctggcatggtggcgggcgcctgtaatcccagctaccacggaggctgaggcatgagaactgtttgaacctgggaggcagaggttgcagtgagcagcaatcacgccactgcactccagcctgggcgacagagcgagactgtctcaaaaaaaaaaatagtaatggctcgttttttttcccttaaatttccttttttttttttttttttttttttgagacggagttttgctcttgtggcccaggctggagtgcaatggcgcgatctcggctaactgcaatctccacctcctaggttcaagcgattctcctgccttagccttcccaagtagctgggattacaggcctgcgccaccaagcccggctaatgttgtatttttaagagagatgggatttctccgtgtgggtcaggctggtctcgaattcctgacctcaggtgatccgcccccccctccccggcctcccaaagtgctgggattacaggcgtgagccaccgcgcccggcctcccttaaatttctatattgagttttattagtaactgttttccattttgctttccccacgtctgggttaggcattcctcccactcagctctccaagtacggtaacctagggcatgtgaacatcggcgccattcaggagcccctcgcctttatcctgccaaagagagagacgcttttcaccctggatgaccaggcgctggggcccgagctcacagctccagcaccagagcctcccgccgaggagccacgcctggagcccgcgggcccagcctgcccggagggagggcgagcggagacgcaggccgaaccgcccagcgtggggccctagccggcgtcccctgcctccagaacgcggtgcgtgaggttcccggcgcggggtggccaggactgcctcgccctggaaggtccggggcgggttcgggaggcgggaaggcgctcccgggaggagagcggaagggggcggtgctcactgccagtctaagcaggaaggcggggatccagtcgcggcttcgctgtgtgctggccgacggcgcttcccggcgtgccccgcgctgcggccggaaggggcgggccgggtcactgttaagggggccgccatggcccggctgtggggcgcgctgagtctttggccactgtgggcggccgtgccgtggggcggggcggcagccgtcggtgtccgggcttgcagctccacggccgccccggacggcgtcgagggcccggcgctgcggcgctcctattggcgccacctgaggcgtctggtgctgggtcctcccgaaccgccgttctcgcacgtgtgccaagtcggggacccggtgctgcgcggcgtggcggccccggtggagcgggcgcagctaggcgggcccgagctgcagcggctgacgcaacggctggtccaggtgatgcggcggcggcgctgcgtgggcctaagcgcgccgcagctgggggtgccgcggcaggtgctggcgctggagctccccgaggcgctgtgtcgggagtgcccgccccgccagcgcgcgctccgccaaatggagcccttccccctgcgcgtgttcgtgaaccccagcctgcgagtgcttgacagccgcctggtcacctttcccgagggctgcgagagcgtcgccggcttcctggcctgcgtgccccgcttccaggcggtgcagatctcaggtgcgggcggcggggaccggggctgctggagcagcgcgcgcgtctcttctgcccgactccgcgagagcgcagaagtggtcgcggttcatacgccggacctcccgcaggagcgaagtgggatgcgggagcggagaggcctcaggacggatagaagctcctgtggggtagagcccgctcagataggacgcaggggcgaggagaggtcccctagttccgctgttacctgacagcctggcgtctgctttctgctcccttgctctctgaggcaaacacgctcttcggccccagttagatccgccacggtggagttggagaagtgggggttagcccccgccagcctgacccagcccagggggctaggccattcccccgtggtaccacaggatgcctcgcggaatgcgggctctgctggggtcggggtgattgttcctgcacagcaagcccgtcggttcaagatggtcagaaaaacaagtggggtctcaagctgcagaacctctgttaggagttgggagcccacaggtacctcagaagtgggaggagtgttcggaagggtcgcaccgtaga

SEQ ID NO: 7019 - DNA, 6000 bp, Homo sapiens
aaaaactagctgggtgtggtggcgcacgtctgtagtcccagctacttgggaggctgaggcaggagaatcgctcgaacctgggaggcagaggttacagtgagacgagattgtgccactgcattcaagcctgacgacagagattccgtctcaaaaaaacaaaacaaaacaaaaaaaattttcatgttctgccgggtgcagtggctcacacctgtaatcccagcactctaggaggccaaggagggtagattgtttgagtccaagagtttgagaccaccttgggcaacatggcgaaactctgtctctgcaaaaaatacaaaaattagccagacatggtggcatgctcctgtagtcctagccactcaaggatgaggtgggaggatcggatcacttgaacccgggaggcagaggttgcagtgagctcagatcgcgccactgcactccagcctgggcaacaaagcagggctctgcctcaaaaaaaaaaaaaaaaaaaaaaagaaccaaaaaaggaacattttcatgttctaagggtctttaatctaaagatacccccggatccctaagccatcacccccactcctcccaccccgagccctaggcaaccattaatctactctgtctcaccatatatttttgttgtgtggtaaaatatacacaatataacatttgccattttaactatttttaagtgtaaagctcagtaacattaagtatattcacattattgtatagccatcaccactctccatttccagaacgttttcattatcccaaatggaaactgtacaccttaaacactaactctccattctcccctcaaccccaggtaaccttattctactttctgtctctatgatttaactattcttttttgtttgtttgtttgtttgtttgtttttggagacagagtctcactctgtcacccaggctggagtgcaatggcgccttctcggctcactgcaacctgggttcaagcgattctcctgcctcagcctcccgagtagctgagactacaggcaagcaccaccacgcccagctgattttttgtatttttagtagagacggggtttcaccgtgttagctaggatggtctcgatctcctgaccttgtgatctgcccgcctcagcctcccaaagtgctgggattacaggcaggagccaccgcacccggcctgtttgtttgtttttgagcctgagtcttgctctgttgcccagcatgtagtgcaatggcatgatcttggctcactgcaacctctgcctcctgggttcaagcgattctcgtgcctcagcctcccgagtagctgggactacaggcatgggccaccatacccggctaatttttgtatttttagtacagatggccaggctggtgttgaacccctgacctcaggtgatcggcccaacttggcctctcaaagtgctgggattacaggcatgagccaccacacccagcctgatttgactattgtgtttttttttttttttttttttgagacagagtttcgctctgtcgccaggctggagtacagtgtggcacaatgtcggctcactgcaacctcagactccctggtccaagcgattctcctgcctcagtctcccaagtagctgggactacaggcgtgtgccaccacacccagctaatttttgtatttttagtagagacagggttttaccatgttggccaggatggtctccatctcttgaccttgtgatctggccccctcggcctcccaaagtgctgggattacaggcgtgagccaccgcacccggccctgatttgactattctttatgcctcatgtaagtgggatcataacagtatttgtccttttgtctgacttactttacttagcataatgtcctcatagttcatccgtgttgtagcatgtgtcagaatttcctgtgttttttttaaaggctgaatactatgccaatgtagggatatacccattttgtttatccgtttatccttcaaggatgcttggtttgtgttctaccttttgggtatcatcaccatgtattttataaacacaaaagtaatgagttacagtttcctgacttaggatgttcattatctcatgtttgggagacctgagggctaaaatggatgcagtagagttgaagtaccatagacactcagagaagggcatgtaggttacgggggccgtggctggctacagggaggtgtggtctgggaagcctgaggggagtggatcgagggcaggggtgagagcagagacatggtggatttgagatgattgccacctctaatggagcagagagctaggggaggaaggttggggctggtctagggaaggccccatcgcttgctgaaaacattcccattttatcttggatgccatggggaccgttgaaggctttagagtaaggcatggcaatgatgaacaagccacgggagagcagtccagaagcagagcagtctggaagttgtggggctgacattgctcaggcctggcgtggggggcatccctaggtcccatggggccacctgaaatgttatcttttcttcctttcctttctcctttcctttctcctttcccttcttttcctttctcctttcccttccttccctttcccttcccctccccacccctctcctttcctttcctttcctttcctttttttttttgacagtctcactctgtcacccaggctggagtgcagtggtgtgatctcggcgcactgaaacctcagcctcccaagtagctgggataacagctgtgctccaccacacccagctaatttttgtttttttagtagagatggggtttcactatgttggtcaggctggcctcaaactcctggcctcaggtgatccggctggcctcgaactcctggcctcaggtgatccacctgcctcagcctcccaaagtgctgggattacaggtgtgagccaccgtgcccagcctgaaatgttatctttctttctttttgcttacagcacctacgccccagtgaagtccttccttcgagtggataaagaaaaggtaagctccccacttcttccccacctcagtggaaacagtgctggcccagcctgtgtgcctggtcctgtagctcaggtgttccatttcccctgcagaacctcagggtccccatctgccgagatgcctgaccctagcaggtgccacacgattcaggagacacagacgcacaggtctctgacaggcatagacaagtagaagctgctcagtctagcctgaatctctgcccctaaacccctcatatacctgtcatcccttctcctcccaggtccagatctacaacccagccttcttcaagtatatccacgacaggtggacagagcatcacgggcggtacccttccacggggatgctggtgcttttctttgccctgcatgtgtgtgatgaggtgggtaggcccgtggtgtgggtggtgggaacccatggaacagaggagtgcaggccttctcgggtcttagcaggctaacagaggaatgtgcttctgtaggcagaatccatgtggccttggtttcccccatctctaggctgtaaagtatagatatgcctttcccaaacgtttctgctttcatgattctaccaaatccaaaatctcttcattaaaaagttattggccgtgcgcggtggctgacgcctgtaatcccagcactttgggaagctgaggcgggcggattacttgaggtcaggagttcaagaccagcctggccaacatggtgaagccccatctctactaaaagtacaaaaaattagccaggcgtgttggggcacgcctgtaatcttagctactcgggaggctgagtcaggaaaatcgcttgaacccaggaggcgtaggttgcagtgagccgagatagcggcattgcactccagcctgggcgacagaatgagacgctgtcttgaaaaagaaaagaaaaaaaaacataaatagaatggagagtgtatgtagttgaatttcagctggacgactgcccccaccagctctgagccccaggcctacttcgtgtaaaaatggaactcagtcgttcagagaacccgttccaccagtggccagggctgccttgcaatgaagagcagggctgaggcccggcaagtgcttcactgagtggtgctgatcaaagtactccattaaaaaaaaaaaaaaaaaaaaggaggaatttgcaagggctgcaaagggaaggtggtgtccccatgtgagtccatgtccttaggccaggcctgggggctcctgcatctccccggggcctcccgtcccctctcctccctgtcatcccgagcccgccccgcgccatcctccaggtccccgcctggggtgacgctccgctgcgcttccccgcaggtgaacgtgtacgggttcggggccgacagccggggcaactggcaccactactgggagaacaaccggtacgcgggcgagttccggaagactggcgtgcacgacgcggacttcgaggcccacatcatcgacatgctggccaaggccagcaagatcgaagtctaccggggcaactgagccgggcctcgccgcgacccttccggcccatctatcgggcaccggggctccggcccgggacccaggaccagcaacccgcgaccaatcatgctgcagcccaggggcgtctgctgtgccccgccaatcacgagactgggggaccggccgggcctggcaccaatctgcgctgcggtcgggcggagcttctgtttctcccagccaatcatgtgactcaaggaaaacttccggcgctgtgtccagtctcctccaatcaatggccttcgggggcgggccagcggccgctcaatccccactccctcatgctttgggttagggttttctttcacgctttctgaggaggagagcatggcgcgggcctcggcgaagcacttccgtcagcctcgggcggaggatcgtcttagtagctggccagacctggaggagagcgggcggtctttgcgggcctcaggagataggtggccgcccggcccctttccccgcctgcccggataggtgcgtgcagacccaccaaagaaaagcggtcgctgcgggacccccagtcccacctcggccgcgctgtgggatggctgcgcccccagggcttcctgcgtctccaggaagccgggagtggcgccctctgcggggtggggtgctcccgggccgaactccggacaggtggaggggacagggcagagctcgaggaagccctgtccccttcagtgcaaggtgctgtcactcacgtgtgccctcgaccctcccgttcacccgcagccttctcagcgcctctccctgggccggaggcctcctcaccagcctacctgttgctctggaaaaaaatcccgtcccccgactccgtccctacccccagtcttcggccggctctggcccctggggagggggctgcacggcggaaggaggctggctatgggcccggctgcccgctgcatgtacctcctcctccacccatcgcctcttgcctgggggtaactttgcctggggctcattctttggttaagctgaagctgccgtgggtggccaaaccgcagattctttgcaaattctgagctggcagagctcgcagccgggagccggccggggaagaggagacttgcgcgccgcaagccgcctgcctccaccctgctctccatctcccgctctagaagggctgggaagctcgcggccggggttccacctggaagctgcttgcatggctgaacccagcttaggtccctgacggggctgctggtggaattctcccccttcgaagctggggaggtttaggagggggaaggcttctgtgaagctctcaaaccactaatagagccccctccccaacagtgacggcgcagatgctcccccttttcttagttgacaccaccaggcagcttcctggccgttggtaggttcctgcagctggctgagggaacagggaccggcaggggactttgttaggggagggttgggatgggcagtgggcccctgaaagttaatatattggaacctagctcgagtgtcgt

SEQ ID NO: 7020 - DNA, 6000 bp, Homo sapiens
tgggattacaggtgtgaaccaccttgcctggccaatagcttctttactgccctctactaactacaacatcaaaatgtctatggggctttgcgtggtgactaacacctacaatcccatcactttaggaggccagaacaggaggattgcttgagcccagaagttcaaaaccagcctgggcaacatgggaaaaccccatctctacaaaaaatacaaaaattagctggacatggtggtgcacacctgtatcccagcactttgggagactgaggcaggctaattgcttgagtccaggagtttgagaccagcctaggcaacatggcgaagccgtgtctctactaaaaaatacaaaaattagccaggtgtggtaatgcacacctgtaattccagctacttgggaggctaaggcaggaggatcgcttaaccccaagaggcagagattgcagtgagccaaggtcatgccactgtactccagcctgagttgcagagtggagttgcaaattaaaaataaataaataaataagttaataaataccagcttctatttaaaaaaaaaagctaccacattagagattagaagagcaccattcaatagaaatctaatgtgagataacaaagccagacaaaaatatcacagaaaacttcagaccagtagctcttatgaatatagacataaaggtactcaacaaggctgggcgcggtggctcacgcctgtagtcccagcactttgggaggccaaggcggacagatcacaaggtcaggagatcgagaccatcctggctaacaccgtgaaaccccatctgtactaaaaatacaaaaaattagccagtggtggtgacaggctcctgtagtcccagctactcaggagtctgaggcaggagaatagcgtgaacccagaaggcagagcttacagtgagccgagatggcgcctctgcactccagcctgggcgacagagagattctgtctcaaaaaaaaaaaaaaatttaactcaacaaaaccctagtaaagcaagtctagcaatatataaagaggattatatactatgaccaagtggaatttatcctaggaacacaaggttgatttaacatctgaaaatcaattaaaagtagtggccaagaccgcaattacttttgcaccatcctaataatacaccatattaatagaaaaaaggacaaaaaacacatgatcacctcatagactcagaagaaaacatttaacaaaattcaatatcctttcgtggtagaaacactcaacaaatttggaatagaggggaacttctcagcctgataaagagcatctgtgaaaaaccacagctggccaggtgtggtggctcatgcctgcaatcctaacactttgggagaccaaagcagtaggatctcttgaggccagaagttggagaccaaaccttggaacacagtaagaccctgtcctacaaaaattttttaaaaaaacaaccctcagctaatatcatacttactggtgaaacgtgtgattctttccccctaagatgaggaacaagacaagggtgtcttctcttactatgtctctagaacaagcaagcatgttttatttatttattgattgattgattgattgattttgagacagagtctcactctgttgcccaggctggagtgcaatggcttgatctcagcgtgtgcaacctccacctcctgggttcaagcaattctcctgtctcagcctcccgagtagctgggattacaggcatgcgccaccaggcctggctaatttttgtatttttagtagagatggggtttcaccatgttggtcaggctggtctcaaactcctgacctcgtgatccacccacctcggcttccgaaagtgctgggattacaggcgtgagccaccacgcctggcgcaagcatgttctaaaaaaaccttaatagtgagttggtggctgtatggttctatccagggcaattaggtaagaaaatgaagtaggccaggcgtgctggcttactcctgtaatctcagcactttgggaggccgaggagaatgaattgcttgagctcaagagttcagggccagcctgggtttgggcaacatggcaaaaccttgtctctacaaaaattacaaaaattagcaggttgtggttgtgtgcacatgtaatcccaggtatttgggaggctgaggtgggaggattgcttgaacccaggaggcagaggttgcagtgagccaagattgcaccactgtactctagcctgggcaacagagtgagactctgtctcaagaagaaaaaaaaaaaaaaagttgggctctgtgactcagacctgtaatcccagcactttgggaagccaaggcaggcggatagcttgagctcaggagtttgagaccagcctgggaaacattgatgaaaccctgcctctacaaaaaatacaaaaactagccaggcatggtggcacatgcctgtgatcccagctagttgggaggctgaggtggaggatagcttaggcccaggaggcagaggttacagtgagccatgattgcgccactgcactccagcctgggtaacagagtgagactctgtctaaaaaaaaagagagaatgatttgatcacgttattaacattgtatgatatctgtcaatggtcttgatcatcatcaataacagttgcgttaacagtagtggtggtgtttgtgagattgctattgacatatggttgatcagattcagctcctgaatctccctaccttcttgaggggtgtttttgaaagaataggacattgtttgtaagtaccaaatctttttgcagaaccgcctctatcaggccattcagagagctgatgacatcttggacctgaagttctgcatggatggagttcagactgctttgaggagtgaagattatgagcaggctgcagcacatactcatcgctacttgtgcctggacaagtcggtcattgagctcagccgacagggcaaagagggtcagcatccgaaactgttggtttttagtttagttaaaatcatctgtaatctgaagtaagcagactcgaccaataaaaacacatcagtttttaggaagttttcttttttctttttcttctttttttttgagacggagtcttgctcttgtcaggatagggtgcagtggtgccatcttggcttactgcaacctccgccttctgggttcaagcgattctcctgcctcagcctcctgagtagctgggactacaggtgcacaccaccacacctcactaatgttttttgtatttttagtagagatggggtttcaccatgtggacagagtggtcttgaactcctgatctctggtgatctgcccgccttggcctcccaaagtgctgggattacaggtgtaagctactgcgcccagccaggaagttttcttgtctggtaataggccatacgtaggtcctgtaccatcctggggcaggctttgttaaagcagtctcccctatgtgtggtttcactttctgccatttcagttacctgcagcttcagttattcatggtcaaccttagtccaaaaatattaaggaaaaattccagaaataaacatcttactagttttaaattgcttgctgttctaagtagtgtgataaaatcttgtaccaccctgtctgtcccttcatcacaagaagggtaagtacagtacagtaagatattttaagagagaggccacatttgcataactttatcatggtatgttgttatatcttattatatattattgttaatctcttactatgtctaatttacaaattaaactttatcgtaggtatgtatgtatgggagaaaacatagtatatttaaggttcagtactgtcgatggtttcaggcatccataacggtcttggaatggatcccctacagataagaagagactactgtattcccattttatggaaaaggaaactgaatccagatctactgattctctggccagcgggttctttgcacttggccatattgcctactcataaaatgaaattcttagcctgatattttagatcttccatgatctttacacactctgtttttctagacttgtttaatgttattcacttatgcatccactcattgtgcaagtatttctcaagctcctccatatgccaaggaatatgctacttggaatactctgcaaatattcttttcatctttctgcttctattcatgtctttcattccctttgcctggaatgtttgttctcctgtgcaggtatcagaatcctgcccatctttgagaggtgggatgtcaccttctctaggaagccttttctgattactttaaccagaaatgtgactttttgacacctttcttttttttgagacggagtctcactcttttgccggctggagtgcagtggcatgatcttggctcactgcaacctctgcctcccaggttcaagggattcttctgcctcagcctcctgagtaactgggactacaggcgcatgccaccatgcccagctaatttttctatttttagtagaggcagggtttcaccatgttggccaggatggtctcaatcccttgaccttgtgattcagccatctcggccttccaaagtgctgggattacaggcatgagccaccgtgcccggactttggcacctttcttatgacacatcatgtactgtatttcatcatcttgatttgtgcacaaactatctcttctacctgatcctaacttctgtgatggtaggatcagggctgattcatcttgtaatcatgcatattactagcacagcatcttgcacatggtaagtgcttaatacgtatttgctggatgaatagtattacacaaagtggcatggacctgccacagtactattctttacttgaattttcattttctccctgttgagcagggagcatgattgatgccaacctgaaattgctgcaggaagctgagcaacgtctcaaagccattgtggcagagaagtttgccattgccaccaaggaaggtgatctgccccaggtggagcgcttcttcaagatcttcccactgctgggtttgcatgaggagggattaagaaagttctcggagtacctttgcaagcaggtatggaccctgattgcttggcaggataattgtgtggctgtctgcctgcagattggggcactggatggatccagtttctgtggatactttctctcttctggatatgactccccttcctgcccttgctgtgtagccatgcaggactggatgcatgtgttcattcaacacacctgttgccagcctactgtgtaccaggcatggccaagacatctgccagtgcacattcatttccaacagaccaggcgaaagcatgtgaaattaaaatgcaagttctctgacaagttgaatcactctttttttttttttgagatggagtttcactcttgttgctcaggctggagtacaatggcatgatgtcagctcactgcaacctccacctccctggttcaagctattctcctgcctcagcctcccgagtagctgggattacaggcatatgctaccacgcccagctaattttgtatttttagtagagactgggtttctccatgttggtcaggctagtctcgaactcccaacgtcaggtgatccgcccacctcggcctcccaaagtgatgggattacaggtgtgagccaccacgcccagtctgaatcactcttaaagctcaagcaatcctcctgcctcagcctcccaagcagttgagactgcaggcacatgccaccatgcgttgcaatttttttttttttttatagaaacggtctcactgtgttacccaggctggtctcgaactcctggcctcaagcagtcctcccacctcagcctcccaaagtcctgggactaccaccccacctggccgttttttagctatatgtctgtgtgtgtcactcccctcccacaaaaaaattatcagaccattattatgccgttaagaaaaatgataccgttccctaagtgctgacatattttattctgtaacatgtggtttgttaaacggcacaaaacaatatgttgtcatt

SEQ ID NO: 7021 - DNA, 6000 bp, Homo sapiens
gttctactatgtactaatttcgtgttttaatgtttctaaaattaggatacatttaaaaattggtatcttgtcataattcagtgggcagcatgttttctatctcagtggtacataaaataatggtgtgaattacgattggtatcttacatttaatgaaatatggtagtaatgaataatactttagcttacataattttaatgtggcagaattatgaataagaccatatatatatatatatatatatatatatattttttttttttttttttttgagatggagtctcactctgtcacccaggcaacctctgcctcctgggttcaagcaaatctcttgcctcagcctcctgagtagctgggattacaggcatgcgccaccatacccagctaatttttgtatttttagtagagatggggttttgccatgttgaccagactaatctagatctcctgacctcaggtgatctgcccgccttggcctcccaaagtgctgggaataccgtgcccagcccccagtgtaatatatctgtacattgagagtgaatcttcactcttgcaacttttggccctagagaagactagtgtctctctctctcaaatattttagaagtttaatctacttttaggaaagattttcaaatgctagttcatacaatagctacgtagtacagtatggtttacctagcttgccctatatagcactttttttttttttttgagacggagtcttgctctgttgcccaggctggagtgcagtggcacagtctcggctcaccacaacctcctgggttcaagcgattctcctgcctcagcctcccgagtagctgggactacaggcatgtgccaccatgcccagctaatttttgtatttttagtagagacggggtttcactgtgttggccaggctggtctcgaactcctgacctcgtgatccgctcgccttgacctcccaaagtgctgggattacaggcttgagccaccacacccagccagcactttcaactcttatttctataagcaagcaaataaaccccaccagcattcaacaaattaatactgtttggcttatctaggtcttttgctgtataggctggttctgcaagtctttccgttccttctgtcatgtggagaggaggctctgacacattatagattatgcaggctttaaaaaacaaaagttcaagtctctgcatcccagttatccaatcacacaaaagcctaaaagcttatagttggtgaccagtatgttggtttgctatttttgggaagcttttcttttcatttctttctggctgttttttaagccaaaagcaccgatattttacttgcatagttgatcagttaccattaagtgaagttgccagaagaagaattggtcagcttttgaaaagaggtaggctagaattccttctgccagaaaggagaatgtggtttattactagttgtcatgatcaaagaaccgaacagtggatttttacaaataccacagggagtcaactcacgtgctgtgaattcctgatatctagaaaacaagtagtaggcaaaacttagtagtagtgaaatctgttgcttgacccatcatctgggtgtctaaatggtttttggtatctctgacctagcgttgtgtaattctttttctgaagagtgccctttgttcccccctagacattccagctgcagctcttgtctcctagcagcagcattgtcccagcatttaacacggggaccatcacacaagtcattaaagttctgaaccctcagaaggtgagtagcacatttgtagccaatatctgagccgaagtgtaagcatatttcccgaaataaaattctgctttgtttctttaggtttttctgactcatagttagagaagagatcaatgaaaatgcctggtctaacttccttgctcttttgtaaataacaaatggaacccagagacatcaggtggcttagtggcatcttattaaaatgcaacttcaaaaaaagctagattaaaggtctggtttttgggggtaggggagaagcttagacattttaatttatacacaagttgaaatctgaggtaagagcatttgttgaaaccaaatacctacatttactgctacagttattaagtatgaatagaaaaatagaggcattttaaatgaagcagccaaatgaaaaatagctttagaaactgaaattaagcaatatttttattatctcttctcaaagaaataagctcaccttaatagtaatcagttggttttcagtttttgaaaatggttcagagaatttctttaatagagctctactagttgctcataagtaacagtatactttctttctcttgtaacacttgcctttcctctgctattcactatattttgagcatcggcctctatagtacaagcacaaactcctttgaccatctgatacagagagtaaaaaatgtcttagtgcatttgtatttgaaatctgccatacaaaaagtgtctaattgagttctcttaaaactactgctgttacctgtgagttaagtcattttttaaaattttatgctttaggaacaaaaggtcatgttcacatttactgtaggtttttcagataaagcaacagtgtatctgaatggagagcgtacgatgagtatatgttcacctcattttttaagagacttggatacaaggtttgaatctttttgaaaaggactcagcaaaatgttactaggagaatgctccatggtggctcacgcctgtaatgccagcattttaggaggctgaggtgggtgtattatctgaggtcaggagttgaagaccagcctggccaacatggtgaaaccccgtctctactaaaaataaaaatattagtctggtgtggcggtgagccaagattgtgccactgcactccagcctgggcaataagaacaaaaccctgtttcaaaagaaaagaaaagaaaaaatgctcccaaggagttctgtccttttaatgcagttcaaggattaaagctaaccgtgtattctgcagatgcgctttctcaacttggtggcatgacattgttagcttcttggctcaagcctagagtactgggtgttttttgttgttgtttacctgtcattcttaacagacagctttgctttaagttttgacctctaagattaaaagtctatttgtggaccggacagattctggagatttcatttcagtatataatttgcacttctcttttcctcttatagcaacagctgcgaatgcggatcaagcttacatataatcacaagggctcagcaatgcaagatctagcagaggtgaacaactttccccctcagtcctggcaatgagggtttggcaccattctcattctttatcccactcaatcaaaggaactctgggaaggaggttgtgattgctggcaagtcccccccaactgtaccacgggcatgaggagctgaagagaactgctgaggaggattttcctaaagttactgctgaccttgaagcattgttaaagactaatgtcctctcctccactgttgaggctggctgcttctggaggctactttgcactcttcctcttctcctttttccgcacttctccacccctcccacatttacagccagaatcaacattccctgggcccctgaggaaataagcagctggtctggaggagaggactgcaatccatggcgaaaaaacactcactttgtctctgcagcaaagagttgccccttctttctactgttgtttctctgtggactgggcaaggtggggtatttattcctcactagctgggttaccatcttcaggcacttttaacatctggcattcggaatggaaatgtaataatggacattagggagccctgcctttttctactggttcccccaatgtttgaaagaggcattaggctcctggtagccttttctgtgcattgctgtatacacacagacacacacatgtatgtttgttaccaagaactggtcagaccttgcgagtttatttgtaaacactggacagatggagttaaaaagagcttttgttgagatttggcatgaaggatatggtgctctatttgtaatagaaacttccaaggctcttccagctcccctttctcgccattctttagctgtagtcatgaatagtctccatgattttcaaaattgattccctttaaagtgcaaaatggtcaccttctaaaagatatattcatagttattaatgaccctattcccaccacaaattttaaagtgctcctaagcccataacttgcctgtttgaactatggtaatgggtggaagaggagttcaccagtttcaaagatcagactctgtatcaaaagtacctttgcccttaggaagagtgagtattggagtcatcttatctattactccaaacctccctttttatttcttgagcctggcttggaccttggcattccgtttgaattccttctaactggaacatttgtgttgtatctgtaacactggcactgaaataaagaccacacggttaaagaaatctttccatattgtactttatggtgttggagtgaagccttgtagcttccatacccctatgtcagaggaggtcttacggacaccatagggtaggaatagcctttcctcagtctgagaaattggtctcttttaaaagacgaatctcatgaatattcacatcaaagacttgagctttttaaactagtgagagtgccaagtgctttttagaaaggacccatatgttatcaaactttgaaattgagttgctggaatgaagtagaggtgactctctctgtggtacacattgaatgtactatgtatgttcaagtattcaggcgccatgtcttatatactgaagaaagaaaaagtgaggcccaccttgctcttacaatgtttgcaattgttactgtattgaatacagtataatgactactatggcttcaatcttaaacctggaaacaaatatccctttttttccccttcatttcaccaagcctttacttaaaatcttcagtgtcttgtcaaatctagctctgtatcagatgctggaatattcctaacatttgacaaactggagttgaactaaaggctccacgggaaagtttctggtcttactagtgtgtatgagcaagatctgctaaaacttactccactgggtaaatggttgactgagtcaagaacaggataatatctcctgcatagttttcagtaatgtaagtgtggactagtgcatatttcagacaactgctctgcctgtgcaatgaaaaatagcctttaagggtttctttgcagactgatttcattggatggatacttaatgctgtgaaacatgataggattaacataatgttggtggatttcttgaatagaatttgtcttaacattcctctttgtgtagaggctttattttctctcttatatttgtagctaaccagctcaggtttttttatttgaactgggttgaatctctgaagaaatctgttcaagaccatgctataagacactgtcagctaatggagctgggaagggtctactctgctgacagagcatttccttgggtgatcatagtttcgaggtagagtttatgatcattcatagctttgtctagaaggagtaaaatatcatggccttaacacaaagggtgctgcgtagaatatgaattgattttggaatcagaacacaagcaccatactgaaggactagcagccaaataactgcctaggatactgatggttgtgaagactgtttcaaatgattggatctttgaaagcttcagcgtgccttagtttctaggatcagaattagttttcctctcacttggccttgcagctaaatggagaaatgtttcaatttctttgaatacttgcacatttcaataattcctttcccgagtataaccactcaagggggagcaaatttggatggatttacgacttcacaggcattgtgaggaaagagcattttccaaggctgttttgataaccctggggtgataagcagtgagccctcacacacttactttgacaatttc

SEQ ID NO: 7022 - DNA, 6000 bp, Homo sapiens
ggcctaaaccttagtttactttgacttataccatgtggtccccaactctttaactgtctgtccttatcagccaggattctgggcgatggtaaagttcgcctgggtgcagtatgtcagcatcctgcttatcttcctctgggtgtttgaaagaatcaagatcttcgtgtttcagaatcaggtggtgaccaccatccctgtgacagtgatgccccagggagaagtgtgtaaggagcacttatcctagaaaggccgtttctgaagactcagcaggaccatggctgcctcattgtcatcttctgggaacgtcttaggaccttttgaaagagcccagcggacacctgcgggcttgtgtgcttttccctcagagacaacggttctttccagttttgctctacacagttccgtatcttcagagctcctgcagaattgtcagggactagtttgtggaaaggtctgagagttcctggaggctataattagctttttgggtttttcttctttgccttagcgttgaatttcaggagaaaattgcagtcagttcagacatcttggaaagagtcccatctctggtcaagcagagacttttcctctgttgaactgaggaacacactgtgcatttcttccttctgttgtgagccactcttactcttttcagggctctcttgtgacaaacatgccaatcactagcactttgcacccctgggcttctccatttcccattcacagctttgatttccagagctgaggcctttaactggagacctggaggggcagggcccaagggcaagggccgcattagcacaggcaatcagggagggccgctgaaggacacttggaccgtccacctgccccagcccaacagtcagtcatctgtcatcagctcagctgagcagccctggatccctgcccgactgtggctggctctttgcccggtttttccctctgtctgtgcccctggatggcaggctgaagtcagaggggctgtttcattctcagccccctcagcagcactgggggaagaaagcattgtcacaacaggttctttctggccctcacccaacagcctgggcacttggccctcctcctccttgacagccctcccccttcctgcaaaggacaggggcgacaggggttggtgttgggattggctcccgctgcctgacaaccacaagtttatttggaaggctagcgggaagcccagcggctggcgtttcccttgactaaggaaaagggtgcccatcagagtggggcgggcagctttgggaaggacacaagaagcagtgagggtgtaaagaggatgctggcctgggcaggccagtccagcctggccactagcagaataccaagcagtccagtggattatcctcgtggctaagcaagtgtctgcaggagcagagatggctggaaggggcctctgcacacggaagatggcttgttcagccgattcacctcctgaggatgcgtgcagtctcctccaagaacacatggagctgcttcctgatcccaagcaggtcgttgcccctggaaggacatggctccggtgatccatgcttcatgcccacccagaaacacacccctcagtgtgtgcctcagtttaccttggagatcatttttcatctccagcatccgtttcctttaggctgactaaaaacagttttggaaacaaagctattttgaagtattcaagcagaggaattctctaacactgtcccccttgtctttttttaatattctggctattttagatgcctaaatttttttcttgagatttatttatttttatagatggggttttcactatgttgcccaggctggtcttgaactcccaacctcaggaaatcctcctgtctcagccccacaaagtgccaggaatataggcatgggccagtgtgccccgtctcttgagactgaaatgaaaaattgcttgtggtttaaatccccagaatttaatgaaacatgggaagatggctaaagatacgtataaactttggtttgcattttattaaattatttgaatgcaaaacttgtataaagaatccattatgttctgtagctttctaattaaaatgttcaacatggaaggttgtattagctatttttgaagcaaggctttggagggaggaagaatagggagggctgaagttgagcacacttctccgagttactcaccagtagccttgctttgccacggctctgcccaaagaccttggagcttttgttagctctttggcaaaagtttcctggtccaaccccaagtatattagtttttagtggaatccacatggcatatgggagctgcgggttggaaaattacaactgtgtctggtgaatatcaaattatttacggatcatttattggtagtttctgaaactgaaccacacagcatagttgcaggaggaagaaaggtaagaaatacacaggattttatcaactgagctgaagccatagataagtcatatttgagataattattgaatttgttttgtgggagagaaatctctaattcttccaaatgattagtccagtttctgccaaagcaggtgaggtgtctaatgccccactgagtgcccatcttgaagcttattaaagcaattctctctctttgcgtccctcttaccttatcctccacatccttgccccctctccttattcatgctttgtaaagaggttttggagctttctggccagataacttctaaatactgattaaggaaatgtaaattacatgatcctaaggaaaataatgattgccggccaatcccctacccagagttatggttggccttctggcacacatctttctatcccatacactatttctaactttttaaaaatcatgaacaggccgggcacggtggctcatgcctgtaatccgagcactttgggagacagaggcgggcagatcacatctgagctcaggagttcgagaccagcctggacaacatggtgaaaccctgtctctactaaaagtacaaaaattagcctggcgtggtggtgggcacctgtaatcccagctattcaggaggctgaggcaagagaatcacttgaactcgagaggcggaggttgcagtgagcctagatcctgccattgcactccagcctgggctacaaaagtgagactccatctgaaaaaaaaatcagtatcaaaatcatgaacaacacttatatgaaccctgtacataaatccttgtttctggtttatttccttaagatagctcctagaaaggaattaccaatccgaaaagcttacgaccattgtcaagaatcttaattcatcttgccaaaccacaaccaggaaggactgcttatttcttctcccagcagcagggagttcttgattaagatcccatcactaatttgacaagacctagaaatgcttcatccttttcaggtgcctgggctctgccctgttatttgtaaaggggattttttttttttttttttttgaaacagtttcgctctgtcgcccaggctggagtgcagtggtgcaatctcagctcactgcaacctccgcttcctgggctcaagcagttctcctgccttagcctcctgagtagctaggattacaggtgcctgccaccacgcccggctaatttttgtatttttagtagagacggggtttcaccctgttggccaggctggtctcgaactcctgacctcgtgatccacccactacggccccccaaagtgctgggattacaggcgtgagacaccgcgcctggccggattttttttttttttttttgcgagggagtctcgctttgtcgcccaggctggagtgcagtggtgcgatctcggctcactgcaagctccgcctcccgggttcacgccattctcctgcctcagcctcccgagtagctgggactacaggtgcccgccaccaggcctggctaatttttttgtatttttagtagagacggggtttcactgtgttagccaggatgatttcgatctcctgacctcgtgatccgcccgcctcggcctcccaaagtgctgggattacaggcgtgagccaccgcgcccagccctggccggaaatatcttatttattgaaacgtatcatgtctttatctggacctgctatgaacctgcgcctctgggcctaggctagggcagggaatgcgcaggaggaggggaaaagctgcggacccagctcctaaggccacctggtctctccgctcttcccagttgggacactgcaccgggtccatgtgtcatccaggtgccgtggccttgggaagggtttggattccaagtcacctcgccgcaaggatgcccccgagagtgaggagggtcaagattaagattcgacttccttcactagggcctttgtcctcccaggagccccccttctctggggatttggggtggggtggggtacaacgttcctctgtagtcagatgagaggtgactctgccagcgccctttgacattctgggctaaaagttgagcctctcagagccccagcccacctgggccctcctgccccgccctcggccggcgcccctcccccgaggcgtggcccctcggtcgggggtgggccaaccggctccttccttcccccacggcgctagctcccgctggccacctcgggaccgcagccacgtctgaaagcgcctcattgtgtgcgctcgggcgggctgcaccgggcagcgccgagggttgccggccggcgcgcggggagtagagggcgcgggccgcagtgccgggttccagagggagctctgcgccgggtccttccctgtggtagccccaggacacccccagcctcaacatcccattctgggactcctgccctgttcccacattcgttctacctcgagtctccaggagcttccagtggcttggtcaccgccaactctcgtccatgcctcttagagcccctttcccggcctcaccgggtgtcgcttaatagtcttgggaccttaaggagcaagtcagcccctgcggaccctcccagtgaagagaaagagctggctgtgcggtggaatttggaagagacgacgtttgggagcctttgctgagtccagggagagaggcgtcccccaccgtgccgctgcagctcgggcagagccgccaagctttggggtacgttggttcttcattctccgcgggggatgtccccacactcgggtcggctgggggccgggctggtggcacagctggggacgctcctctgtcctgcaccggggacctggggtggcgggaagagctgggagtggcttttccatcagcaacgtggaaagggcatcgccgctgttggcgccggtttggaagtgtcttgctggggcttcggctgcgcaggagaatcctcactgcgaggggagaaccccttttgtctcgatacttgagtttcaaaggacatgactttcaaaagctctccaagggctttttccatagaattattgagagacggtagcttggcgggttgatttggaaccagacccaggggaattggagtcctgcgtcactgcttctgacggcttcatcttgggcttcaggacaggccctctgggcctcaggacaggtgcctagcaaatgttgactttcctttctcctccctttttcacagaggcaaggcagtcaagtttcccatttttgaggatgggaaaactgaggcctgaagagcagaaaggagttggctgacttaaacccacaagcgagtaggccaagtaccagggcctctgagggtgctatgctgctccgggagctggggctgggctcctctccagcctgagaggccggaacttttctggctttgttctacaaacagagtcaactggagtatagagagccagagagtgacttgctctaagtcacacccctcactggtagtagagacaggatttgaacccaatccggcttcagaagccaagcttctaaggccagtcgcagtggttcacgcctgtaatcccagcactttgggaggccgaggcaggtggatcacctgaggtcaggagttcaagaccagcctggccaacatggtgaaaccccatctc

SEQ ID NO: 7023 - DNA, 6000 bp, Homo sapiens
cagccaggattctgggagatggtaaagttcgcctgggtgcagtatgtcagcatcctgcttatcttcctctgggtgtttgaaagaatcaagatcttcgtgtttcagaatcaggtggtgaccaccattcctgtgacagtgacgccccggggagacttgtgtaaggagcacttatcctagaaaggccatttctgaagactcagcaggaccgtggctgcctcattgtcatcttctgggaacatcttaggaccttttgaaagagcccagcggacacctgcgggcttgtgtgcttttccctcagagacaacggttctttccggttttgctctacacagttccgtatcttcagagctcctgcagaattgtcagggactagtttgtggaaaggtctgagagttcctggaggctataattagctttttgggttttccttctttgccttagcgttgaatttcaggagaaaattgcagtcagttcagacatcttggaaagagtcccatctctggtcaagcagagacttttcctctgttgaactgaggaacacactgtgcatttctaccttctgttgtgagccactcttactcttttcagggctctcttgtgacaaacatgccaatcactagcactttgcacccctgggcttctccatttcccattcacagctttgatttccagagctgaggcctttaactggagacctggaggggcagggcccaagggcaagggccgcattagcacaggcaatcagggagggccgctgaaggacacttggaccgtccacctgccccagcccaacagtcagtcatctgtcatcagctcagctgagcagccctggatctttgccgtactgtgactgggctctttgccctatttttccctctgtctgtgcccctggatggcaggctgaagtcagaggggctgtttcattctcagccccctcagcagcactgggggaagaaagcattgtcacaacaggttctttctggccctcacccaacagcctgggcacttggccctcctcctccttgacagccctcccccttcctgcaaaggacaggggcgacaggggttggtgttgggattggctcccgctgcctgacaaccacaagtttatttggaaggctagcgggaagcccagcggctggcgtttcccttgactaaggaacagggtgcccatcagagtggggcgggcagctttgggaaggacacaagaagcagtaagagtgtaaagaggatgctggcctgggcaggccagtccagcctggccactagcagaataccaagcagtccagtggattaccctcgtggctaagcaagtgtctgcaggagcagagatggctggaaggggcctctgcacacggaagatggcttgttcagcccattcacctcctgaggatgtgggcagtctcctccaagaacacatggagctgcttcctgatcccaagcaggtcattgccactggaaggacatggccccggtgatccatgcttcatgcccacccagaaacacacccctcagtgtgtgcctcagtttactttggagatcagttgtcgtttttagtgctcctttaggcttactaaaacagttttggaaacaaagctattttgaagtattcaagcagaggaattccctaacactgacccccttgtctttttttaatattcaggctgttttatatgcctaaatttttttcttaagatctaaacgaaaaatagtttcttgtttaaattcacataaggcaatgagatatggaaagatgacaagatacgtataaacattggtttgcattttattaaattattctaatgcaaatcttgtataaagaacccatgatgttttgtaactttctaattaaaatgttcaaaatgaggccgagcatggtggttcattcctgtaatctcaacactttgggaggccaaggtgggaggatcacttgagcccaggagcttgaggctgcagtgtgctatgattgcaccactgtactgtagcctgggtgacagagtgagaccctatctgttaaaataaataaataaataaataaaaaagtcaaaatggaagatcacatgtacctttttcgagggaaagggtttggaatggcaaagaatagggagggcagaggttgcacacacctgtctttattactcatctacagccatgctttacaaggctctgcctaacgaccttggaacttccatgaggtctttggtgaaagtcccctagttcttccccaggtagatgagttttcagtgggattcacatgccatgtgaaatctacgtgttggataattatgactgtgtctggtgaatatgaaattatttacagaccagatgttgatagtttctgactctgaatcacagcatagctgcaagaggtaaataaaaagcaagaggccgggagcggtggctcacgcctgtaatcccagcactttgggaggccgaggtgggtgaatcacaaggtcaggagatcgagaccatcctggccaacatggtgaaaccccatctccactaaaaatacaaaaattggctgggtgtggcgacacgtgcctgtcatcccaactatttagtaggctgaggcaggagaatcgcttgaaccctggaggcggaggttgcagtgagccgagattgcgccactgcactccagcctggcaacagagctagactccgtctcaaaaaaaaaaaaaaaaagaaatatagaggattttattaactcagctccgacccatagctaagttaaggtttgatgttattactgaatatttggaggcagaaagactcctgattttgccaaatgattagtacagtttcggcttaagtcagatgaggcccccctaatattccatcatgtaaggctaataaagcaattatttcttttttttttttccttccaacttttattgtagactcatggggtatatgtatgggtttcgtatatagctaaattgtacaacctgggggtttggtgtacagattatttcatcacccacgtaataagcatagtacccagtaggtggtttttcttttctttttctttttcttttttttttttttttttgagacagagtctcactctgttacccaggctggagtgcagcagcatgatctcagctcattgcagcctctacctcccaggttcaagtgattctcctgccttaccctcccgagtagctgggattacgggtgcccaccaccatgcccggctaatttttgtgtttttagtagagacagggcttcaccctggtggtcaggctggtctcgaactcctgacctcaagtgatccatccgctttggccacccaaagtgctgggatcacagcagtttgatcacagaagttattatggttggcattctggcacacatctttctaatcttttttgttgtatgtaacctttttagtatcacaaacaacacttttataaaccttgtgtagaaatcattgttgctggtttatttccttaagatacattcagaaaacttatgaccattgttaaggatcttaattcattgccaaaccacagccaggaaagactgctaatttctactcccagcagcagggactcctcgtttcagataccaccatggattaaaggacctcccaatgctctatccttttcagattactggactctgcccgtttgtttctttgtttttgagatggagtctcgctttgtcacccagtctggagtgcaatggccccatctccgctcactgcagcctccacctccggggttcaagctattctcctgtctcagcctacctagtagctgggattacaggcatgtgctaccatgcgcggctaaattttgtattttcagtagagatggggttttgccacgttgaccaggctggtcttgaactcctgacctcaagtgatctgcctgccttgcctcccaaagtgccgggattacagtcatatgccaccaggccaggctgagctgttatttgtaaggggtgggtggggagcttttatttactgaaacatatcctgtattcattggaacatgttatcaagcctgcgcctctgggcggaggctagggcagggagggcacagctcctaaggccacctggtctttcaactcctcccagctgggacactgcaccgggaggcagcacggattcctgtgtcatcaaggtgcctgggtcttggcttagggctgaggttggggccttgggaagggtttggattccaagtcccttggctgcaaggatgcccccaagagcgaggagggccaagattaagattcgacttccttcactagggcctttgtcctcccaggagctcccaggttctctggcgattgggggggtgaggaagggttacaacgttcatttgtggtcagttagatgagaagtgactctgccagcgtcctttgacatccccggctaaaaggtgcgcctcttagagccccagcccacctgggccctcctgctctgccctcggccagcgcccctccccgagacatggcccctcggtcgggggtggggagagggagctgggggcaaaacctgctccttccttccttctcccatttccctggctcccgccggccaccctgggaccgcagccacgtctgaaagctcctcaccaggcagcgctgaagattgcggggcagcgccgagggttgttggccggcgcgcggggagtagagggcgcgggccgcagtgccgggctccggagggagctctgcgccgggtccttccctgtggtagccccaggacacccccatcctcaacatcccattctgggactcctgccctgttcccagattcgctctgcctcgagtctccaggagcttccagtggcttggttacccccgactcttcgtccatgcctcttagagcccctttcccagcctcactgggtgtcccttaatagtcttgggaccttaaggagcaagtcagcccctgcggaacctcccagtgaagagaaagagctggctgtgcggtggaacttggaagagacgacgtctgggagcttttgctgagcccagggggagaggcgtccctctggctgctgctccagctctggcagacacgccaagctttgaggtactttggttcttcattctccaccggaggtgtccccacactcggttgggctgggggccgggccagtggcccagctgtgacgctcctctgtcctgcaccagagacctgggttggcgggaagagctgggggtggcttttccatcagcaacgtggaaagttcatctcccctgctagcgctggtttggaagtgtcttgctggggcttcggctgcacgcgggaatcctcactgcgcagggcaggggtcggggtgcgggttcttattccatacttgggtctcaaagggtgtggctttcaaaagctctccatgaaattcttgagaaaaaatagcttggtgagttaatttgcaaccagactcaggggaagtggagtcgtgcctcactgcctctagggccttgatgttaggctttaggaaaggccctctgggccccaggacagtacaggtgcctaggaaatgtttttttgtttgtttgtttgtttgtttgtttcgagacggagtctcgctctgtcacccaggctgaagtgcagtggcctgatcttggctcactgcaacctgtctcctgggctcaggtgatttcctgcctcagcctctggagtaggtgggattacagacgcccgccaccacacccagctaatttttgtatttttactagagacggtgtttcaccatgttggccaggctgtccaattcctgacctcaggtgatccgccccgctgaggctcccaaagtgctgggatcacaggcgtgagccatggcactgggcccaaatttttgtttttgtttttgttttttcagatggggtctcactctgtcacagagcctggagtgcaattgtgccatctcggctcactgtaatctccacctcctgggttcaagtgattctcctgcctcagcctcccgagtagctgggattataggcatgagccactctgcccagctaattttagcgatggggttt

SEQ ID NO: 7024 - DNA, 6000 bp, Homo sapiens
tgtggatggtaggagtggataccagttttttttcactgcctacatatgcttcataagctgtattttgtcttttttcctctacagacctctgtcttctttcctttcatgcccgtaatttatcaaatagatatggttttaatactttgctgatttgacatagcttcctttttcatttcattgattgctactaaaagatgcacaaggctttcaggtcctcacacgaatgatgagataagatccaacatcaagaatctgaagcaaagacactcgtggtttcagaatctataaacagagtttggtaaggccgggtgcggtggctcacgcctataatcctagcactttgggagcctgaggtgggcggatcacccgaggtcaggagttcaagatcagcctggccaacatggtgagacccagtctctactaaaaataaaaaaattagctgggcatggtggtgggcacttgtaatcccagctcctcaggaggctgaggcaggacaattccttgaccctgggaggcggaggttgtagtgagccgtgattgcgtcactgcactccagcctgggcgatagagttagaccccggctcaaaaaaaaacaaaaaaaaatagagcttggtgattttctgttgagtttgagtttgttggaggaatgcataatgattaggattaggtgtttttctattttaacaagttgacttctagagacatagaagactattctgacatgctacttaaaatttccatacaaattcaggcatatttgtaaaaaagaaaaaaatatcagtgcaaaataagcaagatcacatgagacaactgaaaggcacaaatactatccagatgttttttgttattgcccatttattttggccagtgaacatttgaaaggcccagatatgaagttcagggaccatgcactttgtgtctctccccagtattaatgcacttacatctatctgcttttctcttttagtggaggagataatgcctgttgtgtacagcaagacagtgggtcattgtgtatttacagaagtgatgtggattcctcccagactcattagtgaccagggctgctgggcctgtttgggtttcctagactagagaagaagacaggaaccaggatgggaagacggacatgttacattttaagctggagcttcccctgcagtccacggagcacgttctcggtgtgcagctcatcctgactttctcctatcgattacacgtgagtcagtccgctgggaggctgtcctctcccttgtgtctttttagtagaccagagtccttcttctgatttctagaagacccgcactctagcgggccctcttccccatgtagtttgggatttaacttaggccaatggaatggttttcactagtcatattaactgacatgggctattaatagctcagaaggttctaggcagtgtttcctgcatggctacgctaggtatgtgagggcctcttaggtttcagccaagacaggtgactcttagcacccagagcccttcagatctgatggcggttggtattgttggtccttctaatgatttcagaggatggcgaccctcgtgatgcagagcatggcgtttctccagtcctcctttcctgtcccgggatcccagttatacgtgaacggagacctgaggctgcagcagaagcagccgctgagctgtggtggcctagatgcccgatacaacgtaagagcgcttctcattgtccagctcctttgtttctctgtgttactgttcattaagttctttaaagaggggaatgaaaagtagaaatgtcaggccaggcgcagtggctcatacctgtaatcccagcactttgggaggcggagatgtgcggatggatcacttgaggtccggagtttgaaaccagtctggccaacctggtgaaaccctgtctctactaaaaatacaaaaaattagccaggcgtgtggtgcgtgcctgtaatcctagctacttgggagactgaggcaggagaattgcttgaacccaggaggtggaggttacagtgagctgagatctcgccactgcactccagcctgggcaacagagcaagactctgtctcaaaaaaaaaaaaaaaaaaaaaaaagaaaaagaaaagaaaagtagaaatatcatttctttgtgggtggcaccaaagagggtctctgtagaattcttgccatgaattttttcaaactacagagaaggtacacgcatagttacacctagaagggaagagaaacaaaatctgtgtttgtcgaagaactaaattgcttattgcttttaggtccacgtgggtgcacacacacacattgtgtcttccatacacacgcttggtcacacgcaggatgtactccgaaggacactgtaaaatgatgatgtaaaatgttcatgtaaagtatttcagaaatattactagccatagtttactgaactcataacatatgccacccctgagtgcaggcgtttacctatatcatctcctttaatcatcatggcaacctctgagctgcctgcattgtcctttccccgcactccagccacttgtcccatcactgcccccgcttgctcccttccagcccccctggcctttttgctgttcctcaaacccaagaagcagctgccacctcagggcttttgcttttgccatttcctctgccaggcatccatgtggcttatcggaccatgccattcaggtccctgttcagatatccccaagcccagtccttctctgacctgcttctacagtagcagcccctccttccaccattcctcagccagactctccctcctgccgcctggcctactcaggatatgtgtttgtgtgtttatttgctgtctccctcagccttgacagcagtggcatctcaaatactatcacatccgtgcctagcacactgcctggcagatggtaagctcacagagatacttgtttaaataatgaactcattttgcagaagacgtaactggggcttaaagtgattaattttcccaaaggctcaaatcttgaaagataacagagcctgtctgtgtgcagaactcatgcatctaatcactcattcctcacttttattttatcacaatggggaccatagaagttgagctgaggtacttctgaaaatgaaaaagggatgttatcggttattacagccataaacccagacttgtagatatatagtgggttttactgttgctctgactataatcaatataagttgtaaagaataggaagctgcaacatatgaaatgaatatggcactttttgtttgaatgtctatatatcagattacattaacagcaagcaattatttcctcctttaagggattatatgcttatggtttgcattttatctatatctctatatttaaaagtgataaagaacttagcacccagaaaagaccaagaaaatgacaaaggagttggaagtatggtttcttttttttgtctttgtgtaggggtttttatttgtattttatttttatttttgagacagagtcttgctctgtcacccaggctacagtggagtggcatgatctcggctcactgcaacctctgtctcccaggcttaagagatcctctgatttcagcctcctgaatagctgggattacagccatatgccaccacgcctggctaatttttgttttctttgtagtagagatggggtttcaccatgttggccagactggtctcgaactcctggtctcaagtgatccatctgcctgggcttcccaaagtgttgggattagaggcgtgagcttccatgcctggctttttatttttttttatttttatttttttttgagagatgaagtctttctctgtttcctaaactggagtgtagtgagtggcatgatcatcattgactacggccttgaactcatggcctcaagtggtcctcctgcctcagcctcccaagtcactgggattgtaggcatgagccaccacacctggcgaaaatacggtctgttaaaataatttaaggaattctttctcccgctgagataaagaggggtattttaaaaatagctttaaaacctgtaaaacatggacactgaccccttatttccatccacagaaagaaagactgagagtaaatgggcttaaattgttgcaagagagtttattcatctttgaagagaagattattgatactgcagtaggccaccaagaacaagagggtgctctgtgggaccagcctgggtgggcagcagcctgttttattcatctttgaagaaaagattattgatactgcagtaggccaccaagaacaagagggtgctctgtgggaccagcctgggtgggcagaagggtagaaggaaaaggggaggagtctcccaggtgctcacaccacatcctcctcccgtgtcccagatatccgtgatcaacgggaccagcccctttgcctatgactacgacctcacccatattgttgctgcctaccaggagaggaacggtgagtcacaggtagagcccattcagccgctgctcaggactttcaaggttagtgggggcaacagagacaagcagaactggaacccttgtgatgaaaatgtcaaaacccgtgaatgctcaacgatgggagcaaatatgctgtccaggatttgtctttttcgtcctgatcttcagacctgggaccgcccccacccctccagcatcccatggtccagcaggctagtgatggttaaatgccatcattatcccaccactggcttagtgggtttctcttttaaaaaatataagcctaattgagttgttccccataccacacctatccacacctataacagatgccaaagacaaattgctgttcatgcttttcagagaaaaacagagaacgtgggtgactctccccacattagcagtccagcaggagaacaggagtgcccctgtttcctgccagaaggcacagtgtgcttattccttacagagctctaggccatggcatgtgtggactcggcacgtttgtctggtcggtggctgaggttttctctaaaagcatctacagtgttacttggcaagcagacatcatggagactatacacagacgtctcacaagggggatgactgcaaatccagtattgcttactgattttatggcatatactagtggcattattgcaataatagagggaattttaaaacaaaagtagaaaacattgccctacaaatcaactattttttcattcctttcattctttagccttctgcagatctttttatacagccattgtagtgtagaaacacattgggatccaagttacttttatttatttaaacttggaatataaatacttccccacacagctacaaagctgtgatactacttttagtggcagtatagtattccttcagttagccattcagcacatgtagaagaaactctttccaagttttttatgtattttaacaaaagtattttgactattattttaacaaataatgtgtgatcagctttgcacatgcaatttctctttccttccgaatgatttctttcagttctgaagcacaggataatttccaggtatcaaataatctttatagccttcaactgccagagtcaaacagccatcgtggttaatggttaatgattgcattgcagttaccaccgtcctgaatgatcccaaccccatctggctggtgggcagggccgcagatgctccatttgtgattaatgctatcatccgataccctgtggaagtcatttcatatcctttctgttaaagagtccatgttaaggctggatgtggtggctcctgcctataatttcagcactttgggaggccaaggtgggaggatcatttgaacccaggagttcacaaccagcctggccaagatagtgagtccctgtctctaccaaaaaaaaaaaaaaaaaaattagccaggcatagtggcgtacatgtgtagtcccagttacttgggatgccgaggcaggaggattgcttgagtccaggaattcaagcttgcagtgagcgatgattgtgccactgtactccagcctcggtgacagagt

SEQ ID NO: 7025 - DNA, 6000 bp, Homo sapiens
cctggaccttctcccagggccacagatcctcctggcccctctcctgctacacaccttcctgagcaccagtgcaacacaagccaaccacatcctgcagatttgctcagagtttgggtgaagcatggttctttttcccaaaagcatccttccatagcaccatttctgcaacctgcattaaaagtgacgttttggccgggtgtggtggctcaggcctgtaatcccagcattttggaaggccgaggtgggtgggtcacctgaggttggaagttcgagaccagcctggccaacgtgttgaaaccccaactccagtaaaaatacaaaaattagccaggtgtggtggtgcatgcctgtaatcctagctactctggaggctgagacaggagaatcatttgaacccaggaggcggaggttgcagtgaggcaagatggtgccattgcactccggccttggcaataagggggaaactccatctcaaaataaataaataataaaactgacattaaaaaattaaaatgtctatttagagctgatgttattattcatgacccctttcaaaaccagaagctagcagtgtgtgccacgttcagggctcctgatggatcatagtgtctgtccatttctctcagggtcttgctgggctctgtggagcagctgtgttgagaggcagctgcttcgcacagaccagagggagctggtggttccagcatcctgcctgccgccgcctgactctgctgtcaccctgcgcctggctgttctgagaggccaagagctggagaacagggcagagcagtgcctctacgtgtctgcgccctgggaactcaggcctcgagtcaggtggggcacgtgggcagttcctccagggtcctgattcattcgttcagccaacacttactgaggacccactgaggctggggctgccttggggcaaggcttgctgtggtggtctctgttgtcataggggttactaccacctggtgatcagcacttctggacacgaatgaagaaggcagagagcgcacctctatgaaaactgccctgactggggttagagagacttctctcaggaactgcagctcagcagaggtgttcaggagaaattcacagggcagggaaggggcagctggagcaggaacagagcgggcaaagggagggagcagagaatcatcagggagcgaaagaggccaatgtcctgaggatggagaagagaagggtgggaaggagctggtagtgtaggcagggcctggctcaagtggggccttgccggtcatatcaagattttagcctttttcctaagagtgatacagagaaaccacccaagagttctttatttttatttttatttttttgaaatggagtctcactctgtcacccaggctggagtgcagtggcaccatcgcagctcactgcagcctccgcctcccaggttcaaacatttctcgtgcctcagactcctgagtatctgggattacaggcacacatgccaccgtgcgcagctaatttttgtattttttgtagaggcagggtttcaccatgttggataggctagtctcaaactcctcacctcaggtgacccacctgcctcggcctcccaaattgctgggattacaggaatgagccaccatgccaagccaagcaaccaagagttctaagcatgtgacttcaatatgctctggtggctcagtggagaatgacttggaagagggcaagagaagacccagggagattgcccaggctcttgcaggagtcaaggtaggaggtcaagtttgcttggactatcagccagtccctgcaggaagctgatggctcagccaaaccaggaatgaatggaagagagctgatgaagggactatttacaggtgagggcaggtataaggcaatgaagcaggggcgacaaggcaggactacaaccaagggaagccattatcacccccaggaatgcagaggtaagattaggcaggactacatacgtagggagctgtggccttggttggagaagcacagcatctctcacctgcagcccatcagggaaaagagcagggaaagccgtgaataaattccccaaactctctcctctcaccctccaatcctctatcaatggttcccattggctggacccagttagaagctggagggtgtggcagcttgggtgatgcagtgtatagagctcagtctcccaggtcagagccgcacgtgggaggagactggattggagaggcagatagagaatgtcctgcacacttggactagggcagacatgaggagataagtaggaagttcaagagctgtcatcaagttcagaccaaaggggaaactgggggaccgtcctgtggagggcaggtctatgcaaaccttcccgcaaagttcgaggaagcagagaggccagagaaagaagctgacaaatttagtttcttagaaagaaacatttaattgagacttgcgaacagaaaccatgatgtctagggcagctgcaagacaagatggtgaaagccagcgccattacccgccagaaccagggcttatataccataggaaaggaatgtgtaggacagtcgtagggaaaggtaagaatactatgtgaatctctttcagggcagcactcatagtaagtacatgctcttacacaaagaactgtagagagaatagaaatcttagaggcattcctggaattggggttaatcagtagtcaacgtggcagattagcatctgaaatggagttgctttggccttcacagagacattatagagaaggccaagagtttggatccagacacgatggttcacattctatctgcccacttagaagttacatcacttaggacaaatcacataagctctcggggcctggttagctcacctgtgatgtggggatgctaatatgtcactcatagggctattgtgagcattggacaagctagagacaatggaagtaatgtgtgcatggcaggcgtgctgttgaaccacagcattagtttactattatctgaactaaaaagaatcacagaaattatctaggctatcccctcattttgcaggtgaggaaactgaggcttagagagtttaagtgattcggctgggcatggtggctcatacctgtaatcccagcactttgggaggccgaggcgggcggatcacctgaggtcaggagtttaagaccagcctggccaacacagtgaaaccctgtctctactaaaaaaatacaaacgttagccgggcatggtggtgagcgcctataatcccagctactcgggaggctgaggcaggagaatctcttgaaccaggaggtggaggttgtagtgagccgagatcgtgccactgcactctagcctgggcgatagagtgagactcagtctcaaaaaaaaaaaaaaaaaaaaaaaaagtttaagtgatgcacacaaggtgacccttcataagtgacaaggacaggattagaacccaggtcctgtctcagcctcattcaccttccgtatcattacgctgtcagtgaatgacatgggaattcagtcaggccatgactcagtccatcttcacaaccaaggctacgtcccagtgttggttggggcaggggcggcttttattccatctttaatttgaaaaagggccatttcctaccctctcaaaggacttgagaaggactggacaaaagaccaggccagtggtcacaatgcctgtctgagtccgttttgcattttttttttttttttttttttttttgagacggagtcttgctctttcacccaggccggagtgcagtggcgctatctcggctcactgcaagctccgcctcccgggttcacgccattctcctgcctcagcctcccgagtagctgggactacaggcgcctgccaccacgcctggctaattttttgtatttttagtagagacggggtttcaccgtgttagccaggatggtctcgatctcctgacctcgtgatccaccagcctcggcctcccaaagtgctgggattacaggtgtgagccaccgcgcccggcccattttgcattgttataaaggaatatctgaggctaggtaatttatacagaaaaatggttggctgggcgcagtggctcatgcctgtaatcccagcactttgggaggttgaggcgggtggatcacttgaagccaagagttcaagaccagccaggccaacacagcaaaacgctgtctctactgaaaatacaaattagttgggtatggtggtgcctgtctgtaatctcagctattcaggaggctgaggcaggagaattgcttgaatctgggaggcagaggttgcagtgagccaagatcgcgccactgcactgcagcctgggcgacagagcgagactctgtctcaaaaaaaaaaaaaaaaagaaaagaaaaagaaaagaaagaagaaaagagatttatttggctcatgattcttatggttggaaaatccaagactggacatctgtatctgataagggcctcaggctgcttccacttacagtgaaagatgaaggggacctggtgtgtgcagagaagggtgggaggtgccaggctctttttttttttttttttttttggagatggagtgttactctgtcacccaggttggagtgcagtggtgtgatcttggctcactgcaacctccatctccctggttcaaatgattctcctgcctcagactcccgagtagctgggactacaggcacccaccaccacatcccactaatttttgtatttttagtagagacagggtttcaccatgttggccaggctggtctcaaactcctaacctcacatgatctgcccgcctgggcctctcaaagtgctgggattacagacgtgagccactgctcccggccatctttttagcaaccagctccggtggtgactaatagagcaagaactcgctcccgagggaggcattcatccagtcatgaggaatccaaccccatgacccaaacacctcccatgaagccccgcctccaacattggggatcatatttcaacatgaggtttcaggggacaaacatccagatgatagcaatgcctcggggagcttcctcactctgtcctctgtctgcctttcagctgtgagaggaactgcaggccagttaatgccagcaaagacattctgctcagggtcaccatgggggaggactctccagtggctatgttcagctggtatttggacaacaccccaacagagcaggtgagcacagtgacaaccactcaagaatggaaatctcccttgcgctttcagcacacccgtgtcgcatgcccggtactgggccagggttgggtcaattccattcagagcctgtggtgtgggactcagggtattgggctggggagaaaatcagggaattgacagcagggcaaatgggcacaaaggagcataagctctggagaaactttgcagcgggtgctcttggcatctcagcaaaagtcctgcttcccaggcggacgatcctaactccagcttttgtggcctgaccattggccaacgactgatgggtggagggtctaatagcccagcttctctgtccccaggtagggtgatttcagttgtgcaacttacacttcagggctctccgtgtgaccaggcagaggctggatgcctccagtaactgttttttgccttgttttgttctctgctgtttccctctctgcactgcttttccctgtgaatcctccttccatcaataacctgcacacaaggctggatatggtggctcaagcctttaatcccaacactttgggaggccgaggcaggcagatcacctgaggtcaggggtttgagaccagcctggccaacatggtgaaaccccgtctctactaaaaatacgaaaacattagcggggtatggtgatgcgtgcctataattctatctacttgggaggccgaggcaggagaatgacttgaacctgggaggcagaggttgcagtgcacagagatcatacactgcactctagcctgggcagcagagtgagactccgtctcaaaaatattttctttttaattttttttttttttt

SEQ ID NO: 7026 - DNA, 6000 bp, Homo sapiens
tcctgtgttcccttgactttgaacactctttcctagtgtattatgcgtcagggtgcagcatcgcgaagtttccagaagatggcgtcgtgataacacagactttcaaggaccaaggtaaaggatgccattcatgggccttttgcttcttctttctctcgctcccttttcccccgcttctctctctgtctctcatctctgtctcttttttaataaaagctttattgcatataatttacataccataacagttgcccttttaaagtgtacaattcggtggtttttagtgtatttacaaaattgtggaaccatcaccattgtctacttccagaacaattttatcaccgcaataagaaatcccatgcccattcgacattttggtttcttttaaaatttattgcaatattacttgaatggtacccaccactttgagaggctgaggcaggcagatcatgaggtcaggagatcgagaccatcctggctaacacagtgaaaccctgtctctactaaaaatacaaaaatttagccgggcatgatggcacgcgcctgtagtcccagctactcaggaggctgaggcaggagaatcgcttgaacctgggaggcagaggttgcagttacccaagatcatgccactgcactccagcctgggcaacagagggagaccatctcaaaaaaaaaaaaaaaactaccttcaaggttacttgatgaatttttttgttaccctttataaattgttctgcttctgtgattgccagattaccaaggttttagaaaaatgaaaatgtacaagattcgtttctgtcatgcaagtttgatactgtgtatttcagaatgagaggccccctcccttctaaagttgccattttctgtacgtggacgttaaggatagttttattagttgaaaacgatgaaaagagaggatttctcaccttatctacttgcaactggaatatagaacttatttttatattacctggaagggattttttccttttatcaaaagcaagtttgatcagtaactggatctgtgtttaataggttatatttcacctttaggcacataatgattgttttcacagtcacttggccatgggttagtgattctttctaaaagcatttctcatagacagtatcacttcaggttctagctgtaaacaagggatcaaagcggtggtctcattggcttgtaccctctgggagatccttgtttttggtaggtgggtggggagaatcagaagtagatttaaggatatgtgctttctttaggtgttctactacagtgtgaaaacgaaattttttaaaggggcattttattcccataaagactttaagttgaataatcttttgggtacaaaataagaatttgaaaataggaatttgggttatgcctgatcagaaaagaccctgatggcagaaataaaactcccatcaaataccacaaggcaaatggcggtgaatgtgttccagtttttcctgactgcttccctcttccaaagaatggcctattttttcttctactcagctcctagtaggattcctgcacagagagcagggaatgtcacgtttatagagctacagacatttcagatgttatcaacacggacaatactagattctgctgaagacgtacatcatgttctagtgctgaggaaagcaattgaattaggggcagagactcctagattatctggtggtgccactgatgatgctgcctgtggcatttatacatttttgacttcttgattcattacaaattttaaattatgtcatctgggcaaagataggaggctgtgctattggaacatgtgtctttgtgaaattaatgtaaccgatgtcttaaacctaaatataaatatgtggacatacttttaaaaattagttacatttgtcctagcttttcataataaaacgtgaaacctgggtattagtatatatgactgtattcatagagaaacctgtgtgtttagcaagatctgctggctgccctttgtgtaggtgtctgaaaacataggcctttcaggataataagaggggacacaatttaggttttttttttaagatagaggcagcacctttgcaattgtaaatattatgtactgccatggcaagtaaaaatgaaagtggatagatacggaaatacacacaaagtgaattttgctaaaacaaatcaatggcacttaagacatttctattctaaaaggcttattcttaaggcttttctattctaaaaatttgcaatgttttaattgaatattagattttgtaaatgtggtttatttgtcacgtggatgaaatatcaggaaataactcactgctcagtggaaactctcatggctgttgttttttgttgtgttgtttcaggattggaggttttaaagcaggaaacagcagttgttgaaaacgtccccattttgggactttatcagattccagctgagggtggaggccggattgtactgtatggggactccaattgcttggatgacagtcaccgacagaagggtaggaaaaacgcagatggactttgtgacttcggcactcagatcctttcttccctttgtctctggaaaggcgcccgtgagatgctggcagatcagccgacatctgttcacttgagccaggctcagctggagatgttgcagtcactttgattgcttggaatattttgataggtgtctgagtgtgcacacatttaataagcaaaacaaagctacttgttggggccatgatgcctcttctccatcttcaccttcctgaggccagcggaggcgggactcccgcgttgtggtggagagtcccttccctgacttccttggggcctgcccctcccaggcttcctacgccgtgctgcctggactttgtgggcactgccacgagggggcgcccttctctggtctgactcactcttttactggagggctggctcttggctgtccttccagacctggaattcgggcttttcttagcctttatcagtgaagagcgtttgttatctcgaggcgtgaaggggaggcaaataggcatgccagtcctcttccctccgcgtctttatgtcagtctctcgatgcatccgttggatttgggggcttgaggttgggcacagactatttttctcattttgtaaaggggagaaagaatggtaaaagtgctccatgtttttacctggtgagatgataatgacaccaggactgaaaggcaaccttctaatgcgctgtgaccactggggaactcgaggcacagggcgggtggtgagtgacaagaatgaggcactaacagcgtgcgctgagaggtgtgtgtgtgcccctccgtttcaggctgaagttgactacattcctggcatttatgtaaatccctagactgggatgggtctttttaaaaatcaaaaatgggccgggcgcggtggctcacgcctgtgatcccagcactttggtaggccgaggtgagtgggtcacaaggtcaggagttcatgaccagcctggccaacacagtgaaaccgcgtctctactaaaaatacaaaaattagccaggcgtggtggcgtgtgcctgtagtcccagctgcttgggaggctgaggtgggagagttgcttgaacccgggaggcagaggttgcagtgagccgagatcgtgccactgcactccagcctgggtgacagagcaagacactgttttaaaaaataataataaaataaaattaaaattaaaagtgagggttaaagtcacagttaaaggaggttaatgttttatttccacagagattttaagacctgagatctcctggtaagagtctttattaaattgtaaatgcctgagagggtggtcctaggccttacatttaaaatggcagcttttttcatctttcaggggcattaagcacttgaccagaagtgccctttaatgagaggaaagtacttaatggcatttttctcacacggatcttgtctagtccaggttgatgttaatggaacttgaaggggcagacacaggagaaacaagatggaaacagaagctccaggtttcaataccaggttgcgccttccctctcagaaaggatcctttgtgaacgggagctgttgctagcccagtgcctcgactctgaggtgtccctgaaaacaaattgccctttctctgctgtcacacttccagtggtcagggccctgccgactcgaagcccagctcaagtgaacagatgctgcatgggtgttgagccttgcctccaccccctggggtgtcagtacagttccttctccccaggagagcctctgggatgcagcaggagccatggccctccgttctcctctccctgttgcccctgagaccccgctctcaggcccttcttttctcagtgggtgtcacatggtctcactgtctctgaatgagctccattctgcccccatccatgaggagctgagtgtggcactcaggcagttggtgcaacctggtggacagtggtgctgaccacctggaaccctggggcactgggagtggagccctggtcaggtcatggctgtgtgtgcttatctggctgggctgggccactgagaatgcatgtcttatgagaataggggaatctggaacatgttggatttactttgacctaaactcgtgacttctgaactcccatttcccccacttttggggactaacttaaaaaaaattcctttagagatttcttcttaaaagctaaattccgggccacgtgtggtggctcacacctataatcccagcactttgggaggctgaggcaagaagatcacttgagcccaggagtttgagaccagccagacccatttctgcaaaaaataaaaaattagccgggcatgctgtcatgtgccttcagtctcagctacttgggaggctgaggcaggaggatcacttgagcccaggagctcaaggctgcagtgagctatgattgcgccactgcactgggtgacaagagcgtgactctgtctggaaaaaaaaaaaggaattcctaaacaggcttgttgacttcgcagactgcttttggcttctggatgccctcctccagtacacatcgtatggggtgacaccgcctagcctcagtcactctgggaaccgccagcgccctcccagtggagcaggctcagtcactccagagaggatggaaggtgagtggatgggcaggatgccttggggagggaattggatccagctgaacatgatgctacttcagccagtggctgtgcctgccagcaagtggggccagtttgtgtgcgccgctgagtggttttcgtaatggctgcgggtagagcagcactcagcggctctaacctgccgagaggccatccttagtccccagagggccatgatcgaggacccagtgtgcagctgctttcccacgtgcaccccgaccctcacgccactctgagtgtgtttaccgtcccgctctcacaggtgaggacagtggctcctacagatcttcaggaagaatcaccaacattctagagcacttgccaggtcccatgcagcaggctgggatgctcccatggattacctcactgtcccctctcagtaatcctgtgaaaatagatgttattattcccagtttccagatgaggaaatgagagctgagagaaattagataactgcctgagatcgcctgggcggtatgtggtggtggagcctcaacccgcctctggggcctgtgctggtgccgtggggccgccagctgcttggcacttagtggggtgggtatcagtgcgtctaagtccctggtgtgctggtccttacagcgctgcccgtagaaggctcatgggaaccacaggcatcatttaaaattttccaggagctgcgtttaaaaagtaaaaagaaacacagatgaaactattttaataatatacttgagcccaagacatgaagaatattagaatttaaacacgtgataccttatttcacttgctcagtagctacgtgtggttggcacaatggtgcagatctaagaaatagaaagaattttgaaaatgcagagtggttttttatttggcca

SEQ ID NO: 7027 - DNA, 6000 bp, Homo sapiens
gtatcggagagtaaatgggtggctgttttgggctggggttagaaataggcagtgactgcatatggggtgaggtttctttctgggatggtgggaatgttcaaaaattagatggtgatggtctcacaactctgcagatagaataaaaatcattgaattgtacattgcaaatgggtgaacttttatggtatataaattttttggggatggggggatggagtcttgctctgtcgcccaggctggagtgcagtggcataatctcggctcactgcaacctctgcctctcaggctcaagcgattcttgtgcctcagcctccctagtagctgggattacaggcgcccgccaccatgcctggctgatctttgtatttttagtagagacggggttttgccacattggccaggctggtctcgaactcctgacttcaggtgatccacctgcctcggcctgccaaagtgctgggattacaggcatgagccacctcgcctgacctatggtatataaattatacttcaataaatctgttgaagataaaatgggaatgttttggaagtcaggtgctgtggaggtcgggcagggagccaaggtcaatgaataagaagaaggtgacgctatgggcgggtgcggtggctcacgcctgtaatcccagcactttgggaggccggggtgggcggatcacgaggtcaggagatcgagaccatcctagctaacacgatgaaacccccatctctactaaaaatagaaaaaaaaaattagccgggcatggtgactggtgcctgtagtcccagctactcgggaggctgaggcaggagaatggcgtgaacccgggaggcagagcttgcagggagctgagattgagattgcgccactgcactccagcctgggcgacagagcaagactccatctcaaaaaaaaaaaaaaaaaaaaaaaggtgacgctatgatagcaagtctgcctgcagcgaacctgctgccatcgatgtctgcttgatgtaattaaatggtgcaagcttggactaaaaagtaatcgataatcaaattagttatttaaaattggacatacagagtgttttgggcaaaagtaaaatacagctgttaaaaacaagacgacttcatgcctgggtgtgtagttgatgattcaagatgaatatgcaatccatactgcatattcatcagtgaatatggattcagtggtaggaattatttgaagatacaaagaatgtttctccttgagggtaaaatttcagtttttgttttttattgaaatagacttgtaagcttgcaaaattaggaacattactgataggtgtacatgatccagctctactgggggagtgtctgagaactcgtgaagtatggcttagtttgacctttcgccccaagctgttggtccattgagtattttccttaggaaacggaagacatttaattaaaatgataaaccttaaaggaatatagtgagaatgtatgatattttttgacatgttgtattagaatatacattctaattttcctccacctttgattttatttggttgtgttactctggtttcctcagagcatggaatactgaaaaatcaaactctccttttcagtatttgcaaaagatgtattcggaaaatggatcatcactgcccgtgggtgaacaattgtgtaggagaaaagaatcaaagattttttgtgctcttcactgtaagtaaaaatatttttgtattgaatttacattgaatttgaaattctttaactgcttcttgcctggagcagagaaatctactaacgtcaggccagtttctctccagccttttctccaggattcaaattataatactgtgctgtcattggcaggaagtagtcccaataagtaatatgttgcttgtattattttaggtgttcactgtaatttaattctctcccagatgtcctcaatcgctattgtttattaataataacaggaatcttcctaaagtatgttagagtttatttcctttttcttttctttttttcttttttttttttttgagatggagttttgctcttgttgcccaggctggagtgcagtggtgtgatctcagctcactgcaacctccgcctcccaagttcaagtgattctcttgcttcagcctcccaagtagctgagattacaggcatgtaccaccacgcctggctaattttgtatttttcgtagagatggggtttctccatattggttgggctggtcttgaactcccgacctcaggcgatccgcccacctcggcctcccaaagtgctaggattacagtcgtgagccaccgtgcccggccgtttatttttttatagacggggttttgctgtgttgcccaggctggtcttaaactcctgagctcaagccatctgcccgtcttggcctcccaaagtgctgggattacaggcgtgagccaccatgcccagctatatttttctataaaattattctacttggtctaatatgatcttgggtaggaaaatgtcaactgctgccatttaatccttccctcatttttttctctgacaagatggaggtatacacatgatgtgtcatcagcctttgctcttagaaagacttgtttaagttactaactggctgggtggatcactagaggtcagcagttacagaccagcctggccaacatggtgaaaccccatctctactaaaaatgcaaaacagttagccgggcatggtgcttgtagtctcagctacttgagaggctgaggcaggagaatcgcttgagtctggcaggcggaggttgcagtgagctgagactacgccgctgcattccagcctggacaacagagggagactctgtttctaaaaaaaataaaaaataaaagtgactaaccaatctccccctcattctagatgtatatagctctgtcttcagtccatgctctgatcctttgtggatttcagttcatctcctgtgtccgagggcagtggactggtaagttccctggctatgtgtcattcctggctttgcatgctgttattggatgaaaggggaaagctttaaaggaagaaccagttttccaattttgaaggaaatcattgcaattattttagcaattgaattttaaagaatttagttaagttttaacaccaccattttactagtatattgttgccccaaaagcttgtgtctgtctgctggtcagctagctcgccattgttcaaagcaggcttcacgttgcttacgtgagtgaccgaccctaagcaagtgtagtgaaaataggtgctcgttatcctaccttagatatgcagtgaggtctggacaggctcatcccaccccaggggaacatggtgaacagactcctgtgagcactgctcactggtatgggtgcacacaactcttctggtctggcttcatttgccatttaattcataaatacagtgtcaatagaaacctcagaaaatacagactcttttgaaaccactggccaggaagtcatggtatgaatttttgcttggaagggtggccctcctctgctccttggagaacaatgaatgtgcccatttagaaagtgaacaacttccccctggaagctggccaggggctggccctagaggattcttctctgagccaaacattctgccactcggggtattcaggaccagttataaccaacttcctcttgtccgcagaatgcagtgatttttcacctccgataactgtaatcctgttgatcttcctgtgccttgagggtcttctgtttttcactttcactgcagttatgtttggcacccaaatccactccatatgcaacgacgagacggtaagctttgttctcggctgtgtggacttcatatgtggtccaagcttgagtaaatgaaaagtcctaatgtcaacaataggtgcctgtggactgactcgggaacgtaatgggacggtcttgatgagctgcaaccagctccctgtgtttgctgtttctttcattctgggcagtgcatatttctagtctcagtttgatttgcaagtcagcagagccaggcagattcccagctcccagtgcagtcagtaaatttcagggaactgactgcctttagggcctggctctgcaggcctggagtggcgctcagtaaatgtctgtacacagtaactaacgagcgacaaatgttggtgcctggctgggagggccattgtggtagtctgggctggccacgtggctgcagccgggctgggctcacagaggccacggggtctggatcggggcagagctgggaaggagagttcactcacctaccctccatcgagcccacactgtgcttgagcacggtgtgattctgaggcttggtggggtctgccgagcttcctggagccgctgccacttgcttttctttctgcttccaggagatcgagcgattgaaaagtgagaagcccacatgggagcggaggctgcgatgggaagggatgaagtccgtctttggggggcccccctcactcctctggatgaatccctttgtgggcttccgatttaggcgactgcccacgagacccagaaaaggtggcccggagttctcagtgtgaggcgtggctcatcagactgaaacttgctcacagacttccagttatttatttggggtctgaaggatatcaacagctcatctgtgaccaacagggcaactggaacctacacaaaccaattgcttgcagcaagcagagttttatatatttatagtcacagatggcagaggaagaggctctcagtccccacctgtacaacaacggaaaggtgtgtggccacacgaagaagccaaacgccgtggcctcctgcagagctggggcttctgtggagaatacttcgggttattacatgggttattcaaatcctgggtcctgagctgctgtttccaatcatgaagaaaaacagtgaatccagtgaacagggattctccaagcagtcatttcagggggctcctgctgaccccgccactcagcagtgcactccccggatcacagcagggcgtttacatagaaagacgttttggtctcgattagctccgatgctttgcactgaagttgcaaaagatctgtgcactgaacagtgaaggtggcttccggcacactccccgctgccccggaagagacatcctttgaccctctcagcaagtctgtgtgtgtgcgtgtctgtgcgtgtgcgcgcgtgtgtgcatgtgtgtcaaaattgccagtgttgtttaggcaatgtaacatttaccggctgtgtacagcaaacaagctattttttagaaaccgacgtttcagggaagaggggagagagccgcggggtcctgcccgtggttactatgaatgtattgctgttggaggacatctcgatccaaagaacagccgttcctgtgcggcccttcgttgccctcctgctttcattttttaaagaaatcttgagtgcttgagggccttggaactgattttttttttttgttccagccaaattagcagtgtataaatggcacctaggtaagagcagagctgcggctcggtgacttgatacttggggcagcccgatgctgtgtgtggggcaggggaggcatccttactggagaggcagggcccagccattgggcacctctgggaaggggaggggaccatgaggcagccagcccctggcaggggcgactgtgccaccgcaggcagcgctccagtcgggaatggccaggatggcgccctcttgttggagtttttggttagcttttacgttttcttctccacccacggcacaggtgataaaataggatccttggtgcggagcttaaaattatgccagaaagccaacagctcccctcgtggggccttgccttaaacttgcctggtttgtacattttttgccggacgcatcaagaagcaatctgtgacaaagtctgagggtcttcctttatgcttgccctccacactaagagaagttggcgtctccctcctgggaattgttttgcctttctgttcatctgtgaactgttttttgtttttaattactctgtaccccatccgaatcagg

SEQ ID NO: 7028 - DNA, 6000 bp, Homo sapiens
cggcctcctgctccgtgccagtagcgccgcaccccgccgtcgtgacagcccaggtctcccggtgtgcagaatgcccgctggtcatgctgagaggtacaggggtgctgcccccagggtttgaacgctgtctaactcccacctctggtgtgtctctcccctgtgtgtagcgtggagtcactggatgagtgtggtgacctccctgtgtccagctgccctgggctgcaagcaggtccctcctgcagccctccaggccacccttaagcagagctggaccagcctggccaacatggtgaaaccccatctctactaaaaatacaaaaattagccaagcgtggtggaactctgtctcaaaaaaaaaaaaaaaaaaaaaaaaaaaaaaaaaaaaaaagttactcaggccttagggctgccaatatctggctcctgactgaagacctcataccatgtcaagcctcggtatattgtccttagcaaaagcagccaccctctgtgtaggatcagccgcctttctgtcatgaggctggaggtcagctatgaggattgatgtgtctggcggggaccttggactgaggcctcctgtccatcagctcaggctgagtccgggggtggtcacagtgaatggggcacgtgtttctggcctccagggctcaccttcaccccctcccaccatgagtgccagatgggggaggcaggaccttgattctcaagcagcctggcaggtctgcattcccccacttgtaggacagatgctccccccagcagaagtaagtgggcgagacacagtagggctatgcagatgtgaagggtctgcacattccagaacattccatcagagagcagatgggagagaggccagaggggctgtgccgaggtgctgtgcaaagtgccctgtcctgagctgctctgagctgcccccgctccaggcctgcagagtcaagctccgcctgctgaccacctggtgaccagaatacatcacacgcaggcagtgggccctggagctccttctcaggagatcaaggcctcagcagggcagggtggcgggcagccctcagggaacccaccagcacccccagtgtaggctgaagatcaaaggccccagcacacctggcatctgggacagacagagctggaggcagagccgcaggcatccagcacgccacggggaagcaggtgcaaaacaggaactgggtccacccatcaggaagggaccccaccgtgggctctgccgtaggaaatctggtgccacctttgaagtgcgcactttgtttggggtaattgccaaggtcttatgggaacctcccttcacgggtcccctttgaaatttgctcacctcgtcactctgcggtgttccctggaccaccaaggtggttccccttcttgggcccccatggtgacctgtggtccaaggccacatgttgggacacagcagccccagggcccgtccctgcctggccctgtgagacgggctggtgactttccagcaggaaggatactgtcacacacggttctctaatgaactaacagtccacagcctgaccaagatttccacttgtgcctccagctgtatatgcacctggcaggtaggcaggaggggacccggctcctttgttccggtggtgtctttggtcttctttccaagttctccttcctgaagcgcagtggtctgtgagactgatgtctgggcaatatattccgggctcgaacacaccaggcccatttcacagaggaggcaacagccacagaaagggccagtgctgtcccagcagccacgtgaccttccggagacaccccttcccccaaaagacatgtcctcctggggaacctgtgaatgctggtggccttatttggaaaaagggtcttcgcagatgtgactgaagttcaagttttgaaatgaggtccttctggaatagggtggagcagtcacgaagtccagtgacgcgtgtcctcagagggcaaaggagagagctctgcacacagcacggggatcgttctcggccctggcagccctgctcctgcccctgccccggctgcagctggccacacactcagcacggtccaggacaaacctatgttcttgcccaggcctgtcctgccagccctggagggagggcagtctgttccgagctcctcgcaccccaagaagcagggccctagtggctctgggccttccttgttgccgtagccaggatgcaaaccgaggtctcctggctttatactgccttgacactcatgtcgtgaggtctcagggaaccttcttgaaggcaactggggctggttgacccctccatcctgacctcctgtagacaagcgtctgaggagccctcctgggcagtggtcagaactgcctgtgccctctcaggtgggcacagggcctctggcagggccacatccccctggttgtggttggaaccctgcaccctccatgtggctcagcaggtacataccatttgtcacagtgaaaagccttcactccagcatttttgtttgctatgtattttgctccaggaacattctagaactggtagcatgacctctgttcagcgctctctaacccagcattcctttctttggccctgccaggtgatgtgtccaatctagatcccaacttctcatttgaaggcaccaaactggatgtggggaacattgtgctggcattatacagcggcctctttgcctatggaggatggtaggttctggaatgtctgggtcccttggtctggggacatacagtccctgacgtgtccaggaatcccaaatctcccagccatcaaggggcagttaaagggagtggactgcccctccctttaactgccccttggcagttaaagagtggcaggtgaccctccagagtcacccacatcccgacgaagcgtggggaggccgcccgctgcagccctactctggctctagctccacgtcgcagtcttggcgaaggtggcaggtggaggcggctgagccctgcggcccctttcctccaggtccccagcctgactcctgcgctcaggcgggcctcacagggacctgagaatcaccccagtagggcgaacaggcagggaatgtgcgggagggcctggaaggggtagcagggaccccccggaacacgcaggaggctgagctccctcccactccaggtccgctttccagcccagcgagcagaccaccggggggcaggctcaccagctgccctgggatgctctctccccggtgatttattttccctgatgaggatcatataatttgaacgctgttctctaaattttaggaattacttgaatttcgtcacagaggaaatgatcaacccctacaggtacgtgcaagaatggatggagccgtcttttttcattattttaatgtgaggcaggaagcagccacattccactcgaagcctgttggtcggctcaggccagttcacagtcgggccgtgattggggcctctggggccagcaggatgtggggcgggtggcttctggccgtgtgtccttgagcacggtttctccagagaacgggtggcaagtgagggccccactcagggcgggacggtacagaggagctgcctgggctctcggctctggtccccggctgtgcagctcgtgggcagagccttagaattcagaccaggtggcctgacttaactctcctgagcccttgaggtcaccccgaagaatccccatttctcaggtggggaagctgaggccgcggccaaggcaccagccagggctgtgcagtgtcccgctccaggcacagcctcctgccgccagcctgtgttctcttgctgcttcccaccttccccgagaagcccagcacagaggctggagctactgcttgcgaggagcccacctggctcctgggcacagggtttggccttcagcccgggctgcgttgggtgacatgtcgtccctgttctttccagaaacctgcccctggccatcatcatctccctgcccatcgtgacgctggtgtacgtgctgaccaacctggcctacttcaccaccctgtccaccgagcagatgctgtcgtccgaggccgtggccgtggtgagccgctacccgccagcttccaccaggggcctgagaggctgtggccagcccgtcccttccagaccggagtggtgccccacatctctaagcctcccctacgcagagggggccccgcgtctctaagcctcccctacccggaggggtggagtggtggtctcccctcacagcgaccgcagaggaagtgtctggggatcatcctcaagctcagctgctgggggagtcaaaggggagaagggtttaaaatctgataccaagccacacccagaaccagctataagccagaatgcctggggagtccagggcagaggtcattttaaatctgagtacagaaagattggagtctgccacagagtggggttcgttagaaggcacggctgctgctggcttggcaggcgggaggccaggcccgggcggtgtcaccgggcagctcagccaggctggcctcgcagttcccgaggcttctcccactgccctcccagggctgggggaacagggagtgggtgctctggccagcttcctactgaacaagctctgactcccagcccgctgccggcagggcaccgtgctgagcctgtggaggaccccacgggggaaggcaagatccccacctgcaggccgtagcttgctccagggagtcccagaggagggggcaaatcaggaccagcaagggctccccaacaagcaggctgggcaggggtcactggaaagccctgtcctgggaagtccccccagaggccagaatccagcctgagaggtcctctgcagagggctcttgtgagcacagagggcgagggctggcccggtgcagagggctcccagtgagcacagggagggcgagggccggcccggtggggcccagctcactggttgtgcctgcctaggacttcgggaactatcacctgggcgtcatgtcctggatcatccccgtcttcgtgggcctgtcctgcttcggctccgtcaatgggtccctgttcacatcctccaggtgagcacagcccgacccaccacaggtgagggaggcccaggcctcatggccaggttcaacatgttccatgtctgtaaaaggtttgtctctgtgatactggggatgcataattgctcaaataggccaggcatggtggctcatacctgtaatcccagcactttaggaggccgaggtgagcagatcgcttgagctcaggagttcgagaccagcctgagcaatatggcaaaaccccgtttctacaaaaatatacaaaaattagccaggcgtggtggcacgtgcccgtagtcccagctacttggggggctgaggtcgaaggattgcttgagaccagaagattgagactgcagtgagccgagatggtgccactgcactccagcctgggtgacaaagtgagaccatctcaaaaaaaaaaaaaaaaaaaaggcagcagcaagcccaaataatacagaaataaaggaagcatgaactttggccctcgcctccccactcctgcctggaggtgacacagctgtggtgtcctagatgccctgtggccgccgcttgaccccccgggctggagtgagcagtggctcccaagttgctgtccttgccgagttggttgggggaactgagaggcccacagccagcggctggaggggcctggttcccactgtggccagagaggcccagacaagccaggcacaggccctgccactccccagcctgcgtgtcccctgtccacgtgctgagttgtggggcggtggctgactctgccactcttgtctgtccacaggctcttcttcgtggggtcccgggaaggccacctgccctccatcctctccatgatccacccacagctcctcacccccgtgccgtccctcgtgttcacggtaagcctgctgcacggccctgtgccctacatccctgggggttgtccgggggctcccagagggaggctgccacagcttgcagctctgtctggggtgtggactgggtgac

SEQ ID NO: 7029 - DNA, 6000 bp, Homo sapiens
ggtggctgcccgtggcctgacctgtgagaccggcccaacacctttgtgctggccgcctggctgtcctgggtccatctttgggcccctggctcttggtgttagaccagcccacccaactcctgaatgggtgggagtcttcccccacagcccctcagggtccccatccgggaggggctcagggacacggaggtccctgggagacacagagcagggatctggatctggcgcccggcttgcccaaccccagcttcccgcctgggtctgatggctcgggaggccgggtcctaacccgggggctggccgacagctggcgtaccaggcatgggtgaccaacgcccaggcggtgctgaggcggcggcagcaggagcaggagcaggcaaggcaggaacaggcaggacagctacccacaggtgagctggggggcgtggggactctgaggggaagccgcgggactgccagtcactcaccagcatcctgtgcccaggaggtggtcccagccaggaggtggagccagcagagggccccgaggaggcagcggcaggtacgtgggcccggggctggggagtgggaggtctctcttggccccacaggctgcccctccagcgccccctcccgccctcccgcaggccggagccatgtggtgcagagggtgctgagcacggcgcagttcctgtggatgctggggcaggcgctagtggatgagctgacacgctggctgcaggagttcacccggcaccacggcaccatgagcgacgtgctgcgggcagagcgctacctcctcacacaggagctcctgcaggtgagcctgcccgtgcaccacgctcgtccctgctctgcctgactacgcccctgcctgcttaacagcctagtcccgcgcccactgcacgaaaccccgtgtggggacaagagctggacgcagccctgagccccctgctgtgccctgcagggcggcgaagtgcacaggggcgtgctggatcagctgtacacaagccaggccgaggccacgctgccaggccccaccgaggcccccaatgccccaagcaccgtgtccaggtaggtgcgggggtgacccgagccccagctgctgcccctggtgtgtgggcatcgcctagccatccccgaccctcgccattcccttgtaccccaaaggaccgtgggcactttccaccctgaccctccctgtagcctggggtcaggccatagagcaggattctctgtgactcggcttccctccccagtgggctgggcgcggaggagccactcagcagcatgacagacgacatgggcagccccctgagcaccggctaccacacgcgcagtggcagtgaggaggcagtcaccgaccccggggagcgtgaggctggtgcctctctgtaccagggactgatgcggacggccagcgagctgctcctggacaggtgggggcgggacgcgcacaacaccagcctcaccatggccctcggggagcagccgaacaggggcaggagactgactgtgaccggcaacagatcgggccgtcatgccttcgggcagtcccagactcccccaaacacgcgggtctccctgtaggcgcctgcgcatcccagagctggaggaggcagagctgtttgcggaggggcagggccgggcgctgcggctgctgcgggccgtgtaccagtgtgtggccgcccactcggagctgctctgctacttcatcatcatcctcaaccacatggtcacggcctccgccggctcgctggtgctgcccgtgctcgtcttcctgtgggccatgctgtcgatcccgaggcccagcaagcgcttctggatgacggccatcgtcttcaccgaggtgggccgaggccgcgggggagggggcgcccggcccaccgcgccgtgaccctccccgcgtgctgagccccctcccccacagatcgcggtggtcgtcaagtacctgttccagtttgggttcttcccctggaacagccacgtggtgctgcggcgctacgagaacaagccctacttcccgccccgcatcctgggcctggagaagactgacggctacatcaagtacgacctggtgcagctcatggcccttttcttccaccgctcccagctgctggtgagtgtgagccttggctggcaatgcggggctgggcaggccctctgggcacctgtgctctccaccagggaggcaaggccccctcaccacaccctcccgcccctcagtgctatggcctctgggaccatgaggaggactcaccatccaaggagcatgacaagagcggcgaggaggagcagggagccgaggaggggccaggggtgcctgcggccaccaccgaagaccacattcaggtggaagccagggtcggacccacggacgggaccccagaaccccaagtggagctcaggccccgtgatacgaggcgcatcagtctacgttttagaagaaggaagaaggagggcccagcacggaaaggagcggcagccatcggtataagcgccctgcctcacaacctcctgcctacccagttttctgagtggggctactgcagggagggtctttctcagatgagacggccaagcccagtgcgaggcccacctggatcccaggaaggtgccacttctgagccacagctcccggctctgcctacagagccgtccctgactgctgcccccggggatgctccccacgtgtagggtgactgttggcctgggctggcccctcacagttgccccagacagaggacacagccccagctgtctccttgccagtgacactgggagctttcctgtgctccgtctgcttgtctgtcaaacagggagaatgccagcctcttagggtggtcaggagccatgagccaggcccagtccccagggggcccaggcagaagtcagcttttccctacagaagctgaggacagggaggaagaagagggggaggaagagaaagaggcccccacggggagagagaagaggccaagccgctctggaggaagagtaagggcggccgggcggcggctgcagggcttctgcctgtccctgtgagtgatggcggccgggggcagctggggagtgggggtggggaggcgggtactgggcccaggctgagcgcccccttccgcagggcccagggcacatatcggccgctacggcgcttcttccacgacatcctgcacaccaagtaccgcgcagccaccgacgtctatgccctcatgttcctggctgatgttgtcgacttcatcatcatcatttttggcttctgggcctttggggtgagccaggcccgggacccaaacccagtgtacgcagagctcagcagccacccacatcccctgggcttggctccccctgacctgtgctctcctggccacagaagcactcggcggccacagacatcacgtcctccctatcagacgaccaggtacccgaggctttcctggtcatgctgctgatccagttcagtaccatggtggttgaccgcgccctctacctgcgcaagaccgtgctgggcaagctggccttccaggtggcgctggtgctggccatccacctatggatgttcttcatcctgcccgccgtcactgagaggtgggcccacgcgtgggggcgctcggtctccaggggcggggcagtgcaggctgggggccctgcggggctgtttctgatggggtccttgacctggccatcccgccccaggatgttcaaccagaatgtggtggcccagctctggtacttcgtgaagtgcatctacttcgccctgtccgcctaccagatccgctgcggctaccccacccgcatcctcggcaacttcctcaccaagaagtacaatcatctcaacctcttcctcttccaggggtgagtgcaggtccgccggggtgggggtcacggcccgggcatgagggagcccacctgacgggaaccctggctgtgggcaggttccggctggtgccgttcctggtggagctgcgggcagtgatggactgggtgtggacggacaccacgctgtccctgtccagctggatgtgtgtggaggacatctatgccaacatcttcatcatcaaatgcagccgagagacagagaaggtgcctgggcccagggcgggggccgggacaagggccagggatatgccctctccctaagacagaggcactgctgccacgagaacccgtggtgctggaggccctcccagggctcggagcccatggggacatgaggcgagcccacccactagctgatcacgaggccagtgatcttggcagctgcgagtgagtgctgggcgcagaagtgggcagcggagttggtcctgttccaggcaggctggcagcagagcagggcctggtgcagggaggaccggacagccactgtttgctgcattcttgtttaatggcctttctcagagagaattcgtgcgtcagaccactcccccacgtaaaaagtacaactcaggggtttctagtggattcacagttgagcatctgccttctcaccacttcaaaaagaaaccccgggccgggcacagcggctcacccctatcatcccagcactgtaagagacccaggagggaggtactgctcaaggccaggagttcaagatctgcacggccacaagcgagaccctgcctcagcaaatgtaaaaataaaacaattagctggcaatggcagctcatgcctatggtcccagcactttgggaggccaaaggaggaggatcagttgaggccaggagttttaagaccagcctgggcaacatagtgagtgagactctctctacaaaaaaataaacgttagctgggtgtgatggtgcacacttgtgctcccagctactctggaggctgaggtgggaggatggcttgaggccaggagtacagggctgcattaagcctgatcacaccactgcactccagcttgggcaacagagtgagaccctgtctctaaaaaagtaaaaagaagaaacccagtgcccattggctgtcactcggtttcccctcccctggcccctagtaaccccttgtctaggtcctggttctatgagatttgcctacagtggatatttcatgaaaacaggctcagacagcgtttgtccttttgtaatcagctttccttgctcagcatggtgtctctgaggtccacccacgtggcagtatggccttcctgtttatgggcaaatgatattctgtggcatggatggaccacaacatgctcatctgttgatgggctgttgcccgtgatgctgccaggcacgccggtgtacacgtctgtgtgcccgtgcccctggtcctgtggctgcacgccagggccggaagtgctggtggtggtttccatcatgaggagctgctggttttccatagcagctccaccatctaaggttcccaccaccaacacgaggttgcggtttctccacatcctcaacaacctgttactatgtcttttttgttctggccatgctgctgaacgggtggcttgctgtgggctcttctcagttccctgttgaccgacgctgagcgtcttttcatgtgcttggccatttgtgtatcttctctggggaaatgtctattcaaatcctttctccatagtttagttgggcttttgagataggatctcaggctgaagtgcagtggcatgaccttcactcactgtagcctctgcctcccaggttcaagcgattctcccacctcagcctcccgagtagctgggactacaggtgtgcaccaccaggcctggctagtcttttgtatttttggccaggttcgtctcaaactcctgacctcaaagtgctgggatgacaagtgtgagccgccacacccagcagttgggttgttttttattagagttttttctgtttttctgcagatacattggctagaaatgactgaattggaagaattctctgtattctctggttgctagaaccttatcaattaaaatttgcagaaaatttctccaattctatggactgtctcttaaattttcttggtgtctttggaagcacaaagtatttattttggtaatatctggtttacttt

SEQ ID NO: 7030 - DNA, 6000 bp, Homo sapiens
gccctggaggttgaagctacagtgagccgtgattgtgccattgcactccagcctgggcgacagagcaagacgctgcctccaaagaagaaaataaagcatataattcaaacagtcctggaagttatacacacccacgaatccatcaccacagtcaagacacagagcattttcctcaccttccagagacttcctagagtctctgcagtctgctcctctctcctgctcttgttgagtaggaatccttcattctgatgaagttgcccagcacaggcaaccactgatctgcttcttgtcagaatagattagcttgccttttaaatttttatgtaagaggaatcataccttatgtactctgagtctgcctctttcattgagcataatgattttgaaattcatttatttttttcgtatatgagatggtattgccctttttatcattgggcagtacaccatagtgttaatatgccatactttgttcatctattgatggaagtgtgtgtgtatatatatatatattttttttttttaaaccatttttggctattgtgaatggagctgctgtagatattcatgcataagtctttgtgtgaacacgttttcatttctctcgggacattccttaggagtggaatagctaagtggcatggttgggtataagtttaacttcttaataaagtgccaaacaaaactgcctgtatccatttgcactcccaccagcagcctctgagagttccagttgctccacttccttgccaacacttgtcattgttggtccttaatttagtcattttagtgggtgtgtaatgcgcagtgttgcactgtggatttctcactgcggatggaatttgcatttccttaatgagtaatgtctagtgggtgtgtagtgagtggtatctccttgtggatttcatttgcatttagtgagcggtgatgacgatgagcctcttttcacattcagattgatcgtgtgttgtgtattttttgagacagggttttcacccagggtgtggttatagctcactgcagcctcaaactggcctcaagctatcctcccacctcctcctcccaagtagatgggacttcaggcctgcgtcaccatgcctggctagtttttaaattttttgcagagatggggtcccattatgtcacccaggttggcgtgcagtggcgtggtcatagctcgctgcagcctcaaactcctgggtcaagtgatcctcccacctcagcctaaagtgctgggactacaggcatgcaccatcacacctggcttttgtatctttttgtgtgtgtgtgcagtgtctgtttaaatcttttgcccatttttaaataacagctttactgagagataatccacactatacagctcacccatttacccattggaagtaccgttcgggcccagtgtggtggctgcagcctgaaatcctagcattgggaggtcaaggtgggcggatcgcctgaggtcaggagttcaagaccagtctgatcaacatggtgaaaccccgtctctactaaaaatacaaaaattagctgggcgtggtggcacacgcctgtaatcccagcactttgggaggccaaggcgggctgatcacttgaggtcaggagtttgagaccagcctggccaacatggtgaaaccccgtctctactaaaaatacaaaaattagccgggcgtggtggcgggcgcctgtaatcccagctactccggtggctgaggcagaagaatcgcttgaacctgggaggcggagcttgcagtgagccgagatcgagccactgcactccatcctgagcgacagagggagactcatctcaaaaaagaaaaggaaagaaactccataccccttagaagtcagtcctcctgactggtctccctcccgcgggtcttacgaaaccactcatctacttcctgtctctctaaattgacccactctggacgtttcatctaaagggactcgtacgacgtgtccgtgtttccaggctcagccgcgttgcagcacatatggcctgggttttacgggattgtctgtcttatcattgaactgcaaatgttccttgtcaattctgggtatatgtcatgcaaatatttctcttattctgtggcttggctctttattttcttcacggcatcattcaaagagcagcagtgtcagtcatggtttctgccttctttcttccatctaacaggtctttgcctgttccaagcccacaaacacttcctcttgaatttccttctaatggttttatagtttcagcctttatactcaggcctatggttggctttgagtaaattttgcatataatatgaggtaggaatctacgttctttcaatcacatagacacatagatatggccgggcatggtggctcatgcctgtaatcccagcactttgggaggccgaggtgggcggatcacgaggtcaggagatcgagaccatcccagctaacacggtgaaactccatctctacttaaaaaaaaaagccaggcatggtggcgggcgcttgtagttccagctactcaggaggccgaggcaggagaatggcatgaacctgggaggcggaggttgcagtgagcggagatcgcgccactgcactccagcctgggcgacagagcaagactccgtctcagaaaaaaaaaaaatcacacagatattcttatttttcttctttctttctttcttttttttttcagtagagacggggtttcatcatgttggccaggatggtcttgatctcttgacctcatgatccacctcggcctcccaaagtgctgggattacaggcgtgagccaccacgcctgggcttttttttttttttttttttttttgagatggagtctcgctctgttgcccaggctggagtgcagtggtgccatctcggctcactgtaagctctgcctcccgggttcacgccattctcctgcctcagcctcccgagtagctgggactacaggcgcccgccaccacgcccggctaattttttgtatttttagtagagacggggtttcaccgtgttagccaagatggtctcgatctcctgacctcatgatctgcctgcctcggcctccaaaagtgctgggattacaggcgtgagtcactgcgcccggcattttttttttttttttttttttttttgagacagggtcttgctctgttgcccaggctggagtgcagtggcgtgatctcgactcactgcaacccctacctcctgggttcaagtgattcttctgcctcagcctcctgagtaactaggattacaggcatgtgccaccacgcccagttaattttcatatttttagtagaaacggggttcctccatgttggccaggctggtctcgaactcctgacctcaggtgatccgcccacctcggcctaccaaagtgctgggatgacaggcgtgcgccaccacacagggcctcatttaaagattctttatagagatgaggtgtcactacgttgcccaggctggtcttgaacttctggcctcaacggaccctcccgcatcggcctcccacggtgctggctgaagggtgagcccaggctggccacagcgcgttttcatcattgtccgcagcttgcagtcggctggttcagagcttagccgggcacatgggcccctctgaggctcctgttcagggctcagccgtgtctacggggccctccgagctcttcctggaccctcctcggctccttcagttcagggctcagctgggcacgtgggcgcctccttggctcctccggctcaggcctctcctcgagctctgggccctgagtattctgggctccttccttggtttcctttggcctttggccgggaaagttgtgggtgtccgtggcagcctgggccacttcacagccccgcagccaacctgcggctccttcagagcaaagctgtgtggacacaaagggaacgccactcggagctggcctctccctttacctgtgagttcccgcccaagccggctgccttctgtcccctccccagagcccttgggtaactggtttgctacaagagtgtctggaatttttcagttgttctctgcggaagggagtttttaaaaggcccttaatcccttcttgacatttgtaagttgacgcttacacctggcagccttgctgaattctgtgtgcgtgaaggtccgattccaccgcgagtcacgatagaaaacccactctgtggagagaccagagatgaccgccgcgcacacctccgttcagcacacaaacctttgcaggtgttcatagcggaggcagattccgtactggggataagagctcacgacatgctgggaggggtttcaggggcagggagggggcttctgtggccccaggtcaggaggagcagctcttccatcagcagcaggcagccagcccagatgcgtagggaagacagctcccacttcgccaggccagagagcgcccgggggcagctctgttccagtcgaccctgcgagaaaggggtgtgcgtgtgcctggagctgggccccgtcctgcctccctgacctgtgtgctcccacagccctgagacggacggctcacagccttgcgaggcccacactgcactgggggtcaggcttgtgctcccgggagtcctgtctgggctgcgtggccaccatccagagcctgctgacctgcgactgggggggccagtgctccctgggtttcagcacctgagaatcagagtgggatcccgtgaaacctgggcccaggctcccacccacgccccacacccacccagggaagccatgaaacctgggcccgggctcctacacatgccccacacccacccagggcagccgtgaaacctgggcccgggctcccaccctcgcccaccgagggcagctttgccttcctgggcatccctcctcccccaggcctggcccgctgcctgtccaaggctcctgtgcggggtctccacccacacattcctggggcgtgaggcgccaccactccctgctgccccgggcaaagccgtcatttgttccctttgacggcccgggaggctgccaggctctccacccccacttcccaattgaggaaaccgaggcagaggaggctcaggtgtggccaatcaccctgcacatcagagttaccctgggcagggcccactgagacctgggaggggccactcgggacctggagggctgggggctgcccgggcgttaggggtaaagctccctacccaactgcgcagaaggcctcagaggcctgggggctgggcttcccctttcacatcgccctttagaggcccacgtgtgggcattggcccgcgatctgaaaggggctgtcctgttcctcatgggcgctgccagcgccacgcactcctctttctgcctggccggccactcccgtctgctgtgacgcgcggacagagagctaccggtggacccacggtgcctccctccctgggatctgtaagtaacaacctttgagctcttcctgttgtggtgtggatggaatctgcaccttccatctggagaactggggccgccccaggccgggcttccagcaccagagcgatggtcaggcttcagctggacgcagatttcaccccgcagggcacacgcagacccatttgtttggaagcggcagtcctaaggcagtgcaggtgcctccacggccccagcccagctctcctgcaggtgtaaaggatgcagattccagggccccccatggcctgcagaggcccctcagagcaggaagggccgggctctcggggagcccccatcccaggtgctgaggtccttgggtcacatggagctggggtggggagtgcccaggtcccctgtgatccgatggccacgtttccctcctggcttcacgcaccccaagggctgggggtcccactcactgcccattttctggctgtggggggggtctgttttcttccaccttctcaaggtgttcagagcctcaggggcctccccacttcctctggggcctgggggagtagagtctgtcacccggaggctgtgtgcctccccgcgacattccccagtggccggg

SEQ ID NO: 7031 - DNA, 6000 bp, Homo sapiens
ggggcccgagcacggaggcctcgcacaggcaagggccccctggcttgctgcccctcccccaggtccccaccggtggccagccctcaccttgtggtacagcatgaccgccctgtccatctgcacgcccttctcctcgtagtatcgggccgcctcgatcatgtcctcgggggagctcagcagggccaagttcatgagctggtcgtccaggccgttctcctgcagggagggaggcagggccctgaagcggctcccactggcttccccaggtccgctgagattctggaatgtggccgggtgcgaacccgccccttcactttgacacactgctcagcgatctctgcggtgatgggttttaaggagctgatgacttactgggtttgtctacaaggattttccgatgctctgggttctatttcacagagcactgcaagaaatacctgacacgggagatgcttctggaagcgagagcccaggttgggacatttgtgtggtgcagaacgcccaacagctatctaggaagggtctgccgtctgcaaggccataggccgtgagcagcctcaccacccactcaggagccctggagcctgggaaacatctggggacaattcagtgctttgcaaacaatgtcagatggaagcggccaggggtgggcagaggggtgggcgggtgaggcagacggggtgagcagtgagtggcagacactggccggaccacgtgtcactgacacgattctctctgtccacttttccacttgaagctctcctcaggggacctcgagaagcgccggctccccaccccgggcccgtggtaccttgcacaggcggatggcattcttgaaggcctgtgcccgggtgtagaagtgcaccgcctgcccgacctcctcctggctctcgtactggcgggcgaggtggtaggaggccgccaggtttcctgtctcgttggctatttgcgcagcctagaaagacaaagaacccaaagacgagacacggtggccttgtgtctgcctcgtgtccgcctggccggctcccctgcggggaccttaccttctggacattgccctggaagcagtggatgcggaccagggagaagtggtcccgggccagctcgtagtagtgcagcgcggcgtccatctcgccctggctctccaggtactgcgcccaccaccgccacagggtcctgcgggcagcccaagaccatggattctccacccgagccccgctccaacccgggacggcccccaccccgcccctgtgccacccttagagtgcatgtcacctgacctgcaaacaggctgggccaagagtgaggacccctggctttgtccaaagggagggcctggctcagggccctggcatggctctgaggagccgggaggacgctgcccactcgtgcaggaagcacgggaaagggagccgtctcagcaagccctggggtccctgcaaacctccaggatggagtgcggtcccaccagccctggtggggacactcacttatccttcattttattcacgtagagctccagggacggcaggtcctccgacagcatcctgggcacctcgaagcggtgcgtgtccgacttctcgtagctgtgagagaaggagacagaggtcctcgttccctcccatcccagccccacgggaaccgggtgggctgaggggcagcgtcggtgaaacgcatcagagcggtggccctcggggtgtgtgctcctggcctgcagctctgcagaccctgagcacacgtggccagggggcagtgggggcttcctgcactgtgggggcccgggaggcgggtcgcccatccacaccccgggaacgggtctaagagcagctcctcctctggagagggtgacatggggtttgtctgtcctcaggagacatcaggcccatctgtgctcggcaactgacaccaccaatgggacagacatctttctgtctcctgcctgggaagctgggtggcccaggatggaaggggcaaccccacatctccgagactcccagaagcttcctgccgagaaggctgccaccaccctgagacagacgcctcctctaagaacctccctggccacctcaccacagcacacacaagaggcctcacaagccagggccatccagagaggcagggaagaggccgcgagggccgcactcactaactgagggcccggctgcagtcggcgctggcctccaggtgcccggcatagcggtggtaggtgctgcgcaggtgcacgcgatcgtggtgctcggctacctggagggcctcctgccaccggcccgcagcctggtagaacttgttcaggaggtcgtggcgcttgcacttcctgtacagctgctcggcgtcctcctgaggaatgaggatgggcaggtgtcgtgcagcctccacacacccacgtctcaaacacactgttccacgccaggccaccggtcaccgcaccttcccacaccgccaagcacactgacacacggggccgctgtgggcacagcaaacgccacacacccacggggcatccccgtcccacggctggagagtgagatgcaccaccaaggggtaccccacctcccacagcccccctcccacagccccccctcccacagcctccccagaagtcccgtgctcagccctgctgacctgggggtctctcgggcgctctgttccaggcccacacacctgacaggcacacaccctggagagccggcggtcgcctagcctccacccacctcacctccaccgccgctgtctgcccagctctcctgggtcatgcctctcggctctgcccacatcagtgcaggctcaggccggtgggcgtgcctcctccttccccagggggccgtggctgtggcaggcgtggtgccttcccacccaccccatggcgggcgcccctcaccagcatgcccagctgcgtggccagcacggccacgcgggcctctagctccggctcctgctccgcctcacgcagcgctcgggccccgcgggcatggcccatgttccccaggcacaccttggccacgtccagccgctgggtcttcacgcacatgcgcgccatgttctcccagacggcctcactgtgggcagacgggggtctgtgaggctcctgcccagcacctcagggccccctggccctacggccccttctcctggggcaagtagtcatcaggcacagctgccaaacgggcatgaggaggggccttcacccatcggctccgcccctgggcaagactgcaggccatgcagagaggtgcccgtcacgagtcccacggccttcctaaccccaagaggcaggggccgggtcccattaaaagacagaaggatctcttatgcagatcaccaggctcctcctcctttttccctgctctaagcggctgtctgatcaggaaatgtgggcttcctgtgttgcttgcacacacaggacctgctctgagacaaagcctcctgctctcacctgagcctgagattgcagggcccctggtaaaccagccctgcacagcagggaccctcacccgacagtctggcagccaaagggtggagcctgggggacggggtacagggcccagaccctgacccagccctggaacctggagacaggcctgtctccccaggagacggtgacccagcccacgcagggttctgcagagccctggaggtctgccgagcagagggccctggaggcaggcctgcagacgggctgaccagtgggtcacgggggacagcaccttccaccccagccctgtgccccactctcgggcagtgaattttgtgtgtgtgaaggaacagggtgccaagtgggcagagctgcgtcagggcacaggtgcagggacggtggaagtcaccctgcctcttagggtttttttgttgtgtaagacagggtctccctctgttgcctaggctggagtgcagtggcacaatcacagctcattccagcctcgacctcctgagttcaagtgatcctcccacctcagcctcccaaatagctgggaccacaggtgtgtgctaccacacccagctaagtttttgtattttttgtagagacagggtttcgccatgttacccaggctggtctcgaacttctgagctcaagtgatccacctgccttggcctcccacactgctgggatgacaggcatgggccaccgcgcccagccccccgcctctccatgaggtttcctgcattcttcccctgctggcgctgatccaggcaggaccagaaatgactgaggacttggtttgtgtcagctccagggtaggcaaaggctgctgacagccactctagggacatgacgctgcatgagaaccgtgtgtccgcatgtgtgtgggggcactcagccaggcctcctggtggggctgggcgggaggtgggtccaaggccatccagggagatcccgccccaagggccttggggccgggctggcctgcggcttcagccctgacgtgggctcagggcttcagacaaaggccctgttccaagacacagctcagtgtggtcaccgagcagggacaggcagaggacgcactggtcacttcctgaatctctctcctctgccacacgcgcctcccctacaagccccaccaaagccacacacacacgcacgcatgcacgcacgtgtgcacacacacgcatgcacgcacgtgtgcacacacacgcatgcacgcacgtgtgcacacacacggatgcacacacatggacgcacatgcacacacagatgcacacacacattcacatgcatgcacacacacatggatgcacacacaagcacatgcactcacatacacacacatgcaggcacacacacaggcacacacaagcacatgcacgcacatgcacacacacgcacacacatgcacgcacgtactcccacaagcacaggcagcacaccctgcaagtggcctcggagcatccccacccagggccaccctcgcattccaggctgctccctgcagataagcctcagtccagcccacagtcttagcagggcagcagccctgcagcctccccgctggcacggtcacaggccgctctgaggactggagggaccagccgcccacagagccccgagcccgtggtcccggtgagtgagcggagctgtgctgcgtgcagctgggcgttttcctaacggccctgcccctgtgagaaggaggggctcgggaggacagccagggagcccagtcccacggtggtacctccatctccgggaggtgtgggctgcccacatctcagcttccctggctcccacagaatcacagggcaatggctccgagatggtagccccgggcaggctcggtgcacttgtgtctgagtctaggggctggacgcaggttcctgggatgggccctgcggtggtgtctgtggctgcaacgcggcatacccaggtgcccgctcccgaaagccagcaggtactttgtgcctggttttacatgtactcgggtgaattccacggacgcattccaccacccagggacgcagggcgggcaggtgcatgtgtcttagcagcaaccaacctggcagcccctgccatgtggcacagtcatgcctggagccaggagagggtgtgtccaaacccacgggccaggccctcgtgggggtgccaagcgtctggggggccgggaagtgagcctgcctccctgccactgccattgcatgcgtgtcctctgatggcctcacatggggctcctcacagcacctgggtgcacccactggcagcttcctggacgctcagtcggcgctgcggtgaaggtgacaccgggtgcatgggaccccagggaggtgccccaggcgcagcgtcctgatctccgattcgcgctcctcagtcttttgggttcggaactcttgccaccaactcagcacagggagaggcctgagcacccggcccaccagcccctcaggctgtgctgccctcggtcctctagagctccaggcaggaagtcacatctttacaatgaaacttctttctaacagcagaaaaccaaggcttgtctttctcctttatgctgaggtcctgggtaaaaatccacg

SEQ ID NO: 7032 - DNA, 6000 bp, Homo sapiens
ttccaaggccctgtggggctggtctctgaggactggacacacagaccatggtggactctccccactgccccaggagggcaagaggggcagttactgccccatttgacagttgaggaaactgatgccagagattgagggtaacttgtctgggacacatagtcaagaagcagctgggcactgggttcctcttgtctcactctgggtcatggggagagaggagggctgggggaagatgggcctggctcagtccctcctatctgttcaccacccctgctgagcccggcagctggtggggagccttgtccaccctcccccaggccgcaggtgggagtagggctgcccctcttcctgcccacttcccagtgggcactgctttctctccgcgggtgtgcgctggccccccgcgtggtccagacacttcacaggcacctgcacgcacacaccgacggccaccaagccacagctgtccacaggtgcacctgcctctccccctcgccggctgcacctgaatcctgcttccctggctgtgtgtgggtgcccgagccaggagcccagcccttcccctctctgcagatccagagggaatgggcccatggccatggcctggaggtagatataaggcctagggtcaggagtttagactcccacactgcacggcagagaatgacgggaatgggcacagacacactcaaactggggcccagggagacacacctctccttcaaacctggacggagacacagactttgaaacagatggatgcatgcgcgcacagggacaggcagactgaaaacctgaaggtccactgtgcaccatttttgtcacttccagacaggacttacccagcggccctatcctgcagccccttcccagccccgcctggagaagaccctgggctaagggcaaggctctgggagcaccctgaagccctcacagcctgggcctcagtgtccggagcctgagtgcagagggagggagccgctggagtccgggggtggggggcggggccggcaggcctcttggtgcagccacccgcccatgcagaccagccgcctgtccgcacgcctgggccagcccagagtggtgccactgcccatgtgctgcccggaatgtgggccactgacccgctcctatcgcccattcgccccaggtggtgcaaaggatcaaggctgtggaggggcagactcggctgctggtggtggaccaggagacagatgaggagctccgccggcggcagctgacctgtaccgaggagatggcccagcgagggctcccacccgcccacgacccctgggagccgaagccagactgggcacacaccggcagccacagctccgaagctggcaagaaggtatggcgggcttggcccacagggaccaccctagcctctcccagaggctctctcagcttttgacgacgatctttgcctttggtcacctccagaagtcttggtctcttctgccttttggggctccttttctgccccagggaccatcttgttggccactgggggccactgtttctaccctcagcctgtgttttaaactgggtagggtcagggcagcctggcctgttcctcttctccaggatgctccagagccacttgccctatcgaggggtcactctgacaagctgccgcctccccagcccccagcctcgtggctgaggaaccctgggaagaggcattccaggtctgcgtgtgcgcagctctgtgcctgtgctgggtgtcatccgtggctctgtctttgtctctgttgaaggcgcctgcatgctgggaaggcctgggagagggccggccttctccacaggcagcgccgtggttggggaagcctaggaggccactctgccaggcctggcgtaggtggggctgggagcatgggagtggagttgggggtccaggaggctccagggtgagcccactcctccccctagatacaagggagggccctgggaccctgtctgctgttcctcctggactcctgctgggtagtacttcctccttcccctgcccttgctcccagccaggagacccagaaaagtacaggggcggcctgctccacctcctgctaggtggccgactgggaggggcggcctggcaggccttggggaccaggaggaacagcctgaagctgtctgtcttatcttcctggaggccctgatggcattatctccatgttctctcctacctttttttttttttttttttcattttcaaagagaaccctggccgggtgcggtggctcacgcctgtaatcccaacacttcgggaggctgagatgggtggatcacctgaggtcaggaattttgagaccagcttgactaatgtggtgaaacccccgtctctactaaaaatacaaaaatcagttgggcatggtggggcacgcctatagtcccagctacttgggaggctgaggcaggagagtcgcttgaacccggcaggcggaggtttcagtgagccgagatcccgccatagcactccagcctaggcgacagagtgagactgtctcaaaaaaaaacaaaaaaaggaaaagaaagaaatcccttcaggggatatgagtccaggggttggccagaccccactgtgagaaccgcgcttggggcaggggtgtgggatctggagttctgagggtgcaggggatatacacattcactttctccctttcccagacgtcactgctgaagctggctgcccctaggagctgagcccggggggagcggcttggcagggagacagcattccctgtggggagcccagcctgggcgcaggcctgcccgtgggacctgtgggacccgttttgttcctggggcttgagggcgggccacagtggtgctcagggccaaggtgcccagcccagggctggtgggggggctggccttgcaggggggctggctggtcctaagcccctgtctccaggctgagggttggggcctccctctttcccagccaccttccctcccccaggaggaagctccccctctgcctcaggcgtttgtccattgatttggacacaaacgcatggttcaccttcctgtggaaaaatccggccctcggactttatctggagggtgcagtggcccaggcaccttgccttgggtgggaccttccccctctgctatttcaggctctgggggctgcaggaagccctaggaggggcttcctctgggtgtatttttagaggaacaaagggtggcctgagtggcaggtccctttgtgcatgagtctggctggggacaggggctccaggaggtcagggggcacccaaggaacagggtctccccttctctcttctggcatcaagacctgaggtttctttttctttttctttcttggctcactacaacctccgctgtctgggttcaagcgattctcttgcctcaccctccccagtagctgggattacaggcgcgcaccaccacacctgactaatttttgtgtttttagtagagacggggtttcaccatgttgctcaagctggtctcgaactcctgatctcaggtgatctgccctcctcgacctcccaaagttctgggattacaggtgtgagccactgtacccggcccctgaggtctgaggtttcatttctttctttctttttttttttttttgagacggagtttcactctgtcgcccaggctggagtgctgtggtgcgatctcggctcactgcaagctccgcctcctgggttcaagcaattcttatgtctcagcctgctgagtagctgggattacaggcgtgtaccaccacacctggctaatttttgtgtttttggtagagacagggtttcaccgtgttggccaggctggtctcaaactcttgggctcaagtgatccgcctgcctcagcctcccaaagtgctgggattacaggtgtgagcccctgcgcctggctcaggacctgaggtttcttcacctgagctcccagcatgggcaggaagaggtgggcctcacctgacctccacagagcaggctcagatcctgcccttctcagcctgggttcagggcatgcctcagatggtcagggagcccaggagggcaaagcttaccttgcggggatggctccagtgggggcactggtggcagagaggcagagctctggaagggatgtgtgtagtttgtctttggtgaaggatggagagggcccaactttgggtgccccctgggagctaagggtggctctcagtgtcctctgtcctggctggggataggggaggtgggcaggggaggacactgatgtggttggcccctccttttgggggccgtgaaggcctagttagtgatgactcagccctgggccacaccaggctgggggtggccgcagctgcagtgcagctgatcctagtagtgacgacaggggacagcccccaaacagagacggggtggccagcggtgccaggccctggaggtggtggcagaccctgagccctctgccccctgcccctagcccatgtctccacccccatctggagggccttgggggctaagagcaggtgtgaggggtgacagttctgcgggaggcggctgtgtggttggggcgcggtgcctgcgggggcttccgggcttccctggctcttgctcctctggagcctcaacaggaccgtcctgtgttctggggccgggactcctccctgtcccctcagccctgggtcctggggcagggcagggccttccagcagcttccttccttcctttcttgggacggaagcctagctgggtggggggcgccaggctggagccttcgcaggggagcgggctcagtcatcaccctgctccccagagtgactcagcccccacgtccccacccatccccggggagccagggccgcagagggaggtagataagtggggtggcagcctgggtcggccagagagttcaggccaccccggccggacgcctgccacttgctgtcactgtgccgctgtcatggcacgctccgggagtgccacgccacctgcccgggctccgggagcccctccacggagcccaccccagaggctggtacaggtcaggtggggtgggaggaagggagggctaggaggaaccggcagccgctcagcctcccggggtggaaggaggggactccgggaccttgatgtaagcaggctggtcgctgagcaacaatgaaggcctttctctgccagggctggtgcgtcaccatctgggggggtgcccagggtacccccatgccagcctctttgtccggacacaggcatggctgggggaccagggatggtccagctctgtgctggccgccggcagggagggagcctggagcccgtgggagcccgagggcctggcgggaggcggcaggaagtgtgtgctgagccagggcagggaggaggaatgtgagctatgaacgccgcccgagctcctcggctctctgggccccccttccccacgagcccatgtgctgccagcagcccaccctggcccctccattgcagcccctccacctgaggttttagtgctgtgcctggcgccactgggaccctgctgacaatgaaggggtttaggtttgataggcagaacttcttgccttgtagagtgaaagacggctgcttctggacagaggcagaggggtggccagaatgaccctgagaacactgaggggtccttggcctggcctcagggccccagacacccaccagatcctgcttcctgtctggtgccctgagaaaccctgccccgcaggccgctgtgcaggcgtgggaagggctgccgggccagcactgtggggctggccgcatgtgtgggctgctgtgcgtgtttgcaggtgtgtgtggacgtcttgtgtctgtggctgtgtgatgtgtctttgcggactgggcccatatcacgctcccacctcctccactgaattgggctcctgtccccacgccttccctgcgtcccaggccagcctgggggccgtgctccacctcccctcccgaactggactcctgtccccacgccttccctccgtcccaggccagcctgggggccgtgctccacctcccctcccga

SEQ ID NO: 7033 - DNA, 6000 bp, Homo sapiens; identical to SEQ ID NO: 3660

SEQ ID NO: 7034 - DNA, 6000 bp, Homo sapiens
ccttctcttttttcctccttgaaacagggtctcactgtgttgcccaggctagagtgcagtagtcaaggtgctcactgccacctcaacctcccagcctcaagcaatcctctcacctcaacctcctgagtagctgagactacgggcatgccccaccatacccagctaattttaaattttttgtggagatgaattttcactatgttgcccaggctggtcttgaactcctggccttaagccaccctccctccttagcctcccagagtgctgggattacagacatgagccaccacactgaacctgtttttttctttaaaatatctttctttctaatcttttgatctcctcaaggccattatcaaaagaagaggatgttttcagaaaacgaggaaaatgttaaacgcatgaaaacttcagagcaaattaatgaaaatatttgtgtaagtttggaaaggcaaacagcattcctggaacaggtaaaatattggggcttaaatggaacttttacttttgattagtaaaacatggtaaaagttaattatctggtccccacagtggcataatacagacgactttcacttgctgcagagctggtgtgtgaaagccaaattatcagacagactggggagagataactacttacattaccaaaacagctctggtttcttgaaaatggtctcatgcagaataacctagggatcatgtgtaggtagagtcctgttgcaaaaagagaatgggctttcagtcagtattacactcatatttgtctgtaagtcagacactgcatgaccttcagctttattaaagaatccagtctcttttgtactagtcatggggttcttagatctgcagctctatccatttgtagatctcaccacaacccagaagactcaaacaacctggaagtccattgcaaagtccctgtgcattcaggtttacttgccctattttccaaacttaaacggatatggtacattatctgacattttgctgtatagcatcattaaatacacttcttgctttcattgtggcctcattttatctcattgtactacagtctcagtatgcgtttgatcaattgttagctgaagtgtatgtagcgtgtttcagttctagtagaatggttatactgaggacgggttttgatgaccatgttttcctatttcactaccactagaatgccaccactacaaatcattacctagtagactaatgtcttccagctgtaatggaccgaaatttccccgtctaaactaccctgcaaactgtttcagaaacagaaacactaccattttttaaaacagaccattacaattacatagttacatatactatgaatgtgtattcttcacctaataataagggaaaataaagggaaagagttacgcagaaccagcttaaagggcgagtcaacagtttttctgtgtctcccttttggttttcttcgaagaagaccaaaggagacagtaaaaaatatgtaagtgttctgttgttggcagggaaagggtagaagtatggtaagcatggatcctagccctaaggaccatgttattcaagaagaaggttggggattccagctgtgtcttgtttccagtaattagtagctgaagtgagaagtaagtttttgtttgtttgtttgtttgaggcagagtctcactttgtcacccagactggagtgcagtggcacagtctcggctcagtgctacctccacctcctgagtagttgggactacaggtgtgcactagcacacccagctaactttttgtgtgtatttttagtagagacagattttaccatgttggccaggctggtcttgaacagcagtttcagtgatccgcccgcctcggcctcccaaagtgctgggattacaggtgtgagccaccgcgcccagccagaagtaacttctgatgtgtacataaccatctctaaatagctagcttttcctcacttcttattgctgtccaaacagttgtctctctcaaccatatctagatgtttaccttgtttgaatctcaatgagatagccctccccgtcattctgacattgttctcccctactgaaggagtcctgcagtgatcatttcttagccttttgaggtttcataaggagcatggccgggttaattccagttaaattactgaagaggaagggtttttcctttacagtcttaagttattcactctacccattatctcagaaagttggcacagattggagataagtttgtactttctccaaactttaggccagtttggctgccatctccactttgaagccaggacttcaatctgattccctgttgatgggcacattaccattggtaaaaacatttatgaggtatttgatggaggttattgtgtcttccttttgtataaggaacattaccattaaattagaacaagtgtatagtctaaccaagaggagttgccccatggtgggtacttagtcaaaaatgatcaaatttaaggacctgtcccaatgtgaaccaccaggagtacttgtttaaattgtggtttcttgagctaatagttgaagactgttgttgtaggctactgctttctcaaacgtacctgataaaaatcatttgtagtaactgtttagtatacaactttccaggctcctttccaaaagattgtgtttggtggatccaggatgtggcctaggaattcgatttttaacaaccatcccatgtgattgttcctcaccaaggatgaggaacactgttagagaaacactgtacaaaacagtgtttccacgttcaaaagatttagatttgtttctccaagattcatgtgggtatgagcttcacatattgaacccagccagtgaactaacaaacatgtgatgatccatagaaaccacacgagtaataggtaatggtcatcggtaaaaataatagtattggccgggcgtggtggctcacgcttataatcctagcactttgggaggccaagttgggtggatcacttgaggtcaggagttcaagaccagcctggccaacaatggtgaaaccctgtctcggctaaaaatataaaaattagctggacatggtggagcatgcctgtaggctcagctactaggaaggctgaggcaggaaaatcacttaaacatggtgggtgaagattgcagtgagccgggatcacgctgctgcactgcagcctgagcaacagagcgagactctgtcccaaaaaatataatagtatgtgttactgagccttttttttttaaataatacattttgagcacattcatttgctcacatgtttaaaagttatgaaagtaaaaatgacaatcatgtctaatgtagagaaaccatggaagaaatgttagtgaagcattagagaagagatcaagtagacaatgttgaagagtgagaacacttggaaacaggaaggaagagccttgggaatgatcaaaattaaagaatataatcatccaggtgatatcaatataagagtttaacgtaggaactatgtgttctattttgagcatcatgaagcaagatactggaggaaaaaatatataaatattataaataccttaaatgtatcataacaggtcatattaacaaagactacttacactgtggtgaaaattgcttaccaggaggatacacactgagtgaaaaactacagtgaatgtttctgaatgtatggctcagcagagctgctcatatcagtgggcattgaaattaattattctccctgaaaatgggccagtctgttttcaaaaaaaaaagataagttcattaatttttcatattacagctactacgatttgttagaatggcatgcattatggcagataacattggtaactacataattgtccttggctatttttcccattttttttttttttttgagacggagtctcgctcaatcacccaggcctggagtacagtggtgtgatctcggctcactgcaacctccacctcctggattcaagcagttctcctgtctcagcctccagagtagctgagactatgttgcctgccaccatgcctggctaatttttgtatttttagtagagtcggggtttcaccatgttggtcaggctggtcttcaactcctgacctcgtgatctgcccacctcggcctcccagagtgttgggattacaggcgtgagccactgcacccggctggcttctttcagttttagcaccgtgctctaactagctgagctaaccaactgattgatattatttcaattttaacaataagaaagccaccccctaaaacaattatggaagtaatggtgattatcttacatatttacttctttcatatcaattcagtgttttttattttatggtgctcttttgcgtattaccttatgttcctataaaaatcctttgagtatcacttgttcaacatttattatattatctactcatttgtcaacaaggaaaatgaagctcaaaaataatgtgactgactaaagggtcaagtagcttattagtggtaatgtcaagtctcacacttgtgtaatttgttctatatctactacagaccaaccaaccattttcatcaggtgctggttttcagataagtagagttcctttatatggaatactaactaggagttatggatattaaaaaatataaatggcatatagtcttttaattgtttctataatgtatagtatggaattcaagtggaactataggaaactaaagttagcattatgagaataaatttaatttctaacatgtccagtatacttaaatattggatgtgttctgagtttaatattcaagttttgaaaaacttactggtatagttatataaacatacaaatataaataaactatatttaattggttacagtaaatctggaaaagagcaaggctttttaagtagaaagtaaaattgcttttaaatttgaaacgtagggtgttttggtttttattttaaaattctaggtcagacatttgattcagcaggagatctatagcataaattatgaactatttgataagaaactgaaagaattgaaccaacgcattgggaagacagagtgcagaaataagcatgaaggaatagctgataaacttttggtaagttttgatttcatttgagtcttttttaggggagtagggggtgttgttgctctgttgctcaggctgcagtacggtggctcactgcagcctctgccttctgagctcaagcaatcctaccacctcagtctccagagtagctgagactacaggtgcacaccaccataccctgctaatttttgggttttttttttttttttagagatgaggtttcaccatgttgcccatgcttccctcaaactcctgagctcaagtgattctctagcctcagcctcccaaagtgctgggactacaggcgtgcgtcaccacacctggcccatgtgagtccttttaaaaagaagaatttggtgatatttttcatattagcaaaggaaaacaataagggaagacatacctgattcctggccattagcctaatgtgagaacatatcataggcaatgtaatttactatagcttagcaatatcggcttttgagaaatactcagaactgttaggcattctgtgtcaattgacaggcttaatacttaggcagcttcggccaggcgcgatggctcatgcctgtaatcccagcactttgggaggccaaggtgggcggatcacaaggtcaagagatcgagaccgtcctgggcaacatagtgaaacccaatctctcctaaaaatacaaaaattagttgggcatggtggcgtgtgcctgtagtcccagctactcaggaggctgaggcaggagaattgcttgaaccaaggaggcagatattgcagtgagcagagattgcaccactgcactccagtctgccgacagcgagactccatctcaaaaaaaaaaaaaaaaaataggcagtttcttttaaacctaaatatatcctttattagaacttgtacaacctgtttcaagcctttttggactttttgttttcctcttctagtattacttgctgattga

SEQ ID NO: 7035 - DNA, 6000 bp, Homo sapiens
tacagctgtgggcgggacagacggtgccctccttggactgccttggagtccagtgcggggagtgagacagcagccaggggacagcccctgagcctagagaagggcaggtagcaaggagagcaaatgaagtagggcaaggctgtagtggtggggtgtgggaggaggggcgcctgggtccagggtggtctgggagggcagcctgcaagaggcgccttctgagaaagtcccgaataggaaggtgccagccgtggggcggtcagggcagaggtgggagcgtgggctcgcagcggagggtgtggggacgcctggggaggcagggagcttggattctctttggtgctggggaggattctgagtggggagaacgccatcacatttttgcaaagatcgtttctcaggaaacatttgctgagtgaatgaaggaacagatacgcactcgggagggccggaccacaggccaggcgtgactgtggctcagtcactgggctctgtgctcgcggcggggcagaaccccacatctggctctgcccatgcctcctggcctgggttcagggcagcagacggggttttggggtcaccactcctcttagagaatccctttgagctggggccgcctgtgcctcagtttcctcattagtcctggggccagtggttgaactggggcccttgaactcaggtgcctcctggcctgcccacctggctttgccccgcctatcccaggtcctggtgccattgtttgattttctacttcctgtccctgaaccacccccacccccaaacacacacacttccccttccgaattgatactgacttgtcttcctgtccagaaaccccaggggagggcaggcaccccagcaggccctgggaaccagaggtgcaggggagagggaggtgggaggtgggaggcacagggcaggttggtgttcttcttgcagggagagaacacagaggttgggacgagtgtagacaggctcacccagccatggtgggaaggctgtctgtggggtcagaggggtcccctgtccagtctggaggcgtgagagaacagctaagtggggttgtggaaccggatggtggcaggggagaggccagggtggtctgtacatgcaggggacagagcagggccaccgtggagctcatggcccgctggagggagaggtgggcgctaatcaggtggccatgctccagaagccagggttgcatgccaaggccactgctccggagggaaggagcccggccgggttgggaaagcttccctgccagagctggtattaaccgggtcagggtgtctttctccagccgggccatctgcgtggtgggggctgccctgtgcacgataggtgccagcaatatccatggtctccctacttgatgccaggagtgccacctgcccccagttgtgacaaccagaagtggctccagacatggccagatgtccccagggtggggacacagtggcccccagttgagaaccactgaacaagggtaagccgccagaacgttctgggcaggggcaactgcctgggccagggcctggtaggagggttcgttgcgggggtcagcgtggctggcgagcagggcatattggggatgtgtagtgttcggtcctgcaggtcattgtgaggacttggaaggcgtcctggctgcagtggcccctgagggtgggcagggagatccttagcgcctgcggcagcctgtctcctggagtcagggggaaggcagtggaatggagggagggcacctcctctgcccagggccctctgcagaagctgccggtttccccgggcctggtccctggacagacgctgggggcgttgacttagctgcctttgtccttcaggcaaacctggcttctggggaaactcctggttgggtaagaatcatttctccttaagggtgctgttcctcaaggacgcagcaggttcgaccctatttggagggaaaacctccttccagtgctgtctgcctgtgctgatgtcagtcttatccaaagggaacaaaaagccagacgtgtcgttctgagtgccgaccgcacgcccagtcctgtgtagaacgcgtctcgggcctgtcctcatcctcactgaccccgggtgcagccagcgtttgctctgtttgtggcgagcgaggcaggagagggaagaaagtgcagggtcttgggactccagagaacctgccagcctcagcactgcggggcagcagaggcaaagccctggcctcagcatgctctcactggctgtgccttgggtgtcacctagagggttgacagggtgcctggagctggggactcttagaccttatgtgcattccatagccacactgtcctccgccacttggcaggcccacccatgggtgaactccgtggctcggccaggtggaggtggtggtcccagccctccaacttctggcgtcattctttcaacatgtggagcacaggcttggcctggcctgggaggggcctcatccccgctcccacccaaatcagctggtgccccgactcctggcacttgccagggggaccctctctgccttcagagccttagccctcaccgtgccccctgccaggaacactattccccatcagcaccgcctccctgcctcccacctgcccacccaggttagcatcttggcacctggttgctgtgttcctgacaatggcaccctgtattgtgagtgaccggcatttggggtactaaccagttacagtctggcgcctgcattagatgctaagcaccatcagggagggagcctctgtctcaccctccctgcctccccgaagctttcccaagtgcctgtctccatctcccgggacactctaccctgttgcttccttggttggcctccgtccaaaccacacaagggactctaccgcccagcttccttctcagatggtgtgccgcgttccaggggtcttcccaggcccgatgcagtgcctggtgacaaaggctgttgtccagtacaccctctcacaggtgtccccaaaggacctgcctgttctgtatatgatgtctgtttgggagagggactgatgtcattgtcatttctttttcttttttttttctttttttttttttttttttgaagagactcttgctcctgtcgcccaggctggagggctagagcgcagtggtgagatctcggctcactgcaacctctgccccccagcttcaagcaattctcatgccttagcctcccaagtaactgggattacacgcatgtgccaccatgcccagctaattattgtattttagtagatacgaggtttcactatgttggccaggctggtctcaaactcctgggctcaagtgatctgccggcctcagccttccaaagtgctggaattacaggcatgagtcactgcacctggccatttatctgctttcaaacccccatctctggccattaggaggccccagttgccctcagtccctgagtggtcatgaacactgagttggggctgggcttcccgaaggcacaccttcagctgaagaaccagaaccatgtctggccctctggcatcctttgctgcagctgtcgctgtcgcagtgttcccggctctgccgccagcgagggtgactcacctgcctggtacagcagcactcggggtttcaaaggtcatgaacaggagctgggtgagcgtgggtgagcagacgccttcgaacgccggccagcatgctttttgtcagggtgagggtgggatgggcaggtctgagaacgattaaaaatagaccccgtggaagtgctaaccgcagctcgtcaacctgctttgtctttcaggactcccgtgtccagcctgagttccagcctcactgagtggccacccccaaagtgctgccagccgaggaagcccccagcactgaccatgtctattatggaccacagccccaccacgggcgtggtcacagtcatcgtcatcctcattgccatcgcggccctgggggccttgatcctgggctgctggtgctacctgcggctgcagcgcatcagccagtcagaggacgaggagagcatcgtgggggatggggagaccaaggaacccttcctgctggtgcagtattcggccaagggaccgtgcgtggagagaaaggccaagctgatgactcccaacggcccggaagtccacggctgagccaggatgcaaggctcctggtcctgtttgcagccggccaagaggcgctgggaggggcaaaaccatacggatgcgctgctgtctgagaggaagggctgacacttgctggcatggcctctgcgggcttcgtcatcgcatgcactgatgcccggggacctggctgtcctgggcttcccctcggcctccaggtgaggctgcccattgcaggcactgggcaggcctgaccttgctggggctcatggccctgtagcgcttttgttacttgaatgtctagctgagcctgtttttgatggagctactactgtaatgcgtgaactaacaaacctgtgaactgtaaataggcccctggaagcacgtgcttaagcccttttgctgatttttaaaaatatcatctagcgcacacgggactggtattctggctgtactaatgacaagctgagtcaagaccctggagggtcataggcttgtaaaggcccacgccacactcggcaggggtctctcatgtgtgtccatctgcgtgtatgtcaaggaagtgagatgccaatttggggtcttgaggctgaccagttggggtgcttgggtgatctctgcttcattagtcatgggtggaagaaaaaccacaccccccgcacccctccgttctttctgcatagactcacttgttaaatagcagttctgttgagagtggagttactgcagggaagctaccggacctgcctgggagccagtgaagggcgagtcagggcacgcgtcctggaggctgccagcgtccttgtagcagagcagtttcttgccgcttgggtcttcagcacgccaagccccccaccaaccctccaccccgagtgaaggcttcgctgaaattgctttggtcctcatagagcctgtggtggctacttttggtctgaaacccacttggcccaggaaagagaaaaggttgtatgttttgtgttggtgtttcctattttctgcactggaggggaggggactgttgaggttctgtcttttttcttcttttcctcttccctcttcacatcacttggcttcctttcctctctgatgaccgtccgcctatggggttctgacttcactttcctcagcgggtctccagtcccctgacccagctctaaaggcacttaggacccagggaacatttctcacgtgcacattcccctaagagccaccagactgcttcctgccagcctgtgcttgcggcagggagccggggcagggcagaggtgaacttgaagttcaggacttgactctcccacaggtggtgagctggtggctctctggtgagctagtgtctccacagcctgtctccaaggcctcccctatgtacatttcagtgagctcactttgatttttaatcccaccacaagcacatactaattttatttatgattcaaatgtgactcgtgcctgcccatccctgtaatagatggaaggtcagccccggcttaaccacagagcactggcccttcatggctgagctcagagctctggcctcctgctcagactaaaggcacctcctctggcctcacccaagcctcttctaaaaaccatgttgaatgaatccacgttctggaaccccgaggcgggagaagtagggagctgttcgtttaagcagcatacacctaaattgggggtttaaacattaagtaggagcttggggtggaagagggacagccggctgggccacctgagcagaaggtggtaatgaaacacctcagctgggctcttgggagaccttaggaagcaggagaggcaacacctctggctactgatggtgtggcaagttcagaagaggtggtggtggggtaggcgtgatgtcagcagaagccctgcaggctgggtgggcaggacacgtggtggg

SEQ ID NO: 7036 - DNA, 6000 bp, Homo sapiens
tgcctggcagctggtcggtgctcagcacacagagctgtgacgggcctcatgcaatgtgcatggtgcctggcagctggtcggtgctcagcacacagagctgtggctgcccctggtgccgttccagggatgctgtatttttaggatttgccagcttacgagcctctcaagcatcgtcccttagaagtcagccccgttgtggatcctcagttgtatcacgtacctccctcatcagaattggctcataataattttttgtgtttcataaagtcagatcctcagaggaccgtaattgtcaaggttgggtactcataaaaaggctgcaggctctgacagccttatcagaagccacagtctcagagacactggggacacatgcccgccactgatggaatagcccgctgaggttgatactttgaaggcagcaaccttggtttggatgtgtagtcttggggatttctttaaaaacataaagttctttacatcacagccatacgttaggttttagttttcatttgctttgccagagctgtccttataaaaataacttcttcccatgtgtgcacagaactatgttgtgcttctggactccacactccccagatcccagtatgactacatcttgcctcaagtttctttcaccgcagtgggctaccataaacacatcaccttgatttttaatcccacggtaagtaaaagagggagttaaaaaaaaatccatgggctgggtttggtggctcacgcctgtaatcccagcactttgggaggccaaggctggtggatctcttgagcccgggagtttcagaccagcctaggcaatacggtaaaaccccaactctacaaaaaatacaaaaattaaccgggcgtggtggaacgcacctatagtcccggctactcaggaggctgaggtgggaggatcacttgagcctgggaggttgaggcctcgatgagccatgatcatgcccctgcactccagcttgggtaacagagtgagaccctttctccagaagaaacaaaacaaaacaaaacaaaacaaaacaaaacaatccatggggtggcaaaagaaggcatgtccatacaacctgtgctccaggtcgcaggttgcagggcagatatttaaagggctcctggcattgggtcactttctcattctgccttctggattctgggcttccccagattgtttttagcttttctgagcactgatgcctgcgattccctttgaggaggaaactggtaataagagcagtgtaattgtttagatcggtggctcaggaatgattttgggggaggagggacaccactatcgctggtgtggcgtgtgcttctccatgagggagcacatggtacatggccacgcaaacccctagaaccaactgctactttacaggaaatagggaggacccaggagcacgcaaatgactccacagggatgcaggacaaccacctggagcctgatttgtttgacaaataaattgcaaggaaaaaaaaaccaacaacagatggacagaatacctgtgggttaaaagaaacttaacttatcgcttaattcattgcaatatgtggcccttactatttgcaatatgtgtatctgttgcatacggtctgtcctgtatccgataggctggaacagtggaacaaacaaaacatacacgtatcttttaccttcttgataaaattgtttagtgattcctaaagctcagatgcagtattgtcacctgatgattaaacagacacatcagcaatagcaaaaacagagtccagggctcagcctcaggactgctgattctgaacttgacggggtgaaagtgtagcacaggagtctgcattaaaaacaaaaatctggcctcatagctactgtgttggttgttgcttctaggccttttcagtgggcagaataagaactttattgttttcaaaagatgtaactgtaagtggaacaatatcctccgatcctcctttttccttttttgataacgacacagcattcctctgtgtggatataccgtgtgtcttaggccatttgggctgctattttgtatcttagactgggtaacttataaacaacaaacatttatttcttacagtactagaggctgggaagtccaagatcaaggcattggcagatttggggtctggcgaggacttgctgtctgcttcatagatggtgccacctagctgtgtccccacaaggcggaaaggggcaaacaagttccctcaggccactcttacggggcattaatccctgacttaatcacctcctaaaaagggtgtcctcttgacactatcacattatggattagggttcaacctatgaattacgtaggcacagacacattcagatcctggcactacatgtaggatattcagttagcccctggttgaggggcgtttgtgttgttactggttttctgctattacacataaccctttaatgaattgccttacgcatgcatgtttttgagtgttcgtcagtctctctttggaatagactcccagaagtggaattgctgagtcaaagggtaaatgcatacggaattttgattgatacggccacttcccatccatgggggttttactgttttatattcccgccagcagtgaatgagtacccttttttccccaacagagtattttgtcaaatttttcaatttttgcaggcttatagatgagaagtgatattatctcactgtacttctaattgcatttctctcttttcatgtggttaagagccatttgtattttctgtgaactatttaacctatttttctatagaatttttggtctttttcaaccattttcagctctttgtatactaggaatattaaccctttgtaatgtttgttgtacatatttttcccaatttgtcatttatcttttcacttggtttctgcaaagatttactttatttctgtgttaaatgtgttgattttttcttattgcttctggattttagagtcataggaaggttttcttcattcccagcttttacaggaatttatcgtgtttttttcaggcagacttttatagtttctgtttttacatttaaatctctctatccatttggagtttttcctggtatagatgtgaagtatggctccagattgtctttttccacatgctatccagttaccatttcatgcttttcaaacgccatcctgcatggaaggtggacaggaattacctttcatttagagatgagaagatgggaacctagaaggagatgtgagcagcccaaggtcaccagctcacgtggagcagtgctagggcttgagcagagctctgctgctgattctgggcttctgtgaagagtgattcatgctcagtgagcctgtaaatatgatcttacctgaacaagagagtttttctcatgacccacgaggaaacacttccttgttactcacagtagagacctggttagaaagtgctggagagggctaggtgtggtggctcacgcctgtaatcccagcattttaggaggctgaggtgggcagatcatttgaggtcaggagttcgagaccagcctgggcaatgtggtgaaagtgaaaccccatctctgctaacaatacaaacattagccaggcgtggtagcacgcacctgtaatcccagctactcgagaggctgtggcaggagaattgtgaacctgggatgcagagtttgtagtgagctaagatagccccagtgcactccagcctgggcgacagagcaagactgtctcaaaaaaaaaaaaaaaaaagaaagtgccagaaagataagcatatacaagaaccacttacctttgcttggggctgcattgtggcccagttgctgggagaggcttctgtgaaggccgttgatagctgcaggcagtgacattctcaggggcccctagcagacaactcatccgggctcagggacacacctgggagccagtggcaggaatgtggagacactgcttggtggtggccgagcagcccagcctcgtagctgctgcctgtcacttctgagaatgtaagaaactgtgccctggtgtgtgatgttccccttcctgtatacctatgtaactaacctgcacattgtgcacatatatcctaaaacttaaagtataattaaaaaaaaaaaaaaaagctgtgcctgctggggcttggattcccgagcagggccaagtgttgaatgaagagagcgcccactctgtgccaccccgtacagggccctcacaggttgatcctcacaacaagccttcaagcaggtgtgccattcctcccattttcacagaagcccagaaagattgagtcacttactgagtgttagcagaaccaggactcaagtgaggcagtttgtctcaagccacatggtttccacctcgttctgccctccgcgtgatgagtggctcagcattgcatgttcacgggggctttgtaagcacattggtttccttctttgttgatgtgactgcccacagcctcgcgactggattttactcagtattccatgccctgctgagcatttcacatactcctttcatcaagtttcacagcatccacccccagtgggtgttgttcatatgatctccatgtcatagttgagtaaactgagtctcaacgtggttgcctgagtttacccagtgaggcctgggacctgagcctagactgaatcactcttaattcctgctgaattaaacttttatttatttattcattattatttttttctgagacagagtcttgctttgttgcccctgctggagtgcagtggcacgatcttggcccactgcaacctctgcgtcccgggttcaagtgattctcacctcctgagtagctggaattacaggcatgcaccaccacttctggctaattttgtatttttatagagacggggtttcaccatgctggccaggctgttctcaaactcctgacctcaggtgatctgcccacctcagcctcccaaagtgctgggattacaggcgtgagccactgcacctggcctgaattaaacttttaagtaagtgtttacttcagtggaaaaatgggttgggttctaagagatgtccagagatacaggagtaggcagttgttgatggaaatctgttcctgcccttattctttcatttatgaaagggcatcccaggtacagcggcccccacagtcactctctagcccagcagttctcggatgggttggttgcaggacccctttatactgttaaaaattattgaggattttaaagagtttgagtttgcatggattatctctgtgtatatttatcatattagtaattaaaaccgagatgttgaaaacgcaagaactcacaagctacacattccgttagctgtgggcgtgatgacatcagggtgcgtagtctctggaaaagtccactgtgtgcttgcgaatgaaagagggcggaaaaggcacatcacatcttactattggctgaaaatagctgtggcctcgggaacctctgcgagaggagtcccggtatcctacactgagaacactgctctggctcattaacttgtttttatcattattgggaagttctccttccatttatttgcttcctttatgagagtagagtgggccaatgggatataggttcacttgatgctttagaacccagcatttcaggggctttagcaagatggaaatgtctgtctcatgtcaagtgtccaggagtgaccagtgcagagatagtctggtagctccaaggcgtcaggggacccaggccccttctgtctcattgtgctgttccagtgcattgcttttctccaaaatggggcaattggccaaatgctgtctacccagcaaaagggagggcacaccacttccctagggtccagccagggtgtggcacttaccgcttctgttcctgtaccattggccaaaatttagttccagggctgcgcctgctgcagggaaggctggaaaaggtgatctatattgtcggtggcccagataaaagttgggggttctattgggagaaagggagaatggccacagggatgctagtagcagtgcctgctttgc

SEQ ID NO: 7037 - DNA, 6000 bp, Homo sapiens
caggagggcggcggtggacacgccccggggcgcacgctcgctggcggccgcctgcccgtgggcagaggagcgcacgaggccgggcacgacgctgggtggcgctgccgggccgccccgcgctagacctgttgcgtccagggcgcaactccggcaggtttagggtaaaggggcgctccgctctctccgcgcgccccctgcagccctggacgcagcacctccgtttgggacgccctacgcccaccttaacttgaggctcccatccacgcagcctctgcaagcctcaccgcaaccgtgctaggcgcgtcgggtggggcgggaataaagtttttccaacccagtttggggagagggctggatgggaaggaccctccctgctgcagacttcatggcaggctgcactgtgtcccctcggctccacggctgccccgggggcgctgctttcggtaggtgccagcccccgtgccagcaggatgggctgacctgtgtaccgccccctcccacccccttccccattcccatcccctcccccgcctcctgcgcgctccggccccggcgtctccggccccgcctgcgctggggtcgctgcagtccccgcagctgccccgggctgcttgcccaggcgccccggccttattccagcctggggagcgcctcggtggggagcacgggacagcgagggaggccgaggcgggggccctgggcgcccgatatctccgaaccggggaggcggccccgattccgagagccggaacgcagggaaaggcaaggacggggcggccggcggaggggcgggcgccgctcatcagccacgccagtcacgtctggggccaccggctgcctttttcttcctttccccctttgctttcttccccctccgctgttggcgagggcaaagtggccgtggcggcgccatgcccgggccggagtgagtgcgcgcgggcgaaaatggcgtacatccaggtagggctgaggctgggggcaaggtccggggtgcgggtagggggtgccgcgccccctccggctgggagcgcgcggaagggagggcccacggctaggctcccacaaacttgcttcgagaaaaagggtgcccgtgcgcgggcaacctgtgcagcaacaggggtgcgccccgggaggagagactggggacccccaaaccccgggatggagggtcctatgtgtactctgcaacgcgcgcccttgcctcttggggagggaatggggggtggggcggacttttcttctcccctgccccctccctctccttggcaccccaccccaggggaggggccgtggggagggcggcccggggcgcgccagccacccggcccgccagctgccgttgccgtggtgacggctccggctaattggccggcggagcgagcctgaggcagctgttccgaccaggagggacaaggacgtcgtctctcctgggcactgggtgctgaggggtgggggacacccagaggccagaggcgcgctggtgaagagaagggagcctgttactttactccgctgcattggggtctgggagatgtggaccctcttcaccttgaagaaacgtcccccaagaatccttgggctgaaataattctgaaataatttctaagcagccttttttggggggagggggcggaggggtgggccgggcttcttggtgaaaagacctttctcctctgcaagaagggaagtgaccgcaggtcagcgccaaggtcaagcaggcagacccgcagtgagacccgttgagctgcttgcttctggcgctggcgcctctgagctgggcagagaagcttacagactcccacgtccagggtgcatcttggctcacatcttgtcccctcagccacagctgggggtgctgctggtcctcccattcccctctgggtcacatatcccctcatcgtgtcctcagacgcttcagcctgccgggaactctgtgctgtgtcacctggcggagcctcttccattcatctcctgccttagattccctgaattggcttccctttcgtggaatcgccagtttctcttcaagttcaatgaaggtcacattactgtccacccactgtgtgctgaatgttgtccaggggctattgagtagtcgcccaacaaacacttgggcgaccgcctactaagtgctggcactggggatacagtgatgaaaacagcacagttcctgcccctctgggtgcgcaatttagtgagaaatgaacatgattaccggctcctggagttcttaatggccgccttcagcacagagaaattaagtgacttgcccaaggccacatagctgcttaggggtcaaggtgggatctcaagaggggactgtggtagatatgttaagcatctcatatggcgatgacccagtgatgttggttttccttctagaacaaggtgttaaactttgttgtcctgtaaagtgccagatactattttttttctcttggaggctcacatggtctctgtcacaactattccactctgactatagcaccaaaactgctatggacagtagtaaatgagtgggcgtggctgtgttccaataaaactttatttgcaggcaccaaaatttgaattttgtatactttgcacgagtcaagaggcattcatcttttttttttttcaaccttttaaaaactcacaaattattcttagctcaagggctgtagcaaaacaggctgcggggctggttttgatctgcgagccttagtttgccaacctctgtttagaatgcatgggttgtctttcttcctctttctttctggtgtgaattggttctcttccatcggtgtcaaacacgtgagcccaggagacccaatgccagaaagactcagcatgcctgggaatgtcagggcaccctctttcatcttctttgctttctctctgctccttgacactcatcttgcacctgggctttgagaaagttggggaggctgtttttcagcagggccatgaggtgaccttgtctctgttcactttggtttcataaatggcctcttttgaccaccacatgtctaggaaatgcttccctgtattcagaaaatggtcatagattattatgaaaaagtatcactttatcctaacattctaaagcactttttcatgcaagccctatgagggtataatattttgctgttttgtgccctgctgtacctgccgggacaatacccagtgcctactgggttccactaggtcttgacaatcacctaattctcatcacagaaagggtgcattttatttttcagctggaccgcacgcaagtatttgcatagtcagtgtcctgtcccacctcaacagcacgcctttgaggtatagagtagcctttccactaaagaagaggtaaccgaggctcagagaggccccctgtcttgcccaagtcacatgatcagtcgatggtgagactaggactctagtacttcctggctcagcttgttgcgtggcccctcagcacctttgggtcttgttctgtgtatggtttgagttttggctttagagagtttgtgataagtgcctttgactatttcccaagctgttgctattcccttaccacttcgaggatttcaattttttcacaagccacgtaccacctatactatgatgatgatgatgatgatgatgatgatgatgatgattatgattattattttagacagggtctcactctgtcgcccaggctggagtgcagtggtgcgatctcggctcactgcaacctctgcttcccaggttcaagtgattctcctgcctcagcctccccagcagctgggattacaggcgcctgccaccacgcctggctaattttttgtatttttagaaaagagggggtttcaccatgttggccaggctggtctcaaactcctgacctcaggtgatccacccgccttggcctcccaaagtactgtgattataggcatcagccaccacgcccagccctacctatgctattattaacttaattttttttctataaatgggctcatttttatttttactttaaaaaaatcatatgaaaaggaaacattatgtcactaatatcataggaaaccaagatcatgtgacatcgcagaaggcaactagaagaataaacccaatgggaataatgccacattactgaattctaggtggacgtggctgtctccaagcctctggacaagatctactttctttgtttaaaagaaaggggatgggggagggtggaaattggtaagtggtaaaagatgttaacatgtagtggtaccaaattgagactttctcctccttaaaggagaatcggaaaaaagataataactttctccctcttgattcaaagttctgagtttgagtcccacctcagttcacctctgggacatgcccgaggttgggatgcagtacttctaacctatctagcctacttggcccatttggaaaaccaccttaaagagaaggagggagtctgtgccttgagaacccaggagacgaagatggggaggcggggtggggccacaacaggaagggaggacctccttcctcaagaggaccagattagggcttcctttttagttccctctatttgtgggtggtgataggaaacaccccaccatcaccattggagcagaattggaaggtagggcctccgggagggcgggggagccaagtaacatccactgtgtgcctgcctgcatgttagctaatcatgtccttttgggttggctacatggctatttctgtataggaaggtttgctcttctcctgaagtgtggctgcattggatagcatgactatctatccgcccgctctgattcataacagcatacggtgcaaatcaaatcgaaatgctaaagtttcccatttatttggtgttggttaaccaggaggctaccagcagccctgaaaatagcaacaccttgttaggatgttaggaagtcagctcccttcccaggatggtaagtggaaatatgcagggcttttttttttttttgtaaaatttttttgagttgctggaatattgctaaactggtcttgtctctctttctttaaccccttcgttcccttacgcccttggcttcatcgtggatcttaaaagggcagttggaaccattaaacgaggtgggttcatttgatgatttgtttggtctggtttctaatcaagaaatgcctgactttcattttggagtcttatgtggggctgtggggatattgaatattcaacaataacctggtgttaataacggcacagtttccattcctttctaccgaaaggagatcccggttttgaaaagacaccagttgacaagacaagtttccctctccacccctacttattccgtttgattatctctgtctgtttcatgtcaccgagattttttaaaaatattttttcccctgctttcaagaagacacagtaatattcattgtgtttcgaacatatcgtatagcccttatgatgttgtataaaccacccacatgtcaagaaagacgttcacataaactacaaaagaaaatacctgcaaatgttttgcttgctactaacggctccagcgagttgatgtttgctatctttgtgcctgcagttggtaaatagaaatggaaaacattttgttctaagtgctgagcagcagagccagaactcctgaatgtctatttctcatccgagatcggctgcttgtaattttgggtgttgtttctcctcttcctcttccccaccctgcccacctcccctctcccccatccccccgcccacctcccccaatggcctcagggttttctttctagaatctctggtctgctgctgtgcagatggacctgccggcactgctgtcagaagtgctacgagtccagctgttgccagtcaagtgaggatgaagttgaaattctgggacctttccctgctcagacccctccctggctgtaagtaaaactgctctgaacttctctgaaatcaatttcaagacttttcctttttaatgagaaggcgggttgggggtctgggccacgggagggaggatttgggggcatgaaagagaagcaggc

SEQ ID NO: 7038 - DNA, 6000 bp, Homo sapiens
caagttgcagtgcagtggcacaattgtagctcactgcagccttaaagtcacggctcaagcgatcctcccacctcagcttcctgagtagctgggactacaggtgctcgcctctacacccagctgattttttaattttttgtagagacaaggtctggctgtgttgcccaggctggtctcaaactcctggcctcaagcaatcatcctgcctcagcctcccaagtagctagggctttaggcgcaccctaccacccgcttctcatctagacagtcaccttgcagggatctccacctgtcaaagttttggagagttctgtgttctggtaggacaaatgctgcctttaagtgtgccagggcaggctgggcatggttactcaagcctgtattcccagcactttgggaggccaaggtgggcagatcacttgagtccaggagttccagaccagcccagagaacacggcaagacctcgtctctactaaaagtacaaaaattagctgggtgtggtggtgcatgcctgtggttccagctactcgggaggctgaggcacaagaattgcttgagcccgggaggcagagattgcagtgagctaagattgcgccactgcattccaggctaggcgacattgccaaaccctgcctcaaaaaaaaaaaaaaaaaaaaaaaaaaaaaaaaaaaagccagggcagtttctggggacagtaaggctggcatgggatgggaagggcattgtgctttcctcttagtgggaggcactacatcctttaatatggtacttggtggatgaggaatcctagccttttaacataatcatagtctttcatgcctgttctgcttaccatgtgtctgatattgtgcttagtcccagccctagtcatctacagaactcaggctccagagccagacctcctgggttaaaatcctgcctctgccactttcttgcctctgccactttcttgctgtgtgaccttgggccaagttacttaacctctctgtgcttcaaatgactcatctgtaaactgggatgattctagtagtacctaactcatagggctgctgtgaggattaaatacaacccacacatagacggtgacagaacaatgtaaggataaatgttggccacttacgtattacaatgacttccattttatagctgaggaaactgagtcaggctcagggaaattcataacccatccaatgacatagaactatccttcctgttccagcgtctgctcatttattttcatttccctcttaattcatgcccccctcattgtaccccctaattcaatcatcagcctctatctagggtccctgctttctgtgtctggggctcccacatctgctgcttccagaaggttctccctctttctcacttcccaaacttgaggagctcccagtgaccttggaaatagatctttttctttgactgttcctgttgttttctccaattactaacacaatactcatgcaaattattttaaaaatttatttataaaaatattttcatagaaggtgaaaaactctgctaattcaccctctggtgataactgctgcttggagtttcatgtgtgttattccagatttctccctctcctcctgggtgtaataatacagattatttttacttatcttttaaaaagatgtgaccgtgctattcatactgtgtgcaattcacaggagacaattttcaagatttcacttattttttgaaaaagttacactgccacgtggtataaaaccccaaagagaccaggcacagtggcttgtaatcccagaaccttgggaggctgaggcgggaggatcgcttgagatcaggagttcgagaccagcctaggcaacatagggagaccaccccccgatctcgacaaaaaagagaaattaggtgggcatagtggtgagttcctgtagtcccagagccttgggaagctgaggcaggaggatcgcttgaggccaggagttcgagaccagcctaggcaacatagggagaccccatcttgacaaaaaagagaaactaggtgggcatagtggtgagttcctgtagtcccagctgctcaggaggctgaggcttaggcaagaggatcgtttgagcccagcctgggtgacaaagcaaggctctatctctaaaaaagaaaaatggaaaaaatccaaaggatatctaagcaaatactgaaaagtatctccctccatatctatctccagccacccagtttctcactctggaagcaaccagtattgccaacttattgtctacctgcagacaagaaacgtataattacagtttatagggcatatatgtgtcataaaccgaaatatgtaaaaatatggtatagtttctagaagaggagaaacagaggggagaaaactctattagagaaaatgttgagttgctgatttccttgtcccacgcaatggagagcgaggagacactgtccatggaactaggtaacatttagagcagtggttctcagggggaggcagttttgcctcccaggggatatttgcccattcctgaagacatttttggttgtcgtagcttgcagatggggtggggttggggtgtcctcctggtatctaatagatagaagccggacatactgctaaacaccctacaatgcacagagcagtccccccagctccccacaacaggcagttgtctggccccaaatgacagtactgccaaggttgagaaatcctgacttatagctacaaaagaatcaaaatcactgctttgacttcttgccaggagctcgtttggcgcagctccacaatgattggcaggcagaaccgcacgatccaggtgttcctagagtcaaatgctgccaggtactgccctttcaccccagtaatgacagctcttggggcaaaccaaactgtcttcttggaaaccaccaccctcctcctctcatttcctctgatcatacaatttataactcaggtctcttccacaggagaaaattccatttctccattggaaagccactgttttgcatttagtgctaatacatcaaagattggggctgggtgcagtggctcatgcctgtaatcccaacaccttgggaagccaaggtgggatgatcacttgagcccagtagtttgagacaagcctgggcaacgtagagagaccccatatctataaaaatttaaaatgttagccaaatgtggtggtacatacctgtagtctcacctccttgggaggctgagtgaggcaggaggattgcttgagcccaacagtcagaggctgcagtgagctatgattgcaccactgcattccagccttggttgacaaagcaagagcctgtctcaaaggaaaaaaaaaaaaaagaggaacggtaactatagaccccaatactttctgtgaattatagaactaggacattctttttttcttttaaatgatactcccccaaatgcaaatgccataggaaacagattttgtttgttctggtatttgtaaaaatacagaaatttgatccagccctcaattgtctacctccttctttatttctgtatgaatataaaatctccttctcagagaaaaccctttgtgatggattagcatcccatctgctggggtttatccctgggaatgtgagtcttaggtggctagaaataatcttagtccaaactttctcaaatgttaactgatgtagcccttatcaacactaggaggagggagtgtatatagttcccactttgtaggttaatggggaggaaattgaggctcagaggagttgagacattacagtcttagagtgccagagtcagcatttgaattcgagtcaactgtcttgaaatgtgggctggttttatactgcctgtcctttgtttccagaagggacatgccattggtgatcataactacagagttaaacctgtatggtccgcatgttgccaaaggggatgtatctatagaaaaatgtggccaggcggccagatgcagtggctcatgcctgtaatcccagcattttggcaggccgagacaggtggattacctgaggtcaggagttcaagaccagcctggccaacatggtgaaaccccatctctactaaaaatacaaaaattagccaggtgtagtggcagacacctgtaatcccagctactcgggaggctgaggcaggagaatcacttgaacctgggaggcggaggttgcagtgagcccagatggcgccattgcactccagcctgggcgacagagcaagactcagtcttcaaaaaaaaaaaaaaaaaaaagaagaaaagaaaaacgtgtccaggccaggtgcagtggcttacgcctgtaatctcagcagttttggagaccgagatgggtggatcacttgagctcaggagttcaagaccagcctgggcaacacgacagaaccccagctcttcaaaaaatacaaaaattagtcaggcatgatggcttgcacctgtggtcccagctgcttgggaggctgaggcaggaggatcccttgagtccaggaggcggaggttgcagtgagctgagattgtggcactgcactccagccgaggtgacagagggcaacgctgtctcaaaaaaaaaaaaaaaaaaaaaaggagccagtgcccgggggtgtctagtggagcatcacgttccattctttgttggattaatgaattcaggtagtctcttcccacaccacctcacactctagggttaaaaaaaaaacacaaaacgaatctatttacttccttatggtgtccaagaaataaaataacctctagaaaggactttgatattttcattgagctgataacaaaagaatattaatgagagggaggagttagggcttaggaagaaggaaatgcacaacttgggacctgagttaggccttcatcgtcgcggactcagtagacagaggccataggtgcagctgtgatggtagaggtggaagactgatttgcattttcaccaggtgagacctggttactcattggttgatgaggaaagagatgatagccagggcggcataaaacggcaatgagctcagtaaacaacccccttcccgtgatcttcgtggcttcccgcccagacgtgtgaccaagatagcaaggagcagtctttaaggcgacacggcagagaggcagaaaaagatgggccttaccggttagttaagaaaaaaagaggacctgttgcctgtccctctagctttgaactacaaagtggaggggaagtttgtctggattttcctgtagaactgagggcaggtaagtgaaagtgctttgaaggaggggtgggaggtcatgggaataatgcggaatgcttgggaacgtgtcagcgaaggaggacggaaactgaggctgtcgtattgcttattgccagacgagggtacagaattgaggcacaacagatgtttgttagaggaaagaatgaccaggggaaatgggaggcaagagagtgttgattatgagaacaagccctagggttatctgcttgagttggaatctgggcttccccaggtctaactgtgggattctgggtcagttattgtatgtttctggccttggtttccttgtctgtagaatgggtagtatgccaaaagctcccacttccacaggtggatatcagagctaataaaatacggtgcacgacaaacacgcaataaatgtgacctctatgtctgggggtgtctcctggagcatcatgttctagaagaatgctttgttggatgagtgaattcaggtggtctctcccaatggtatttcattttctgagatttaaaaaaaaatctatttacttctttatggtgttcaagaaacaataacttctcatttttctcattcttctcatccttctcatttttctcatccttctcttcttcctctgataagtgatttttgtgtttttttttttttttttcgagacaatatctcactctgttgcccaggctggagtacagtggtgaaatcatagctcactgcagccttgatctcctgggctcaagcaatcctcctgcttcagccttctgagtagctgagactataggcacatgccaccatgc

SEQ ID NO: 7039 - DNA, 6000 bp, Homo sapiens
ttagaacaggataaaaaaggaaaggaaagtatgcttggaagagacccaaccaggcactgaggtcaagcgctctgtttaacagtaatctttataggctggcccctttctcatgattcttcccttagggtgggctgcccgcatgcctggtacccccctcacccgttggaggtgagcatgcgcagcgtgtttaagaagttgtacccatgcccatctgagactttcttccctattctggtggagtaaccctggaaagtcatactccgccattttgtctcttaatgcacatgcccaggaagttgcttctccctggtgtctgcattcaattaacactgttaatttagtgcaacgggtgtggactatcaggaaatggcctctccaatttatctttttttttttttttttgaggcagaatttcgctcttgttgcccaggctggagtgcagtggcgcgatctcggctcacccaaacctccgcctcctgggttcaagtgattctcctgccttagcctcccgagtagctgggattacaggcacccgccaccatccctggctaattttgtatctttagtagagatggggtttctccatgttgttcaggctggtctcaaactcccgacctcaggtgatccgcccgccttggcctcccaaagtgttgggattgcaggtctgagccaccgcgcctggcccaatttatcacttagagaggcaatgtgataactgccaaatcatcacccgacattcctggtggatggggggagagccctctcctgtcccgctcatacctgtctaactacctgtaacaaaggtagacccagagtttacatagtgcagaaaatgtcggaattcttactgagagccacagtagagataccttactgagcaccccttacagttataactccagaaaagccatgccttagaagtaaagatcatgtcctagaataagatcaaaaacctaaatagacccaccctaataaagaataaaataaaagcctgacagaatcaaagggagcacgcaaaatatacgaaagctgggaaaagacgtttacttctgtgaaccaaaagtatctgagacaggtctcaatcaatgtggaaagtttccattgccaaggttaaggataagcgcctgagaggtatgtctatgcctttctccaaagatgatttcaagggcttcaatatttaaggagaaaggattgatatgggtgaaaaggaagaaaatttgaaatcttaattccagctctttgggaggccagtccagtggactgcctgaggtcaggagtttgagaccagcctgagcaacatggcaaaaccccatctctatcaaaaatacaaaaattagccagatgtggtggcatatgcctgtggtcccagctactcaggagactgaagtgggaggactacttgagcccaggaagtactggaagcactcaagcgtgagtgacagatcaagaccgtctcaaaaaaaaaaaaaaaaaaagaaaaaatttaaaaatgtgtgggtatacaagagacaaagggttgcatccccttgagtctttgatcagcctttcactgaatatacaatttacatgtgagaggatgggcagaggaatactcacttatgtcattgtctggctcagagaatcttcattttttttacataatacaatgtaaacaatagggcagaggaagccatcagatacacatttgtttaagatggactttgagttctgtcctttgtcctgcacctgtgaaaataagctatcaggcctggtgcggtggctcacacctgtaatcccagcactttgggaggccgaggtgggtgcatcacctgaggtcaggagttcgagaccagcctggccaacatagtgaaaccctgtctctactaaaaatgcaaaattagccaggcatcatggcacatgcctgtaatctcagctactcaggaggctgaggtgggaaaatctgcttgaaaccaggaggtggaggttgtagtgagctcagatcatgccattccactccagcctgggcaacaagagtgaaactctccaaaaaaaaaaaaaaaaaaaaaaaaaagagggaggagggagggaggaagggagggagagagagaaacagagaaagagagacagagagagagagagaaaggaaaggaagaaaaggaaaggaaggaaggaagacagctatcaatttacattgccagggtgaaattcaacaaaactgttttagggtaaagatcctcagatccacatggaattgccctgtgggcaaattgtaaggtaagttatgtagctttttatccttatagctatcttatttaggaataaaacgggaggcaggtttgtctgacatcattcccagcttgaattttccctttggcttagtgatttggaggccctgagattttttttcctttcacacttcctaactcattttatctatgacagaaaaatgcatgaatggggggaatgaaagtgaaagttaaagccagtatcactctggaacataaatgcacaaatcctaaacaaataagtagcaaattaggtctagcaatatattaaaagaataaaacatccagaccaagttgggtttataacaggaatgaaaggtttatttataatttgaatcaatcaatataacttaacacagaataagaccaatctgttcacctcaatacatggaaaaagtatatgtgaccaaaaacaataattatagaatattagaaattgatatgaacttttttttcccccccgagacagagtctcgctgtgtcgcctaggctggagtacaatggcagtgatctcggctcactgcaacttccgcctcccaggttcaagcaattctccctgcctcagcctcccgagtatctaagatttcagtcaactgccaccatgcccggctaatttttgtatttttttttcagtagagacagggttttgccacgttggccaggctggtcttgaactcctgacctcaggtgatccacccaccttggcctcccatagtgctgggattacaggcatgagccactgtgcctggcccagggaatatttcatcagagataatacctgacagggtaggattctgaaaggaatggggaaggaaatgccaacatcgaaattatgcattggggaagccatgattaatgcctctggccctaagatggcaaggtaatgttgttcccaagtataaacccacatcaccttcctctggtgtgttttactcctactgttgcctgctttctctttacattctcccaccccatactcaccgcgagcgctcaggctaggtagttaggctccatagagtcaaattggaccccacattaacgaaactaacaattcgagctttccagcaatgaactcatctgctcttccatgtctactcttttcctgtctgctggtttcctctcccagggctttcagtgtgttctacgcagaaaccagttcaaggactgggttttcttctgcaataaaatgctggagttgtggcagagacctccacagtgagaacagccacggagttggctaggaggtgacatgatgtggaagtggtggatgtgtccacaagatggcactcctaatttgtagcttaatgcttaataggacattttgcaattgacaaacttgggattttatgatttatgtagctgatatcatgaattatgtttcaaatcctgccacattttgaacagaatttatttttgcccctttctgatattgggtcataacctaagaatgagaggacattataagcaggtgtgggtgtgtgtgtgtgtgtgtgtgtgtgtgcacttgagtgtggagacttttgtgttcctcctacctgacctgaactgttgaatgatgaagttacaatgattggactcaggggtgcagctagctaacttgggaattggggttttgaagtactggagacagctttgtatgccatgttaatgaatttgaattttatcctgaaaaacgtggctgtcgttgaagaattttaagcaggcaggtggcttgatcagagcactgcttcccagatttcactcaatggtacctgtataacacattcatgatttttgctgtatctccgtatcatcaagttacttaacgtttttacaccaacttttattattttataaatgtacttaaagaggaaattcactactagcattgcttgccataatcaaaataaatatattattaaaatggaacagtgctaaataaggtgtacacatggacatagagtgtggaatgacagacaatggagactccgaaaggtggaggggtgggagagaggtgaacgatgagaaagtacttaatgggtaccatgtacattattcgggtgatgggtacactaaaggcccagacttcaccattactgcaatatatccatataacataactgtacttgcgccccttaaatttatacaaatttttaaaaggaaaaaatggaagtgttcatctatgtaccaacttaaaatcatctcacgcaccactagtgttaaatctaccacatgtggggaaactgtgtggtatgaattgggttgagggcgtccccagcaggcacagaaattgggttggtgccaggttcttaatgcccagatcttaattagagagcccaagtccgttgtaggcctggagcaattcagacacaaggcaaaaagaaagtacatttgcctatgccttgtaacgtctacaccaccagcctttctgaaactattgtgcatacgaagtcatcccaggatcttgtaaaaacaccgattcggatccaatatgggacctggagttcatacatttctaatcaactcctaaatgatattgatgctgatactgtcggtttcccaaccaagcaacgtagcaaggtacgaaactctaaagtccctaaagggcagggaccacgcctctcgcgttggcatagtgcctagctcaaggcactttctgggttaacactcgctgaggaccggagtgaacgcccccgccccaagtcgtcacgtgactgactttctccaactgccggtttcggctcacataacacacctactatccaaaacatttctattttcctaacacaaaaactatagctaagtttttatattctatgtagccccagcctaggacgtaaattccacgagaccaaaagccttgtgatgattccccgaggttgctgaccctcccggtgtgtcccgggcctgctctgggggacacagcggcgaatacgttgaacgaggcccctgtttcacggagctaaagatccagtaaggacttcacccagcgagaggcaactacgccgggcttcgatacccaatacctctgcagaaaggtggagtggcaggaatctcctgaagcctccaacgtccaggaacgcggaaacccagggcctccagtgcaggtgtcatcccggagggcgcatgcggagtcccaagagaggcgcgtcccattggacaatgctgagcggaagagcccaagatagcggggggagttgtgacaggctgctgcagacgtacttagaaaaggggtgcatactggatattcaggctaggagaagaacgcaaaaagcagtgacgtacattattctctgcatatatttacttgggaaattgtgcgtctccctattctgagtcttggaggaattggactggtccaaccttataaagagagcagtagagcgcggcagtatagagagtacctcacgaaggggacgtgggaaagtgttagcggggaacgctgggaaactcccggcctccgccaccatcttgctttcctttaatccggcagtgaccgtgtgtcagaacaatcttgaatcatgaagctactaaccagagccggctctttctcggtgagctcaggtggcgggtttgggaaagggctggggagcagtgtgtcgacaaggtgatacgaggcggaggtgtctggtctggggtctgggccttgggattcggtctgcccttcagctgaaccctgcgggccaagtgggctgcagactgggtcaggctttggaggcccagctcatgctgtgagcacaagagacctaacaccggg

SEQ ID NO: 7040 - DNA, 6000 bp, Homo sapiens
tattttatgattttaaattcaaagtcttgaatgcagggcattagagtgggaaggaagattcaagagaatgctaatgtgaaagagaaatggactcagaaaaagaaaagaaagagagtgtaatgtgctctttggttgctattctatttgagcccagttctccagccttcttcttaattttgtgagctaccccaaagttcctttcctgtgtaagatatcccaaatctctttttttcacttctagtaacccttactgtttcataaataaagagcaatggcagttaagaatgagaagcaaaataaataagatacaagaaaagtagagaagttgaagaaagtaactggatcctatgactgtctcaaatttggaagggttgcagtcctgatacatgcatatccttcaaaataagcccccccacctccaacactttttattaaaatggtatctattccttgcaacggagggagcaactctttttgtttgtttgttgtattggtcagcactctttcagttgcaagtgctaacagaaagatagctaatcactgcagcaataaagtccagggtccatgcattccgcatggctagattcagaggttcaaaggatattatcaggaatctaattctccctccatcagttctgctctcctctttgttggctttattgttggtttctcctcttgatagcagagatgaccattggaagcttcaggcttattttagattaattcatcatctcagaaaaagaagtttctcttttccaatagttttcacaaatgttgtgtggtttattctcactagaaagatttgagttactttcagttcttgaaatataattagaaagtgatgatgtcaggcttggtcatatgcctgtctttgaactatgttcaacccatacaaaccacatgggaataaaagagggaaaactgtttgtccaaggatggcaaggattactagttgtcctccataaccattctttagttctttcttgataccaaaatctcaaagtgttagccaggcatacagccatccagaatcaagactgcattttgaagcatctcttgaagctagaaagtcaaatgataaaatgctgtcaaattgaatacgagttgaaataatacaggcaacttccaagaaatgtccttaaacagatatggcatgtctttacatatttactaatgaccagaatgtgaacattctggctgcagatgaataagtcattgtagactatgtggtgactttagaatggaggaaatgcatggtagagtaacaagatagagggagcctgggtcccaaacactttggagcttccatacaagccctaaagtaccttcatctggactttcatgtgattacaaaaataaacatataccttgcttaagtgggtgttaattgacaaactacacaacccagcataatcctacctgatacccccaaagcagaatcacgtttgctactgtaaacagataaaggtttaggagatgggcaggtatgtccaatgtctcacttcctaaaaaattctatccaagtcagtcattactctgattggaaatttgaagaggaaaatcttcctggttttgatatatgtgagtacccagggatatcacagtttatgaattcaaaggttaaaaattatttaaaaattaagccaagcacagaattatgagaaatcattatattcatgttttattttctaagggaaatagtactgatcacagcagatgactccacatttaaccttgtaattttaacaatggaatacaaaaatagcaggttcatgatgtgaataattgttcaaagtatatataagagctccttccaggccaggcattgtggctcatgtctgtaattctagcactttgggaagctgaggcaggaggatcacttgagctcaggagttcaagaccagcttgggcaacacagtaagacttcatctctacaaaaaattaaaaaactagctaggtgtggtggcacatgcctgtagtcctagctactcaggaggctgaggcaggaggatcccttgagcccaggaagtggaggctgcagcatgagctatgattgcactactgcatgccagcatggtcaacagagtgagacacttcccctcacccaaaagaagaagaagaactcctttaagtatatttgttttgacatttttattaacaattagaatgaggaattaattaaattgtgatcaactgtggaaattacatgatgccaagtgagtggttcatgctttgggtaatggaatcatagaatcatgcaacatctaaactttgagagacttttaaggtgaatcatagcgtcccattttacagctgaggaacctgaggcttaaagggggtccacttgcccaaagtacacctggaataaagggtaaagctgggatacaatctttctactttttctttttgaataaatgaaagctacctcgtggtttgacttcaaatagacatttaaaaaaaactagggcagcgaactgatgagacaagatgaaatgcaatcaagtcaaatctataaggacctacacattgggtccaaaaaggcccactgtacaagcacagtatggggtagctgtgccttaatcagcagcacttgtaagaaacatttagagatgttacttggctgcaagtttgagatgtcagcagtgtgatatagccacaagaaaaagataatggagtcttaggtggcattactagaaatagaacttacaaaagagaggtgagagtcctgttgaacttttcaatccatatctgaaattcctcgcgcagtcccaggtgtgagattttagaagagacatagacaaattagcttacatccaggagaggagcctaggatggaattatatgaataatggtcaaaggaagttaggaagctgcaaagtgctgtaactaagagcttgaatcttggagtcaagactgcccgggtttaatcccagctctgccagttactgtgtatatgtttgttaaatcttcttatcactgcctgtagattagaaattacaataatacctatctccaaagataaatgaggtagtgcatgtcaagtgattagcgcataactcccataaaacaagcactcaataaatgctagctactattagaattaagacagcaaagtgatgccagggtaatggtaacaacttcataggttgtgaatatttaatcagttaacccatgccaggtgcttgatacaaagttggcagctattattattatctgccgtagaattggtttaaggtttctagggatgggactagtttggggacaaaatattttctggtttgggctaagatccacagaacctaatgatcagtttacagcctgaggaaggaagtcagttataccctgatcagggtgggggtcatggtggtcatctagacattctatggctgggtggtggtggagggcactcaccttgtgaacactcggacatggtgaattggcattggcattgctgttgaaggacaactcagccgtgttcttagccatggccatttaggcctgttctgatgcagggttctgatccaaggtaccagtgtggtccctcagggaagtactggggatcgtcacttatgcctgttctggacatggtcaccgagaactgtcctgtaggcattcacttaggaatcattcgaagtggaattgctcctggatacgttctccttgtactctgtttcctcctcctagtgtctctgtgtgaagaagccctcctcactcagccctcggcgaccctctggtaccctggacagctccccggggagcagtctaccgctaggcggcggctgctaagagaggaaccctcctgacgcggagtctgccgctccggggctcgctctccggcaggcccggggagaggtggggtgacaatgggttggggtgcgcgcgtgcctcataggtgcgagacagagcgagccgccggggtgtgagtcagcgcgctgggggctaagaagctgggtgaatagtcacggaatctcactcacgctcggctcctccacccatcccgtctacagcgcgtgtcccagtccagggcgtgcgtgcgctcggtgtccgattccgggctgtgtgtgtccatttggcgagatgtcgagagcggggggagtgtccttgtcggtgtatctgggcccaggttaggggacttctcctccccacccccgcgtgggtgtgggggtgtgtccgggctagggcgcgtgtgcttctgtgcctgtgcgtgcgtgtgcgggtcagggtggtgggaccgcgcatcagggcagggtgcctgcgtctgcgtctgggtctgtctggtctgcatgtcggcgcgatctcgacctggattcgtgtccctggatgtcgagaggccagcgtggtgggggtgtccagcctcccggaggagtactatgccttgacaccttcgtttcaccgccccaaagctggcctggggctccgtagggagtggcctgcatggggagggcccgcgtgctgtgtttctgggaggggtaagagagtgggggcgcagggggcgggccaggtccctgggcgcggcgcgggctcgggggacccgcgcggctgacgtcaggccactccttaaatagagccggcagcgcgctccgctcggcatttcccgaagagccagatcgcggccggcgccagcgccaccgtccggtccacccgccagcccgcacagccgcgccgccgccgagcgtttcgtgagcggcgctccgaggatcaggaatggggcttcgggcgctgggcgcgctccgaacccggcgcacgtaagagcctgggagcgcccgagccgcccggctgcccggagccccatcgcctaggaccgggagatgctggaaatgcaaccgcctgttccccgaggagccgctgcccccgggaccccctggcactgtgcgcaccctggtcagcagcccccggagaagacggcgcccccaacgcccgacccgcgtggccgtggcagcgccacgcgagccctctaggcgaccgcagggccacagcagctcagccgccggtgccccctcggaaaccatgacccccggcgcgggcccatggagccatggcctatagggtcctgggccgcgcggggccacctcagccgcggagggcgcgcaggctgctcttcgccttcacgctctcgctctcctgcacttacctgtgttacagcttcctgtgctgctgcgacgacctgggtcggagccgcctcctcggcgcgcctcgctgcctccgcggccccagcgcgggcggccagaaacttctccagaagtcccgcccctgtgatccctccgggccgacgcccagcgagcccagcgctcccagcgcgcccgccgccgccgtgcccgcccctcgcctctccggttccaaccactccggctcacccaagctgggtaccaagcggttgccccaagccctcattgtgggcgtgaagaaggggggcacccgggccgtgctggagtttatccgagtacacccggacgtgcgggccttgggcacggaaccccacttctttgacaggaactacggccgcgggctggattggtacaggtaaggaccaggagctccgctccgtgcgccgggtctctgatcgcttccattgggagagccatccgtctcttgtgttttctctttcttttaacccaactcattgtatgggttcaggctgacacacagggccatggggggctatagcagaatttacccagaacttcccagtgataatctagacgggcagtttctggaactgcaaagggcgttccctcgtcactggagtcgttggaaaaggattatctccagtcaaacctaagtgccagctaaagggctaactccctctgtgaccagcccttagggtgcccaaggaagggacaggcgaggacctgtgctgcctgaacacggcaccatcctaaccctctgtaggtctttgctggtacccagcccctgaaggaccctgagaaagataaggcagttcagagaccccttgcagcaaggctctgtttgggaaaggtccccagagttcaggccaaatga

SEQ ID NO: 7041 - DNA, 6000 bp, Homo sapiens
caccttgcccgctgcctagacagagccaatttatcaagatagggaaattgccatagagaaagagtaattcacgcagagctggctgtgcagaagaccagtttattattactcaaatcagtctccccaagcattcaggggtcagagtttttaaggacgacttggtgggtgggagtaagccggtgagtcaggagtgctgattggtcagagatgaaattatatggagttgaagctgtctccttgcgctgagtcagttcctgagggagcccacaagatcacatgagccagtttatccatctaggtggtggtgctagctgatccatcaagtacagggtctgcagaatagctcaagtactggtcttaggttttacaatcatatatatatatatttttatatctatatattttatattatatatatatttattttattttatatatatatatatatatatatatatatatatatatatatatatattttttttttttttttttttttttttttttaagatggagtcttgctctgttgcccaggctggagtgcaatgatgtgatcttggctcactgcaattgctgcttcccaggtccaagtgattctcttgcctcagcctcctgagtagttgggactacaggtgtgtgccacaacgccccactaatgtctgtatttttttttttttttttttttttttttgagacggagtctcgctctgtcacccaggctggagtgcagtggcgggatctcggctcactgcaagctccgcctcccgggttcatgccattctcctgcctcagcctcccaagtagctgggactacaggcgcccgccactacgcccagctaattttttgtatttttagtagagacggggtttcaccgttttagccgggatggtctcgatctgctgacctcgtgatccgcccgcctcggcctcccaaagtgctgggattacaggcgtgagccaccgcgcccggcctaatgtctgtatttttaatagagacggggtttcactatatggccaggctggtctcaaactcctgacctcaggtaatgaacctgcctcggcctcccaaaatggtgggattacaagggtgagccactacatctggcctatatatacggtccaagatggctgccacagcagcagcgtcacatctggcacaacagtgcagccatcaaggcaagagagaagggaaaggtgagatgccagggtaaaatgtgacctgtttctacactccatctggacctggtgggggatggcagacaggtatagatgcagagaagtcttgccaaccaaacagggataaagattagaagccttggtcctgttaaccagacctggatttggaaaactaggaagtttgccagccaaagaattttttaggaagacagtatctccttagcccactaggtttttcagtggttttgagagacagtatattgtgtatgaggacatcaggacatactctaaaactctcatgtagtggaaatatgttgttttgtctgaatggcattcaggttttccctggaagccactagttttctttttctttccttttttttttctttttttaattaagacggactcttgctctgttgccaaggctggagtgcagtggtgcaatcttggctcactgcaatctccacctcccgtgttcaagcaattctcctgcctcagcctcctgagtagttgggactacaggcgcgtgccaccatgcccggctaatttcttgtatttttaggagagatggggttttactgtgttagccaggatggtctcgatctcctgaccttgtgattcacccgccttggcctcccaaagtgctgggattacaggcatgagccgctgcactggcctagttttggagttatggaatccaaccttgccttgagcaagggaagggtgtttttagaggaccaataggtagtttgcccaggcatcagagaggacataatatctgatctgagatctgaatgaggagtagaagttggccaagagggcaaacaaggactccaaacagagggactggcatggacaaggccgggtgagggtacatagcttatctgataaattgtttagggttcatgtggcaagagatgattcaggggctaggaactgaagtctctgtggctagctaagggagtctgggtttgtcttggaaccatgggacacactgaatgatttaattcagggaaaaactcaactagaaccatggtctctgggaaagcaacaatttctagtatgtggcagaaattgctcgatattcataaaatgcctttctttttcctcctgggcacagggctagactacaattcccaggctcgattgcagtcaggtgaagccacgtgactgagtttgagcccatcaaatataggtgagagggatatatggtatttctaggcctagcccataataatttcctgcacagccctccacattctctttttcccattttgctggagaagatctgaggacctagatggggcagctccaagatggaagtggcctggatccctgagtcaccatttggagacgagcctgtcatggactattatgtgagcaaagaatccattttttggggggtgggggggtgggatggagtgtcgctctgtggcccaggctggagtgctgtggtgtgatctcggctcgctgcaacctccgtcttccaggttcaagcgattctcctgcctcagcctcctgagtagctgggattacaggcgtgtgccaccatgcccagctaatttttgtatttttggtagagatggggtttcaccatgttggtcaggctggtcttgaactcctgaccttgtgatctgcccgcgttggcctcccaaagtgctgggattacaggtgcgagccagtgcatccagcttagtttttctttgttcaagggactaagcaagaacagatgaaggcatgggtgaaaacaagagagaattattctggaagcagtactggcaggatttgagcaaataatgagggggatggggaagccttgggtcagactatcttatgttgctatttataggatgtggaaggaagggtctaagaaacatcttgtatgatgtgctgtgggatatggaggaggtagagaacagggctaaaaataaccttcctagaggtgcagatatttggcagagaccctgtattcctgggcctctcgctgacatgggctgtcaacaaactgtcacgctcttctctagatatgtccacttctgtcctgaagcagatatttttatgtacacagccatgggtgagttcttaacttctttgtgcctcgtttttatcatctgaagatggtgataataagtgataggacttatctcaaaggggtttacgaatatataccgagtgtttagcatggtgttggagatgtagtgagtagttgagaaatgtcagaaatgagcattaaaattccgttagctctagcttgacttctctatcagtgcatacaaacactcaaagataaagctatgagacagagcaggattttgcctgtcttgttcactgctacatctccagccagcttagaacagtgactggcttgcagcagctatttaaatgtttggtgagtgaatgaatgaataaggaactcatctcattttctttccttcctccttcctttctcccttccttcctccctcccttcctttctttcttcccttctttccaaccatccatccatccatccatccattcatccatccacccacccatctatccatccatccatccatccatccatccatccacccacccacccacccaaccatctatctatccatccatccatccacccatccatccatgcatccacccatccatccacttatccatccatccatccatccatccatccatccatccatccatctctcttagaaaggcagtagagtgtagtgggttagctcacaagtattttttttcaattgtggcaagatacacataaaataaaatatgccattttaacctttttttttttgagatggagtctcatcctctcacccaggctggagtgtagtggtgtgatctcagctcactacaacctctgccccccaggttcaagcgattctcctgcctcagcttcccaagtagctgggattacaggcgtgcaccaccacacccagccaatttttgtatttttagtagagacagggtttcaccatgtggccagactggtgtcaaactcctaaaatcaagtgatcctcctgccttggtctcccaaagtgctgagattacaggtgtgagccaagcacacccagcatttggaaccatttttaagtgtacatttcagtgacattaagtacttcacattgttgtgccactgtatcatccatcccaaaactttcctcccaaacaggaaatctgtacccgctaaacacaaactcttcattctcccttcccctcgggccgtggaaaccaccattctacttctgtctctatgaatttgactagtctaggtacttcatacaagtggaatcagatacagtatttatccttttgtgacagcccacaagttctgtgatcatataagctgtgtaatcttgggaaactcaatcttcctgacactccacttcctcgtctgtgaaatggttgtaataatagtacctgcttcacagggtggcagtgaggtttaaatgagataatagaaggcacttagccccagtgcctggcacatagaaagtgctcactattagctattagttacagctaagcatgtattgtaaattagtggacactggtattgtgtgtctagcactgtcctgagcactttacccgtattatctcatttaaacttcccaacgaccctatgacatggtgaaaccactaacatccacacctaacagatgagaaaacaaaggcccagagaggccaagtcatgtgcccaagggttacatagctagtttacagcagagctgggattgaacgccaggcagcctatttccaaagttcatgggtcttgccgctgcattgcattacctcttgccagtctctgctgcctctgtctgtgaaggatcgtcatctatacactcagtcctggctcaggctgtcacggtgactgcaggtgtttgaagctgtgggactcattggaaaaataattgaaaatgggattgctgtttctttcttttcttttttctttctttctttcttttttttttttttttttttagacagggtctcactctgaggctgaagtgcagtggcgcgatcttggctcactgcaacctctgggtcctgggttcaagtgattctcatgcctcatcctcctgagtagctgggattacaggcaaacaccaacacgccctctctttctttctccttccttccttcttttctttctttttcttttttctttctttctttctttctttctttctttctttctttctttctttctttccttccttcttttctttctttctttttctttctttttctttctttctttctttctttctttctttctttctttctttctttctttctttttctttctttctttctttctttctttctttctttctttctttctttctttctttcttttctttcctttctttctttctctgtctttctttcttctttctctttccttttttttttttttcagagccttgctctgttgcccaggctggagtgcagttgcacaatcttggctctgcgcaatcttcgtctcccaggttcaaatgattttcctgccttagccccccaagtagctgggattacaggcgtgcaccaccacgcccggctgagttttgtatttttagtagagacggggtttcaccgtgttagccaggatggtctcaatctcctgacctcgtgatccacctgcctcggcctcccaaagtgctgggattacaggcgtgagccactgcacctggctgtttgctgtttcttaacatgtgaggttccaacccagtggggcccactaacatgtgctgttctgctttggaccgtggggagctggggtgctggacccatctcccaccttctacagcctgg

SEQ ID NO: 7042 - DNA, 6000 bp, Homo sapiens
attagggaaatgcaaatcaaaaccacaatgagataccacttcacatccgctaggatggctataataaaaaccaacagaaaatacatattgtctgctgggtgcggtggctcacgcctgtaatcccagcactttgggaggccgaggcgggcgcatcacgaggtcaggagatcgagaccatcctggctaacacggtgaaaccccgtctctacaaaagaaaatacaaaaaattagccaggcgtggtggcaggcacctgtagtcccagctactcgggaagctgaggcaggagaatggcgtgaacccgggaggcggagcttgcagtgagccgagatcgcgccactgcactccagcctgggcgacagaccgagactccatctcaaaaaaaaaaaaaaaaagaaaaaaaaaaaaaagaaaatacatattgtcaaggacgtagagaaatgggaaccttcagacattgctggtgggaatataatacagggcagctgctgtgaaaaacagtttgtcagtttcttaataagttaaacttatttaaaagttaataagttaaactacctttaactcaacaagtctccttctgggtatatatccaaaagatttgaaaatgcatgtctacacaaagactcgcatgcaagtgttcatagcatgcttgtttgtagtaaaggaaaaagtggacatactccaaatgtccatcatctcatgaaaggataaatgaatgtggcatatctatgcaatgtaatattcttcagcaataaaaatcaatttttattttttatttttttgagatggagtttcgctctgtctcccaggctggagggcagtggcactagctctgctcactgcaacctccacttcccgtgttcaagcaattctcctgcctcagcctcctgagtagctagggctacaggtgcacgtcaccatacctaactaatttttgtatttttagtagaacagggtttcaccatgttggccaggctggtctcaatctcccggcgtgtgcaaccacaccaggctaattattgtattttttagtagaggcggggttttaccatgttgtccaagctggtctcgaactcctgatctcaagtgatccgcccaccttggcctcccaaagtgttgagattacaggcatgagccaccgcgcctggcctaaaaatggatttttagatatgtggtgccaacacacgctacaacgtggttgaaccccaaacacgcgatgctgaaagaaactaaacacaaaagacaacatattgatatgagatgcctaggaaaaaaaaaaagcaaaatcagtagaggcataaagtagacgagtggccctgggaatgggaatggagattgactataagcaggcacaaggaacctttcaggagtgatgggattgttttaaaattggatcgtggttataattgcacaattcgataaattcactaaaaatcattgaactgtacatttacagtggcttgattttatgttatgtaaaacatagctaaataaagctcttaaaataaaaataaaaaagaggaaatgggttgagggagggggtgtgtcaattattttttcccaggaggccccttggctgaaatgcaaatgtgaccacttcctccccgctgaccagctatcagcactgaggcatggttggagggccgctgagatcctatggcaccttccttccaagggtatagaggccatacttatgagacatttacagacccagaggaacccctcaagggaccacatgtctatttctgaggggactcatgtttaccccagtggacatgggcctggcagctccaaatgcatctactttttaagcaccaagggactgtgacccctgctgatcccacccattccccaactcctggcctgaactgaaaatgtaaactggattaagccactcttaagatgaaaccctccaatgatgacttcccatttcctttggaacaatctaccttcctcacccaaaaccgtgaggtcccatgtggtgtagatgtgtgatttccgtgccttcaccttctactattcctccatttgctcactgtattacgccatgctgttctcaagttcctggagccagccacattctttcctacctcagtgcctttgcacttgcagatccttctgccgataatgttcttcccatggctgggcacttcttagcacctagtgtacccccaaatgtcacaaccttgatctctcattggttttctatgacatttagtacagtttacattgagtttgtctgttacttctttttgtctaactctccctactagaatataggctccatgggggctgtcactgtgtgtatatttctgtgggctagccccaggatgtagccaagctgcgtgattttggacaagtcacttaacctctctgagcctgctcaataaatattagggggaggaagcaaggaatggctgggtgggtgggtgcagagaagaatgaatgggtggataggtaggtgggtgggtagaaagcaggtagataaagaaggcaggcaggagggagggaggagaaattgaatatccttgttttcatacacaccccagagcagtgtagtgagttaagagtgcgggctctggagcccaaatgactgagttcaaatcccaactctggcactcatcagctgtgtgaccttggacaagtcacttaacctctctgagcctcagtttcctcatctgtaaaacagggacgatgatgatgatgatgataactatcttctagactcattctttttcattttggggattttatttttgaagacagagtcttgctctgttgcccaggcttgagtgcagcactacagtcatagctcactgcagccttcagctccttggctcaagtggtcctcccacctcagcctccagagtagctgggactacaggcgtgcaccaccatgactgtctaatttttaaatttttttatagagacagggtcttgctatgttgcccagactggtcttgaactcctagcctcaatcgatcctcccacctcagcctcccaaaatgatggaattataggtgtgcaccgctgcacacagccttctcgagtatttctgaggtttaaatgagagggtgcatctttaaagtccttaaaaccctggcacacaatgagctttcagcaaatattagctctttttactgtctcttctcctgatctttcaaccactacaaatttcagtgcatgttatcagagaattcaccccgaagatcaagagaaagaaaaacaaaagctggtgtcttcccaaggttcgttctccagagaacacgacacacttcggtagctgggaagagctctacagggccaggatccctcaaatcaaccacaggggaatttgtaccaagttcctcaaaaacagctagaaaaaaaaagaaagaaagaatagcaagacgctttctcttttttctctggagtggtcacgaaagtcaacagcaagttgattcccaaaaatgagtcagcagggagagctacaaattgcatcttgttatcaaaacagcataaaatagcctcccccaactgtgggacatttcatcctggtatggccccgttttcacagcctggtataagcttaggaatcaaacacacccaggttcaaatcccagctctaattcttcttggcttgtgtgacgtttcactcctctgggcctcagtctctccatctgtaaaatgggactaatcttgtctgcctcacactttgtgggataaagtgagatcatgtaggcaccaaagtaattcgaggtggtggtgatggcagtggtagtggtggtggtggtagcggtggtggtggtagcaattctcttgctctcctttggagactgcactaggcattaagcttgttacattttgtctcctggtttcttgaatgtcttccagaaacatctgaccctctcatgggcctctggcatgttagcaagatgaaaactctcttgagaatttcttttctctattttcttcttgaattctcatgtgttaatgtctgccctcttcctcatagctaggtgcccccatttgacagatgggcaaagtgaggcattcagagaggtgatgtgacgtgcccaaggggtcctgctccctggagctctgcagcaggagactggatccaaaggaaatggaggcagagaggcatgggggtcaagccagagcagagggtcccaagctcagaccctattaggcaggtaaggctcaggaataagaaacaggctggtttgcaaagtctgaaaaaggggcttccgtgggaccttgggcaaggttctggtccttctctctgtgctgaggggctggagtcggccactgaggactctgggtccacgggtgaaactgtgccacatcttcacacctctggcctcagtttccatatctgtgcaatgtggtggctccaggaggcactgcctgcctcatgggttatgactgagaggcctgtggggatgatgtcacaggtccctaagagggaagtgtcaccccgatggccccaaatgtcttacttgcaggtgacctttggtgacagtgggtgcctgctgtggggccaggccccctcccacctctttctcactccctcccaggaggagcccagctgcgggtgggcggggctggcggggagcggctcaccacatcctcctcttcctccccactctgcacatgcggctgggtggcagccagcggcctcagacagacccactggcgtctctctgctgagtgaccgtaagctcggcgtctggccctctgcctgcctctccctgagtgtggctgacagccacgcagctgtgtctgtctgtctgcggcccgtgcatccctgctgcggccgcctggtaccttccttgccgtctctttcctctgtctgctgctctgtgggacacctgcctggaggcccagctgcccgtcatcagagtgacaggtcttatgacagcctgattggtgactcgggctgggtgtggattctcaccccaggcctctgcctgctttctcagaccctcatctgtcacccccacgctgaacccagctgccacccccagaagcccatcagactgcccccagcacacggaatggatttctgagaaagaagccgaaacagaaggtaattccagccctggttttctgctgggaccagggtgccttctctgcccaggagggactgttccctgcctgctgcatctagtgtcacagtgggagggctcggaggactgtgcccaagtcacaattggggacactgaggcaaagaagattcatgcagtgaggctgggcagaaatgaggttggggtctcttgttcagcacagcttaggggcccagcagcagggatgtggctgagacgaccctctatcttgaaaaccagcctccaaaatgtagcgggctggggaaggaaagccagtttcaagccaaacataacatgtcaatcacccgattctgggcggctgagtcgggaggtgacgggcatgggtgtagagcctgatgggacccattctgtgtcagtttctatgtcttaccaccttgattccacccagtcattcaaaacaatggctggtgtgcccatttcgcagatgaggcaatgaggctgcgagaggtagagtgattttccctcggtgactcaactgggacgtagcaggtcgggcagtcaagccaggtgaccccatgagctgtcgctgcatctttctcatgaagcacggggaacgggtcggatggtaagaggccaacccagttccctgtgcatgtggaggagaggagggtggggaggtcagtggaggctgagccttgaaggatgggaaaggaagaacattcctggtggaggagccctggggagcgggaacttaggacttgccgcaggaatgacgtctctgctcagtgaaggcagaagaccaggtgcgggacattcaaagccaggaggctgctgcgaggaggacatctgtgattccctggggggagagtggggctttcagaagcacatggtggagtcggggaaaacctgccaggtcaaaacccggccacgcgccttcctcactcggtgaacttg

SEQ ID NO: 7043 - DNA, 6000 bp, Homo sapiens
atcccagcactttgggaggccaaggtgggcagatcacttgaggtcaggagttcaagaccagcctggctaatgtggtgaaaccccgtatctactaaaaatacaaaaattaggccgggcgcagtggctcacgcctgtaatcccagcactttgggaggccaaggagggtggatcacctgaggtcaggagttcaagaccagcctgactaacatggagaaaccccctctctactaaaaatacaaaattagccaggcgtggtggcacacgcctgtaatcccagctactcgggaggctgaggcaggagaatcacttgaacccaggaggcggaggttgcagtgagctgggatctcaccactgcactgcagcctgggtgacaagagggagggagactctgtctcaaaaaacaaaaaacaaaacaaaacaaaaaaacaccctggccggacatggtggctcacatctgtgatcccaacactttgggaggcagaggcaggtggatagcttgaggccagcagttcaagaccagcatgggcaacacagcaaaaccccatctttaccaaaagaaaaaaaaaccaagaaacaaaaaattagctgggcgtggtggtgcacacctatagttccagccacaactacttgggagactgaggtgggaggatctcttgagcctgggaggtggaggctgcattgagccaagaccccactgctgcactccagcctgggtgacaagagcgagaccctgtctcaacaaccacaaaaaagaatacatccttccatatctccagtagagtcataacacattcaggaaatttatcatggatgcaatactttgtagtctatattccaaatttatcaattttccccatactgtctgttttgtttttattttgagatagggtctcgctctgtcgctcaggctggagtgcagtggcgagatcacggctcactgcagccaggacctcctgagctcaagcaatcctcattttcccccatccccccatcacaggtaatcaatttgatgagtttctggtttatactttgtttttcttggcaaaaacctgcagatacatttatgtcttcatatttccccttcttccttatacaaaaggtagcacagtatacaaaaggtagcacagtcttttgaagtttgctttctttttcttttctttttttttttttttttttttttatgagatggagtctggctctgtcatccaggctggagtgcagtggcatgatcttggctcactgcaacctccacctcccgggttcaagcgattcttctgcctcaggctcccgagtagctgggactacaggcgtgagccaccacacccagctaatttttgtattattagtagagacggggtttcaccatattggccaggctggtctcgaactcctgacctcacgatccaaccacctcggcctcccaaagtgctgggattacaggcgtgagccactgagcctggccatagtgatataatttttaaattgcacacgataagacaacattcccattgttggggcaggagtgctgccccaaccccaccaccaggaatgttaggcaaccatcaggtgatggtcaggtggttgttaaacttgtctctaaaatagtaattggttgcagccagcaccagggaaaggcagtctccaaatagatggaaaacacttgaaactgatgatcagcagcttctcgataagatctcagaagttgggtaaatgggctcaagcttatgcaccaagaggcaaaatggcggagtttaatggtacatgcccttcctccaggaatgctagatctgtaagggaagaacgtcttaagtgagcatgtgcacttcagtatactgaacacactgtgcttgtggcccctccaagtgctggcaggccaccgtgcatgtggacagcccatgccaaggtaggaatcaggggagaagagatgcaaaccgtaaatccctggaagcatgccagcatatgaaaccccaagtcaaaggtcaaaccagggacttgaatctgtcaagtcattcacgcctggccctcttccaagtgtactttacttcctttcattcctgctctaaaactttttaataaacgttcactcctgctctaaaacttgcctctgtctctccctctgccttatgccccttggtggaattctttcttctgaggaggcaagaattgaggttgctgtagaccccatgcaaattagctgccactagcaagggcaaggcaagctatggagaaagaagtttcatggggctaaaactcagaatttgagtgtggagcaggatggggtagatggaagggggttagagtgctcagtgctcacaatctgtcaatgagggtagagaggtggcatggcatcaggtggtccaggtaatgccaggaaaaagctggactgtgtttgttagggaacccaggagacatgatgacctttaaaacaccatttgggctgggcgtggtggctcatgcctgtaatcccagcactttcggaggtcgaggcgggtggatcacctgaggtcgggagttcaagatcagcctgaccaacatggagaaaccccgtctccactaaaaatacaaaattagccgggtgtggtggtgcatgactgtaatcccaggtactcaagaggctgaggcaggagaaacgcttgaacccgggaggcggaggttgtggtgagccgagatcgcgccattgcactccagcctgggcaataagaacaaaactccatctcaaaaacaaacaaaaaaacatcatttggatccactcaccttacagatatttcattgagtgcctgcagtgtgctagagtactgcagagcaagaaataagtcaagatcctaacccttagggagctgacattagcaggaagacagaattaaaggagctgttagaatacagtgggataaattgctcggcgagcacacaggaggggaaactagcacatctgaaggcaggagcgaggcagggcgaaggactattacccaaaaagtaaggcagtgttgtagctaggtgtgcatgtgtttggtgcaggggctgggaagagttccaatgctaacatttagagcgaagagattgagacattgagagtttcgctgggattaagaccacatggacttaacagctccactccattctccacgttgcaaagagtaaacctttaaaaatgcaaatctgacctcttttcacttgtttttttgtttgttttggggggaaggagtcttgctctgtcacccaggctggagtgcagtggtgcgatctgggctcacggcaacctccgcctccttggttcaagtgattctcctgcctcagcctcctgagtagctgggattacaggcatgcaccaccacgcctagctaatttttgcatttttagtagagacagggtttcaccatgttggccaggctgatctcaaactcctgacctcaaacctcccaaagtactgggattacagaccatgcccagcctcttttcactttcttaaataagctccccactgctttgaggataatgtccgtgtctcttacaagacttgggagcctttaaaacctgatcccagattagctacctcttcccccctttaattttatgcttaggacaagctgagtttttcttagtttgtcatatcctatttccctgcctagaaacccatctccccctgccctcttatcagtttttttttataatttaaatttttttttttttgtagagacaaagtctcactttgttgcctaggctggtctcaaactcctggccttaaacgatccttctgcctcggactcccaaaatgttaggattacaggtatgagccactgcgcccggccctcctgtcccttatctgggtctcccaaaactggattaagattaggtgtcactcccatttgctcttgtagtcctctgtgcttcacctactagatctcgtcaaattctctgaattcaccactagcatgaactcctccagagcaggaagcagtttaattatccttgtgtccaaaacaactaactgaatactccaatgcccaactcattttgaatgaatgaagctgccttcattgcagggtcgggtggaggattttgaactcggaactttggccttcagtctttgttattacagtttaaagattcattctcgggcatggaggaacaatttaggtcaaaatcacaaaaatctgaaataatttaggacgaggcgtaaatttatctgcaaagatcaacacgctcaaacgaatcactaatgctcatcagtcttttacttaaagcaaacaaggtggagggtagctccttgcgaaacctaccacctgcctaaaagcgcagtggctcgggtggtccagtcccggagactttcttggcacttaaggctctgcccacgggccgccaagtggcggaagagcctcacgcacgacgtgccgcctcacactcccgcggaggcatcgcgacgcagcgacggcgtgggcggagaggccggcccttcctctggcgccttcggctcctccccctgcgcctcacacgctcattgtgaagcgacagcggccgccggcttctaaggcggtttgagaccttaagaccctaaatccttggcgcgcgtgagcgcccgcgccgctccttacccactcccagggctaggggtgcgaggttcaccgacttgattctctcccactttcccgccgggagctaaccgcgccggtgtgcgcggcacctcgcgccactgctcgctcctggccccccccccccccccccccccccgggagctcccacccgcgcgctcctccctctccgctccccggcgacgcgcacgcgcgccagcccggctcgcgccctctcgctttcctccagccgcgagaccccctccccttccgcctcgcggcgcttcctcgcgccgcggtcttctctctccacccccgacaccgcggggctccccccgcccgcccacggcgggccccggctgcccgatccccctcgcttcccgcgctctccagcggggccccagccccggccccctctctccctcccttctctctaattccccttccggacgctgccatcatgttgaagcctcagccgctacaacagccctcccagccccagcagccgccccccacgcaacaggccgtggcccgtcggccccccgggggcaccagccctcccaacggcggcctcccggggccgctggccacctctgcggctcctcccgggcctccagcggccgcctccccctgcctggggcctgtggccgctgccgggagcgggctccgccggggagccgaaggcatcttggcgccgcagccgccgccgccgcagcaacaccaggagaggccgggggcagccgccatcggcagcgccaggtgagaagggtgggctccgggcgagggagccgcggccacccagaggctgtggctcggttccggtggggcggaccccgacccggcaccgtcaggggcaccggctgggtggggagtccccgtgaagctgggggagggccccctcaggtccgaacaggtcggacggaaagggtccccgggcggccaccggagcactgaggggccgcgctcggctctcggggcctagtcagggctcgcagccccggccttcaggggaggcggggcgcatcccgccggcgccgtcggaacggggagttgggggggggcaaggagctgatcggggtccccggttccattaccacgaagggtctcgcggtccccggcttcagccaatggggagtctgctgcgggaaggggtccccggccgtagccaatggaggggggcgcgcggcccacagtttggccaatggggagggagggacttgggagcgggttgctgcctcccccttcccggtctggccagtaggaggggagcgaggtgggcggggggacggaaggagggatgactgggaggactgcgggccgggagcctctggcgcgcgcgcccccttcccgtacgtgcgcgtggatgctcggtctcatgacccgggcattcgcgcgccccgggaacacctagggcagggactagttcgtggagggg

SEQ ID NO: 7044 - DNA, 6000 bp, Homo sapiens
ctgggcaacagagcgagactctgtctaaaaaaaaaaaaaaaaaaaaaaaaatcactggcttctcttaaaaatcagaagatccagtgatgtgggtccacttccacatctgccccatccccaccagctcactttgctccctgggagggcctggccctgtgggcatttgagtttataacaccacccccattgtggcacacccctccaccccgtaaaacacaggctctgctcttggaatcagtcttcctgatctgtggctgtgccctccaacagagggcacccctgggcttcccagctctgggggtagtgggtgccaacaaggaggggcctggggctgaagaatcccacccgctgagctcggccttctcccttccccactgtccagctccgcctttcagcatcctgcctcactccccgcccaggcagcaaggagcccacaccctcatgcccctcagcttcagcccccacctccaggaggccctacccacgctcatgaccttgctattctgggccttgtgtcctgtagggagatggacaggagacagctgggcttccaggccacccaggcggggggctagccgagggaagcctgctggctctcctgcttgctctaatttctggggctccccaaaccttggcctcaggagactggggataggaccggccttgaaagtgggggaagctttggagagccgggtgctgggttcttagtgagatggccagtgaaggctgtggtgccccgaggtaagcagggcctgatcccctcctaatcttccagcagcaactggtgctctgaggctccccctcccccagccctgccagccttcagggacctgccttccaaagatgggcaggggagggggacgaggacacccacccactcctcagaccagcatgtcttggctgttggggcctgagagactttccctctaagcctttctttacagatggttaaaccgaagttctgcactcatcagggactggccagggtgtctctgtgtcccatgcttttagctccagccctcaggtgtgacaggaggatcactttccatccctgggcgtggagacccctgtgggaagggatccccgagggcgcctctggctcagcctccctccatggcagttcacacccacagccttccctagagcagcccttctgcagctcctggcgggtggctttccctccctggcttgtttccccctctgggaagccgggggaggtagaaatgaataaccttaaaggcctgttggcaggaatgtgctgccaagcctgccccctgccctctgtctcaggctctcgactccctcgaagctgcccatctctccgtctgcccctctccatgtttgggcattcccactgctgtaagacagtagcccctgtcactcctccaggtgccggtggggagacgccggccagcgccaaaagccttggcgggtgtgagcctgagtccagcggagacggtgggtgctgggccgggtggaggtgccgggggctgtgtctcttggaagagaggctgctaatgctctcctgcacccccaattcagcccactgtcccccactcccctcaggtcacagcaggattctgcttcaggggaggggtttgttggaactgtgaaaaggaggcaggaaggagcaccttgtcctcaactcacccaggaggccgcgcctcacccaagtccaggcagaagggatgcatctgggaggctgaaccctcaagttccatccacccctgctgccatccccctccccaaaagtgggggcctcccttttctttgctctgctgtctcctattctgtcctctgcttcggagtttgagccccagaatggaaagcagccttaagaagccacacttaggaagtccacatgcctctgctcatttcaggaaacaggcctagacagaggacggacttgagcccagggcaccaggccccttcccctcactgacctttcaccctgactctcatccagcctttctgcctgcctgtcctccccttcctgcacccctggtaccctccctcggctcctccagcagctgccctggtggtaaccaagagacgcccccatcctggagcaggggtggggaggggcagctcagagcagctgcttctctgaggaagctgacaccaaggccagcattcagcaacaacttgtggctttgcacccagcgccggggtccccgcccacctggctccctgctgtccctcttccccactgctgctcggacttccctctgaccctggtggctctgtgtctctgctccctttccccctaggtctagacatctgtccttatttcccccagacctgtccccagaagtccacccttccccattcctttggtctggagcccctgcttggtccagcttccccaggccccgacacctttctgtggggtctgcctagctcctgcacgcacacagcatgggcctgatcctgttcccctcgtggacagatgcagcagggcagagtgcagcgcagaccacaggcctctggggctggccacagaaaccccgttggttagagcacagtgtgggatgaggtgaccctcagtgcacgacttggggtgacccctgcccccatcctgagacagttacccctccccctctgccatcagcacattctgtagcctcttgggttacttggctgccttggtgtcccattttcttgggggtggggtggggattccctatccaggatgggggggccctcagggctctgttcccagaggctgagttagagcgatggggaagggggggggcagttttggggagagacaggcagtgctggctttgctcaccagggcctggacactaaatcccttgttgatggctgtggcaacccctccctagggtagggttaccatcttcggccctgtccccttgactctctcccctcacttccccttgtccctctaggagccactcacttcctctagcccccaaaagatgttctcccttcatcagtcccccaaaggcttggggtatctctgccactgcttcagcaaatggggtgaggaggaaggagactgcggcaatggaaacaggctccgggcagatgaggcaggaaggggggtgtgaggaaagggacaggtgaggccggggatggaagagggctccgggaagaactggggggatgagtttggaatgggaaattcaatgcagctggggaagtcgaggcaatgggggggcagggtcagtagcagatgacagaaagtgaagtctctccctaccccacttccctggggctggggctacctttgcgtccctcatgagtgacatctcaggctgcagccccactgttccccctctgtcagcagaaatatctctcttttctgaccacctcctgctggagtctcagccagccaatccctgatctggtggaggggggagcccggcctccccctgctccctcataaggaccagctgggggccggggggtggccggctgctcaagtgggacgggggtcagagctttgtggagggaagaaaaacctggagggggcaggagagtaaaaagaagaaacccaggcagacaggcagttggacacactgaggaagaccccccacgagtgggaaccccctggaaggaacacaccggccccggcccccaggaagggagcacaatggaggccgctcatgctaaaaccacggaggaatgtttggcctattttggggtgagtgagaccacgggcctcaccccggaccaagttaagcggaatctggagaaatacggcctcaatggtaagtgtcccttggaagagcggctggtaattaatgccctcctgcacccccaaaacacacgcacacgcatgcacgcgtttctcccttcagggtttcttaaggaagagctgggccgttgtccaatgctcgcagggggaagaagatactgagaaaacagagtcccgagatccagagttttgggaggttttaatgggatgaacttgatgaacctcaaggtggcctgattctcttagccacaaagtcttgggtgtggggggcatgaggctgaaccccaaatgaatctgtccttttcttctttttcctgggtagagctccctgctgaggaaggtaagttactggaatccctgaactctcataaatgaccaccccccaccccgccctgtcccactccctcctccctgcctctttagattctttgagcaaatatcccttcccaaaaggcaaatctccctccctaaaggttagagtcctgtccggggcagaagtctcccaggcgctttctccttgaagcagccaacccttgaactgccccccactttgccgagtctgtttctggactccaggcgagcttcttagcccttctctgggcaccaagctgtctgcccaccaccctagagcctccccactgcaggccggagtccagggcgctccatcccagaccttcacccactagaccttaacccggggccctccccttgcctcctcccccagggaagaccctgtgggagctggtgatagagcagtttgaagacctcctggtgcggattctcctcctggccgcatgcatttccttcgtaagtgtgggagggtctctgggggctggctgggggtgtgaggctgggatcgggcgaatgcggggctcgcagtcactggatcctcccgtccgagtcccgagcatcccattgtacagacggggcgggctggcgcgcagcagcgggtgtgattcgcgtcctcctctctcctcccctgcaccccagaggcaggttttattttaagctttaagggtgttctcagccaaaacaccgaagctaagccaccctcgcggcttcaagagcttggagagctcgggttacccacccgaactccgggctccgggtcccgccgcgatgccggctgcggcgcggggggccactgccactcccggcatgcgccgggcggacggccgctccaccaatccccgcgcccgtcggcgcccctgccccgccctccccagcctcctgacgctgattggtcgaggggaggactcgctcctagtggcgggaaagcgcggcggtgtgatgatgactccaaggagcccggcgcccggtcagggagggcactggcatccctcattacccgcccagcctggccttagcccttccccgcgctccctaggcacccccacccccgcagggcatctccagggctctgcctcctctcccgccctgggggctactccccatcccgcggtccatctgcatgtcgcgggttcttccgcagcatgtgagcctcgctggggactctggaggcaacgaaagcctccctgtgccttggtctccgaacgcaggccccgtcgcgttaagcacaagctggcagggcctctcctctcccttctcagatttgctccttgacatttgcctgctgcctggcggtggcaacagctggggcggggcgcgcgcaggaggccccgtaaccctatccccgctccggctccctcgtgaaaccggagcttccctgccttggccgagggggagggctgcgggggccagaccgcctgcgaagaccacagggtttttcctctcgggttttggctcccgtgggatggatgtggctgtgcggggggttggcctgagcttcgcttctaagccagcagcttggtcagggaaacctgaaagcattcccagctaatcccccaagtggtgcaagtctgtgcgcgcccatcccgctgagtaaggcggtggcaggacctgcagtggatggacagaccctcagacggatgtggggccacagcgccccgacggtgcccggccctcctgctggctcctgcactctcctgcacagttctcccctttgcagtggtccacttcctttctccatctgttttggggcctcattacctgtcattctcctttcccctgctccccaggtgctggcctggtttgaggaaggtgaagagaccatcactgcctttgttgaaccctttgtcatcctcttgatcctcattgccaatgccatcgtgggggtttggcaggttagcgttgacccttccttaccccttcatgtc

SEQ ID NO: 7045 - DNA, 6000 bp, Homo sapiens
cagcctggccaacatggtgaaaccctgtctctactaaaaatacaaaaattagctgggcgtggtggtgcatgcctgtaatcccagctactcggggggctgaggtaggagaatcacttgaacccaggaggcggaggttgcagcaagctgagattgtgccactgcactctagcctgggcgacagtgcgagactccttctcaaaaaaaaaaaaaaaaaattttgccaggcatgatggctcacgcctataatcccagcactttgggaggctgaggtgggcggatcacctgaggtcaggagttctaggccagcttgaccaacatggtgaaaccctgtctctactaaaaatacataattagccaggcatggtgacgcatgcctgtaatctcagctactcgggaggctgaggcaggagaatcgcttgaacccgggaggcagaggttgcagtgagcagagatcgtgccattgcacacacaaaattttttttttttgtagagatggggtctttgtatgttgcccaggttggttttgaactcctggcctcaagcaatcctcttgccttggcctcctaaagtgctgggcttacgggtgtgagccatgcgcctggctccaaataccccttttttggggcagctctcattctgctgagcctgcaggagactggctgccctcacctggaagccatgtgctagacagaattcttgcgtgcaggtgacagaagcccattgtaaaactgtaagccccctagaggccgggtgcggtggctcacacctgtaattccagcactttgggaggccaaggtgggtggatcacaaggtcaggagattgagaccaccctggctaacacagtgaaatcccgtctctactaaaaatacaaaaaaaaattagctgggcgtggtggcaggtgcctgtagtcccagctactcaggaggccgaggcaggagaatggcgtgaacccagtaggcggaggttgcagtgagccgagatcgcaccactgcactccagcctgggtgacagagtgagactctgtctcgaaaacaaacaaacaaacaaacaaacaaaccgtaagccccctaaaggggctgtcttggctttcttcctgaaagtcccaggtgagcttcagtcaggtaaagctggatccagggctcccacactgcccttctcttctgagctttactttcctttgtgttaacatcattcttaaggacgtgagaactccagatgattacctttccatttagcaacattggcaccttggaccctggggccgtgtttccaggatagcgtctgactagatgaacatgcatcacgtgccctctgcggaatccgtcaccgaggctggggtggttaacagtcctcttgttggccaagcctgggatcctatttaaaccaagtggattgagagaagtaggggtactggtttcccaaaagaaaattaccaaagaggagacaaagctaggcttgcaaaaatagggtggcccctagtggcagcccccttcccccagattgcaggttcggcttcttggagcaggcacttaactgggtattttaggtctcaggctggagttatctgtaccccacactctcctccagcccagggcttgagtgtgtctctccctgtgcctatcctgaagccctctgtctcccaggtgacaccgggtctaggagtggtggccgttctgctgctgttcctggtagtgcgggagccgccaaggggagccgtggagcgccactcagatttgccacccctgaaccccacctcgtggtgggcagatctgagggctctggcaagaaagtgagtttattcccaccctagaccaccatctgaggccccctggcgtctggtttgaggtttaagtggggatgttcctgttcctggccacaccccaaggccagtaattcggtcgatactgtccccttgtggcagctgcttgaattacaggcccagatcctgggagccagaaccacctctgcacggtgttgtgaccttactaaaataagccaggaagggagaagagaggtcccctcctgcctcgacacctccgtggggtcttactctctccctcccaactatctgcagtcctagtttcgtcctgtcttccctgggcttcactgctgtggcctttgtcacgggctccctggctctgtgggctccggcattcctgctgcgttcccgcgtggtccttggggagaccccaccctgccttcccggagactcctgctcttcctctgacaggtgcccagatggggctatgctggggggcctgcgggtggcagggctggagtgaagagcatctgtggctcagacccaggcagggagtttgactcctgacttcacaagctgcctgctctcctggaatctccgtttcctggtctgggaaataagtgatgggatgatgtctgccactcagggctgtgccaaccatggggtgctgtgtctgtagggaccttggttgtgagggtggctaggatggacagcgtaggggccttggcaggcacagggacaaaccccccattcccttccctcacccctagtctcatctttggactcatcacctgcctgaccggagtcctgggtgtgggcctgggtgtggagatcagccgccggctccgccactccaacccccgggctgatcccctggtctgtgccactggcctcctgggctctgcacccttcctcttcctgtcccttgcctgcgcccgtggtagcatcgtggccacttatgtgagtagccagcaggtgtcaagggggatggcgtgggtccagggtggaggagcagtcagcgtaatggccactcgaggtggaatgcctggttttgaatcacagctctggctcttcccagctgtgtgacattggacaagtgacttaacctctctgtgctcagtttcatcatgtgtaaaatggggatattagtagcacctgtctcactggggtgtgatgaggattaaattagttaatagatgagctgggaacatggtcaactttccatgtgttagcccttactgtcatgaacccccgaccctctcttcccccagattttcatcttcattggagagaccctcctgtccatgaactgggccatcgtggccgacattctgctggtgagttgctgggcagctccagggtcagcgcagaggctgatgagagcagagttggggtcaggagtgttgcctctacccctcaaagcccagcctcaacctaccttctgcaataaataacatctgtagcagacccccggcctgccctgcgacctcaaccccaggcacacctctgaccccggcctaggcggatccttggtggtctcctggccccctgcctcctgccccctggagcccagagcatccactgagctccaccaactcctccacagtacgtggtgatccctacccgacgctccaccgccgaggccttccagatcgtgctgtcccacctgctgggtgatgctgggagcccctacctcattggcctggtgagcattatttcttggctggcatggggtggctggtgtcctgagcctgggctggatcagaaggcctggccctagtgaagtgtctgtgtcctgcgtgctgggcacttctcaccttccattgtcaactggaggagaaagattttgtctttgaatatttctaccagtaaggccagggacctcaccctggtggtccaaactcctcctttcttttctcttttcttttcttcctgagacaagacctcactctgttgcccaggctgcagtgtagtggcacgatcatggctcactgcagcctcgacctcctgggctcaagcgatcctcccacctcagcctcctgagtagctgggatgataggcatgagccactgcatctagctcaaacctccttccctttcctgggctccacttgtctttctccctggagctcaggggcgtgccctccctggttcatccatgaggctgactcccctggctttcctgtctcctctccctgcagatctctgaccgcctgcgccggaactggcccccctccttcttgtccgagttccgggctctgcagttctcgctcatgctctgcgcgtttgttggggcactgggcggcgcagccttcctgggcaccgccatcttcattgaggccgaccgccggcgggcacagctgcacgtgcagggtcagttaggagctgtgcccggcccagcttcttgatctgcctgtctgtctgtccatctgtctgcccactcctgtgcacctggcagctcagtccacagccctccccttgtttggcctccagtctgtctgcatccacccctggggtggctctgtggctgccccatccatttcccgctgcctgtttgcccttctctggctttgtctgtctgtccatccagctcaccctggctctgaccctcccccctcaggcctgctgcacgaagcagggtccacagacgaccggattgtggtgccccagcggggccgctccacccgcgtgcccgtggccagtgtgctcatctgagaggctgccgctcacctacctgcacatctgccacagctggccctgggcccaccccacgaagggcctgggcctaaccccttggcctggcccagcttccagagggaccctgggccgtgtgccagctcccagacactacctgggtagctcaggggaggaggtgggggtccaggagggggatccctctccacaggggcagccccaagggctcggtgctatttgtaacggaataaaatttgtagccagaccccaggtgcctgctctcgtctttctctgggtggcctctgatcttgcaccccgtcttcaccccagggctcctgaagactgtgggtcattcctcagggctctgggtgagtctctgcccttctgggctgggcgactgagatgggggactgctcttctccgagtgagctggctgagtgtgaccgtgagtcacgcccctgcttccctggagcctgtcccttgcctcacaggcctggctgaggtgggggtgggcactgccctttgtaccccagaattcccactgtcagggcctccctgctcgctgcctccccgggtcctggatatggaggccacggctgccagctggcaggtggctgtccccgtcttggggggggccagcagacccttggtgagtgcctggggtggctcccgggcctcctcctgccccctccccactggcgggtggggtgggaagggggcgggtgcagccggctgagagcttgatgatttcctgccctcgcccggcgctcaccacagcttcctgccgcaggcgggcgggagggcgggcacggagaggcgggcgccgaggaggggcaggtagggctgggacgcaggggtaactggatcccccgacttcagcccaggccctggtctgaccaccctgggagcagggactttccacagtcagctggacgcacactcagcccagtaaaagaggggacccatcccgggagccccggggagggcacagctgcctcctcccgggctcccctgccacctggtgcctacctgccccctgctccctgccgggtccggtcctcaccccatcttcatctggccttgactctgcccttgaggggcctaggggtgcagccagcctgctccgagctcccctgcagatggaggaggccatcctggtcccctgcgtgctggggctcctgctgctgcccatcctggccatgttgatggcactgtgtgtgcactgccacagactgccaggtgagtgggaaactggtgggggtacccagggcccagggacaccgacgggatcctcatccactcccagcccctgtgtctgtcctggctctgtccctgcctccgtcctgatcccagcgcctctgagagtccctggatcccagcaccttctgccctaagcaccccctgttcctgcctcaccagccctctctttcccaggctcctacgacagcacatcctcagataggtgagtccgccccagccgccctgggtctccctccacaccccatggcggggcagggctggggcttccatcctccatcttccagccc

SEQ ID NO: 7046 - DNA, 6000 bp, Homo sapiens
ccgtctctgctgagggtcaaccctgcaagtggctaggagtcagtgtctcgtcatcctgggagaggtctcccggccatggagaatgagttctgtaggtaccaaggctgagaagcgggcaccacacaagccaggccccaggctcagggaggggctgtgtctaccagccccaacagagcagttggccccaggctaccaaggataccgtgggaggaggacagggccatctgaggagggcatcccccgcctaggagatcagccccgtctctggggtctccgcctggctgacccccgccccatcccaatccaccccccaataggcttcaccacggcagcatacctgcgcatccacgcggtgaaggaccacgggctccaggccccgcgggctgaccgcatcctgtgcaagctgtgcagcgtgcactgcaagacccctgcccagctggccggccacatgcagacccatctggggggggccgccccccctgtcccgggagacgccccccagccacagcccacctgctgagggggacccccgcacccaccaggcaaggcgtggggcatggctggggggcgggatggggggtgtgggggacaacggggctcaaagggcccaataggggatctcaggaaggcgagggatgcccatgtaccactcaggctagggagacttctgggcacagggaggatccttgagaactgctctgtctgggtgaggatgcaggctgaggcctctggggtccagataggaagtgagcaacggctgtgtcccaggggaagcaggctgggaaggtgtggggtgagggcaaggctcttgccattcagatcgcgctgtgatccgtggtgtttctcctgtgcaggtactggtgaggtttgtccaatggcggcggcagcggcagcggcggcagcggcagcagcggcagcagtagcagcccctcccacagctgtgggctccctctcgggggcggagggggtgcctgtgagctctcagccacttccctcccaaccctggtgagctccaagttggttgcgggggagaggggagaatggagtagagtcccttggtacaagctcctctcccccctcttttcccaccaactcctatttccctaccaaccaaggagcctccagaaggaaaggaggaagaaatgttttcttaggggaattcgctaggttttaacgatttgtttctcctgctcctcttctgtcagacctgaccccacacaaacctgtcccctcggttgtgttgaagtcccctggacagtgggcaggggtggcagaggacacgagcagccactgcccgtaccccctctcctctctgtaagcccatgccctgtcttcccagggacttgtgagcctcttccctcgacggtcctcttctctccttccagtcctctccccctgctgtctgcagcccctccccggggagttggtgctttcttttccttttttttttttttccagggggagggaggagaggaaggagggggatcagagctgtcccaaagagggaaagcggtgaggtttgaggaggggcagaagcagggccggcaaaggttgtaccttcataaggtggtatggggggttggggtcaggccctgaacatcgtcctacttgagaatctgtcaggggaaaaagtcaaggggagcaggaggaagagccaggagggccagaggcagagaagagatggagtcttaggggccagggtgagcgaggggtccagggcctagaggtgcttcctgggggcgggggaatgcagccagtgtccccctcccctcttccaccccagctccagccctggtcttgtcttttcatccctcttccccacgacagaagaagttgtggccctggccatgtcatcgtgttcctgtgtcccctgcatgtaccccaccctccaccccttccttttgcgcggaccccattacaataaattttaaataaaatcctgtttctggctctggattgaatgaattgccctcactaagaactgccgccaaccccaagggtttcttctcggcctggtgtccgtcaatccagccttgctctgccctgtgaggctgtgaggttctggctccgccctccccaggggcagccttactggcggcagcacagatacagggcggggccaaggctgtggctgtggagagcaagttccaggtctctggggaattcccaactcggacaggcccagaatagcccctggaggtttgaagaggccccgtcagaaacccaaacagagctgccagacgggaatgccgccctcccccgtccacactcatggccgctgctcagcccccagccgcatccctccccacgcgcgtcacggccctgaggccatggtgggtggatgcggctgcggaaaggctggggagtccgagccctaggactgggagcagcgaggtagagaatgaaagctgcacctgtccctcatcctgggcatgggccactctgtgtttacacgggctcctctgcccagctcctcctgccccttggaattccctttcctgtccccgctccgtcctttccagggccccttttttgagccttccagcgccagtttctgccgctcctttctgcaggctccattctctccaaaccccaccctgctcctcctctgcagcctccccgcgtcttgccccatcttccttgccctcctgctcgtagagacgcctccacccggtcctgcctgtctcactggtcccgtctcctcgcagaaccctctccgtttcccccaaatccccgtctcttccaggaatcccggtgaccgttggcgggaggggccggggacttaagaaggaggcgtctctcctggaggcgcgcgtgagaaggggcagggagggggcgcgagtggtccccgggccggttgcctgggtaacgcgtggctcccttgggctggcgggaggggccggaggctcgcgaggggcgggggcggcgacggcggcggagcgtaggggaggggaccggagaggaggggatgagcacacgggagaggagaagagggagacccgccgcctccctccctccctagctgacttgctccctcccgggctgcggctgctgcaaaagccagcagcggcagcgggagctgtccggaggccggcgtcgaggtgagacccgggcagactgaggctgcgggtaggagtggaccgaccgacggctgacgccgggcggactgcacgggaatgcgggtgtctggagggctggtggtggtgctgggcgggctgaaccatcgggaggaggcgccagcccaccgaaggcgagggaagccccgggagaggggctgacaggggatcgaaggagataaccaggtcccccagaaaggggcgggagcgtcctcgccctaaacgcgcagcaagaaaacccgcaccgcctgggagcccagggaggaggggaggatgcagagggagtggaatgcgaatgtcgggtcctctgcccagtcggcctgtcggagtgctatttgcacagctcgttgattttggggtgctgggatctgagagtctggatcttgttggatggacccagggagagaccctggagaaggtcctgtttacaaaagggttaatcttccccagggctctccaagcagaagactttgagtagagcactcctcccgcagggatgtcccaccctaaggcaaaggaaaccccaacttttcttcctctccctagaggcagtgcaaggctggccctgagacaggaatgtggcccaattgggcctgcagtgctgagcgccctcttccctcctcaccccaagcctatctcctcctcttccagggtttgccgctgtctctgctattccatcctccccataggggctctctcccctctcccatctcaagatggcagccagcagctctgagatctctgagatgaagggggttgaggagagtcccaaggttccaggcgaagggcctggccattctgaagctgaaactggccctccccaggtcctagcaggggtaccagaccagccagaggccccgcagccaggtccaaacaccactgcggcccctgtggactcagggcccaaggctgggctggctccagaaaccacagagaccccggctggggcctcagaaacagcccaggccacagacctcagcttaagcccaggaggggaatcaaaggccaactgcagccccgaagacccatgccaagaaacagtgtccaaaccagaagtgagcaaagaggccactgcagaccaggggtccaggctggagtctgcagccccacctgaaccagccccagagcctgctccccaaccagacccccggccagattcccagcctacccccaagccagcccttcaaccagagctccctacccaggaggaccccacccctgagattctgtctgagagtgtaggggaaaagcaagagaatggggcagtggtgcccctgcaggctggtgatggggaagagggcccagcccctgagcctcactcaccaccctcaaaaaaatcccccccagccaatggggcccccccccgagtgctgcagcagctggttgaggaggatcgaatgagaagggcacacagtgggcatccaggatctccccgaggtagcctgagccgccaccccagctcccagttggcaggtcctggggtggaggggggtgaaggcacccagaaacctcgggactacatcatccttgccatcctgtcctgcttctgccccatgtggcctgtcaacatcgtggccttcgcttatgctgtcatggtgagccccatgggaccctagcccaggcctgctgtggctcccagcttcccgccagcgctgcaatagagcctctggagtaatcatgccttccttcccctctcctctctgcatggatcccacctccccaattccagggcctttgtttgcctctccctaggacctaaccctctgagccaccactgccctgcccctttgggtgggagggatatggaaacacgtgtcacacagcctcgctgacctgtgccctcctccccctgccccttcactcctccttcctcccttacccgccatctatggggctggcctctctctcttctggatgacttttccacctgatcccttctgggctggcttctcctgaccccggctatgtgcctccacccctcgccctaaccccagtcccggaacagcctgcagcagggggacgtggacggggcccagcgtctgggccgggtagccaagctcttaagcatcgtggcgctggtggggggagtcctcatcatcatcgcctcctgcgtcatcaacttaggcggtgagtgggggcttgggacaggcaggggaggaatggaagggttggcaagggcagctttactaacccctgcccctgctctctcctgtctgtcctccttacctctcctttgtctctccttgtctccccctccccccgtctgtccttccctctcctctcccacagtgtataagtgaggggctctgccccgcatcccaagacttttcttcctgttgggagctgccttgggcccatccctcccctggggggagcccaactgatggccctggcccccacccctaaggaccaagggagcctgagcggccttgtttacagcttctgtcctgctcctgcatcttgccaggctcctctgccaactgtaggcctgcctcatccctgcactggttccaacctccctgcactaatgcctgcatcccctccggcctcttggccccctatccctgcacttctggaaacctccctgcactctggaaacctccctgaacacctccccaactctgcgctctcagcctccctgcatctctcctggcctccctgcacttcttccagccccccaaattctctggacctccaccctggccgcctcctcccaactttcattgtcttggcatctctcaaccctcagtcctctcttccttcccttctttatcatctcccctttcctctccacgtcccgcccccttcctcttcctgcctcctcatctcccttaagcatcctcttctccaacctcccgtcaccgtttactctgcaaaattgaca

SEQ ID NO: 7047 - DNA, 6000 bp, Homo sapiens
atttttagtagagacagggtttctccatgttgctcaggctggtctcgaactcccgacctcaggtgatctgcccgcctggcctcccaaagtgctgggattacaggctagagccaccatgtccatcactatctttaagcaatgctccctctcccacctgagccagaactccctttcccaactgttatatagctgaaacaattggaacactgcctggtacatagtaagggtacagaaatgctacctttgttattattattctcccatctgtacccaggactccttccacagttcccagcagcctctctcccatccatccccagcgtgtacctctccggtcctcccacccccatccccttgctgtcgcctcacctgggctggtcaccgtagtggtaacagttgtcgtggtgatgatggtggtcgtcgtctcctcctctcctccctcaggcccaaggggaggccctggggaggcagggctgggtgggggtggggctgtggttcctgggggcggggtcagcagttctggcgcagtggggcctgcccccctgaccccgttaggggtgacggctgttgtcagaggccctgtccccggctcagtggcccgtggcagggagggcactgcgagagtctggccggccggaggggtggctagcgtggggtcccgatcagatcctgggacagtgcagggaatatcagagcacaggaggagcacatggaggaccttgggtggggagcagggctgagggaagctaggggttcccctgccataccacaaaagcctcccgcacaaggtacagcaccccccacctttcccttccccaccccagcccctacctcctcccaaggcttccacagcctgagtcccccctctttctcttctggtcccttctctccacccagccccttccaccctgatactcctctccctgagcctctctctctgcctcctcactcagatcacgttctctctctggttatctcctctctcctctgtctcattctctctcgaactctttatttccccatttccctgtttagtattctgattgcactctgatttcatgattcgagatccactagtttttgtgtttcattctctctgtctctgtcttccaccatttctctgagtctggttctctgaatttccatctctgtttctatgtgtctgtttttctgtctgactgtcacctaatcattctgtctctgtctctctggttctgtctgtgcccaggtttgactttctctgacagtctcgttctgtgttccctgaatctcacaggaatgcaggctctttcctctgcagtctctctctgcctgctcttctctagcctggctccccatctccctgagcccatatccctccctctgcctctaggccactcctgccactctgggggcctcacctggcaggtagcccatctctgggcccctcctcagcagggccccatgaagcagttcagccagggcctcagaggccaccgtgggggtctcacttccaggctctggcaatatctcctcctccttcaggggcagacctaggaggtgaagttgtgtgagcttctccacttccccacaccccttccttctccagagagatattttctagaactcttcctccctcctccatcagctgggcctgcaggggctcagatggtcccaggctcgactgagggccaagatcggaggaggggctcccagctgccctcatactcccactcccacacctcttctctcccctcccctctcccttctccctgggctgtgtgggccttcattgaacaccttagctcttatggaccctggacagcgccagcaaggcagaggggtcgccggtgctgccttccctttcacctcagtggtgatctccccccaaccctggggctctgcagaggatctggccgcacctcccagcccttgcttccgcagtgcctggctttctctctgggtttctgtctctgcagtgtggctgtcttttctctctctctctctctctctctcccccccaccctctctctctctggtcctctgcagtctctgcctccttccctggagtctggctgggggtcagagtgggggactgaaaatctggtctttgagccctgcctctgctcatctgtctttgtccattcatccaagaacagttgtgtgtacagcgcctggcatctctctcagcacctccatctcccacccaggtccctccatgcttctgccgcctccgcagacatccccccaactttcccagccctccttcttggatctagcccctgagacactgctaaaagcttctctcattcatttctctgccttctcaatattgagggttaaggggcttcgggttcaagcctgaaagctctggcttgccccttccccatcagctgtgcctctcccctcccccatgtgctcggaagacccaggatattaagagaaaggagggtggaggaccccgctggacgccttcctggggcccacccccacagtctcatgtccttaccctggatccagggacagctcagcagaattaggaacagcagctggggaggcggcgggtgctgggccctgggagtccccatggcgactcaccccgatctctctcctctgtgcctctctaagtaatctggctgccacctttcctccgtctccgtttatctttccctttaattgttttttttttttttttttttttcctcgtaggagtcagcaaagaaagacaatttctctgccccttgggatggaggggcagaattgggctaggggtcgcctggagcccacccccctttgctcagtctcctctgtcctcttctcgcggctctgtggtggagggggcgcggctccggctgcagggggtggggccgagagggccgaaggggccgggtggcctgggttaccctcctgctcaggcgcctgggtccactgggctgtctggaccccaagctaggggactggggaggagaaagacagcttctgggggtttagggtggggtcgaggatcgagggggtctccactgggctctagcggggcttgtcggggaggggaaggggtgggttggggaactgggagagccgaagctcgggcactggagctgcgggagggagaagctgagaaaggtatcgagcccacgtcagatcctggggacgggcggagggaggggcctgggatttatttgacggggagggaggaggaggaagtgcagatggaggagggagggatcatacgagccagggccgtaatcctcactcccgcggcccctaggggaggcaaaggaaactctctggtcccagcagtaattagccccctccgcctgccattccagcacatctggaatctgaatctcctcttcccagggtgccgaggggctgcatagcttggttcgcgcctgctaggcccccaattatgccccctgttcacattcagacctcccaaggggcttcccttccccttttacagtagctcgggtggaatgggctctccctcctccaggggaatagagagcttccacgattgtgacaagtctcgtgggtgacgggccggggtttggggaggagagacagacccctcctcttccataaaccctgaccccggccagctaacaggcggcctcggctctgattttccctccggagcgcccttttcagcaccagcggcgcgcggacagctcccctcgccccgccggggcgggcccggcccgacgccgcccgcgattggctgaggccgctttcggtgtttgccaggctcgcgggctcccgggctgcctagggccagcgggagtcacaggccgaccgaccgacggaccagccgcccgacggactggcctcagcatccttgcccgcagtcccgggcgcctgcccagccgtcagtccgcgctcgccccgcccctcaggccccgcccctcaggccccgcccgatacgacccgccccttctttcgcattgcgggacggctggaggctggcaccgtggcccctgcgccccacgtggcgccctttccgggcggggggggtggggaggcacctccagcgacaactctcccccctcccccggcacccggctgatttgctgtgccactgggagggttcgggggtggctgagctgagagggctccgggaaggagtgacgtcagggtgagtgggagcccaggaaggagcgagtaggagagagggagcgagagccaggcaggaccgcagggtcggggctagtgaggagcgagggcaaggagagagcagtgaggccggagagaaagaagctgccgcggaggaagacaggctgcgggttcccgggactgcaggtccaggcagggtaggaaccgctgcccaggggagctaggaggaagcggggagagagagcgagcgaaaagcgggggtggggaggaaagggggagattgaggtgggagagagaagcagagcgagagagaggaggctgctggaaggagaaagaagagggtgaggaggcgacagagggagaggaggaagaagaggtagaaggagagagaaaggggagagaaaggagagaggagggttggaggtgcatgaaggaggggagagggagcttcagcgtggagagaggaccgcggaaggagagagagacagcccagagtggaatgtggaagggaaacagtccagcggggagccagggggcagccatggaagggacaggtggggagctggggggacaggggaactggggtccggaggacgccccaggcctcttggccagggcctccctgatcatgctcccgtggccactacccctggcctcctcggccctcaccttgctcttcggggccctcacttccctgttcctctggtactgctaccgcctgggctcccaagacatgcaggccctaggggctgggagccgagctgggggtgttcgtggtgggcctgtgggatgctcggaggccggcgggccaagcccagggggtcctggggatcccggggaaggacctaggacggaaggcctagtgagccggcggcttcgggcctacgcaaggcgctactcctgggctgggatgggtagagtgaggcgggcagctcagggtggcccaggccctgggagagggccaggggtcctaggtattcagcgcccaggcctgcttttcctaccagacctgccttcagccccctttgtgccgcgggacgcccagcggcacgacgtggagctcctggagagcagcttccctgccattttgcgggacttcggggctgtgagctgggacttctcagggactacccctccgcctcggggctggtccccacctctggcccccgggtgctaccagctcctgctgtaccaagcaggccggtgccaacccagcaactgccgccggtgcccgggggcctatcgggcactgagggggcttcgaagctttatgagtgccaacaccttcggcaatgccggcttttccgttctcctgcctggggcccggctcgagggccgctgtgggcccaccaatgcccgggtcagatgccatctgggtaagtagctgccgcctactgacaacctccttgcctcgatgatttcccccccagacccttctctccgccagagccgtctgctgtctggttctcattgtgcctctcttcttccatggctccctgttgccacccacagcagcatttcctcagcctcggttatctgcacaccaccttcataagctttgccgtggtcattcccatctgtactgcgtttcttcaccttggctctccccccgaccttttgttctacgtatttaaaagaaatatttatagcactatcagtattacttgccctaaatagtactcataaaaagcctggacaacacagtgagaccttgtctctacaaataataaaacaattagccgggcgcggtggcccatgcctatggtcccagctactggagagggtgaggtgggaggttcactggagctcagcagtttgaggctgcagtgagctgagattgtgctactgcactccagcctgggtgacaagaaagtactcataaacacaagctgaaatttaaaaaagaaa

SEQ ID NO: 7048 - DNA, 6000 bp, Homo sapiens
tcctgtgttcctaactccacaccccacacactttcctcaggttacaccgtgacctggctgccctcccggcaaaagacttcgttgctggcctcgggagcccctcgataccagcacatgggccgagtgctgctgttccaagagccacagggcggaggacactggagccaggtccagacaatccatgggacccaggtgcgcccagtccgagggcatctgcagaccagggactggcgggacacacatcacactcccttctgtcctttgaatgctcatccacttaccatgtggcagcccctgtgctaaacatgatcacatttatccctcataacacacagaggtaagccctgtcatctccctctctagtttaagaaactgaacctcaaagagcccaccttgtcttaacgcacatagactaggggtggatccaagattggaacctgcatttgagggagtggcacaagatgaacacggtacaggtatctccctgccaacccctgctgttcccacaggcgcttccccaaacacctgcctctccccacagattggctcttatttcggtggggagctgtgtggcgtcgacgtggaccaagatggggagacagagctgctgctgattggtgccccactgttctatggggagcagagaggaggccgggtgtttatctaccagagaagacaggtggggccaggatctggagctgagagggaggagggagagcagcagagattcgcagctcccagttattctgaaggctttctctgtctggtcacgtggcgatcaaacttttagaacgacagagaggcaatagcaaatcctcactggggaaagactgtatgcagggtccagtgccaatatttcttttttcttttgagacagagtctcgctcttatggcccaggctagagtgcagtggcacgatctcggctcactgcaacctccacctcccaggttcaagggattctcctgcctcagcctcccgagtagctgggattacaggcatgtgccaccatgcccagctaatttttgtatttttagtagacatggggtttcaccatgttggtcaggctggtctcgaactcctgacctcaggtgatccacccacctcggcctcccaaagtgttcggattacaggtgcctgccgccacacccagctaatttttgtattcttagtagagaccatgtttcgacatgtgggccaggctggtctctaatcctgacctcaggtgatccacccgcctcggcctcccaaaatgctgggattacaggcgtgagccgctgcacctggtaggcagcgccaaactttttatagatatgacctccctttcctcatgaccacctgctgagatactacaagctttattttataaatgggaatccctggggtgcggtggctcatgcctgtaatcccagcactttgagaggctgaggcaagatgattgcttgaagccaggagttcaagaccagcctgggcaacatgacaagaccctgtttctacaaaaataaaaataaataaattaaaattttaaagttagccagatgtggtggtacatacctgtagtcccagctacttgggaggctgaggtgggaggatcgcttgagcccaggagttcgaggctgtagtgagctgcgattgcaccactgcactccagcctgtgcgacagagcaagactccatctcaaaaaaaaattatcaaaaaaatgtatatatatataaatggaaaccccaagctcagtaggggaaaccacaaggtcacagtaagaggacagtaagagtctgggctggtgcttgaaccctggttagtctaacagcaccattccaattctgtgagggaccccatcttacgtttctttagcattcttcactcagttgttctgtgacagcatgctgagtgacttgggtgtgacctgtctcttgctacttcctagttggggtttgaagaagtctcagagctgcagggggaccccggctacccactcgggcggtttggagaagccatcactgctctgacagacatcaacggcgatgggctggtagacgtggctgtgggggcccctctggaggagcagggggctgtgtacatcttcaatgggaggcacggggggcttagtccccagccaagtcaggtgacgtatgctgcctgccaatcacactccattctcaggtgccctaagcccccaagcccagaccccactccccagcccgatccttccctccctccaacctacctctcctcagcttagtggcaatttctttcttgctctcagcggatagaagggacccaagtgctctcaggaattcagtggtttggacgctccatccatggggtgaaggaccttgaaggggatggcttggcagatgtggctgtgggggctgagagccagatgatcgtgctgaggtgagatgggtctcccaggtcacacctgatgaccccagctcttatcctgttttgtttatattttattttatttatttattttggttttttttagagacagggtctctctttgttgctcaggctggagtgcagtggcatgatcataactcactgcagcctcgaactgctgggcttaagtgatcctcccacctcagcctctcgggtagctgagactacaggtgctcgccaccacacctggctaattttttttttttttttggtagcaatggggacttactttgttgccccagctggtctcaaactcctggtctcaaactatgctttctcctcagcctcccagagtgctggagttacaggcaggagccactatgcatggcctaatttttattttttttaatatatggtcttccaggccaggcacagtggctcacacctgtaatcccagagacagcttacatattggaaaacatataattaaaaattagcagggtgtggcagctgggcacggtggctcacacctctaatcccagcacttcggaagtccgaggcgggcggatcacgaggtcaggagatggagaccatcctggctaacacggtgaaaccctgtctctactaaaaatacaaaaattagccaggcgtggtggcgggtgcctgtagtcgcagctactcgggaggctgaggcaggagaatggcgtgaacccaggaggcggagcttgcagtgagccgagatcgcgcccctgcactccagcctgggtgacagagtgagactccgcctcaaaaaaaaaaaaagattaacagggtgtggtggctcatgtgggtaatcccagcactttgagaggctgtggcaggaagattacttgagctcaagagtttgagaccagcctgggcaacacagtgggacaccatctgtactttttttttttcttttgagagagagtcttgcactgttgcccaggccagagtgcagtggtgcgatcttggctcactgtaacctccacctcctgggttcaagcgattctcctgcatcagcctcccaagtagctgggatcacaggcatgcaccaccatgccctgctaatttttttgtatttttagtagagacggggtttcgccatgttggccaggctggttttgaactcctgacctcaagggatccgcccgtctcggcctcccaaagtgctaggattacagagtgagccaccgtgcccagcccttttcttttttttttttaattggccaggtatggtggtgcatgactgtaggcccagctacttgggaggctaaggcaggaggatgacttgagcctgggaggtcgaggttgcagtgagctgtgatcatgccactgtactccagcctgagctacagagtgagatcctaccacaaaaaaataataaataggccggatgcaatgactcatgcctgtaatccagcactttgggaggccgaggtgggtggatcatttgaggtcaggtggacgtggttgtgggggcccctctggaggagcagggggctgtatacatcttcaatgggaggcacggggggcttagtcaggagttcaagaccagcctggccaacctgttgaaaccccatctctactaaaaatacaaaaattagctgggcatggtggcatgcgcctgtaatcccagctactcgggaggctgaggcaggagaattgcttgagcccaagaggaggatctcaaaaaaaaaaaaaaaaataggagccaggcactggggctcactcccgtaatcccagctacacaggagtctgagacaagaggatcgctggaggccaggagtgtgaggatgcagtgagctatgactgcaccactgcactccagcctgagcaacaaagcgaggctctaacaacaacaaaagctgcaactttattatgaagcataataaaattcatgcaagcatcactgaaggcttaaacataagcatgaaagtaactcagtatgatttctcttcctaagagctttctcttcttcatggaaaatgggtcagaggctgctagaatgaactgggagccctaattagttatcaccattattggccaggcatggtggctcatgcctataatcccagcactttgggagcccaagccgggaggattgcttgagctcaggagttcaagaccaccctggacaacataggaaggtcccttctctacaaaaatttatttaaagttagccaggtgtggtggcacatgcctgtggtcccagatccttgggaggctgaggtgggaggattactagagcctgggaggccgaggctgtagtgagctgttatcatgccactgcactccagcctgggcaacagggtgagaccctctctcaaaataaataaataaaaagtatcattattattttccttaagaggagacagtgacatgttgaggtctgctttagggaaggagagttctctggctttgctggcgggagccccacatctgaggggggacgtgcagttgggttggagggagagagttggttgccttctgccctgcagctcccggcccgtggtggatatggtcaccctgatgtccttctctccagctgagatcccagtgcatgaagtggagtgctcctattcaaccagtaacaagatgaaagaaggagttaatatcacaatctgtttccagatcaagtctctcatcccccagttccaaggtcagagctctcctcctgctcccagggcagctgccgccccaaatccaggcttatggcctgggatcccccaccatttaactcttgccttttccgccctgcccaggccgcctggttgccaatctcacttacactctgcagctggatggccaccggaccagaagacgggggttgttcccaggagggagacatgaactcagaaggaatatagctgtcaccaccagcatgtcatgcactgacttctcatttcatttcccggtaagggagccagcgccaatgctctgggatgagctacctgcaggggcaggctcagctccgtcactgtccagtgggtgacacgtcacttccatccctctgtgctgtcacttcctctcctgtgcaatggtagtaataacacccttagcatattttcttctagtgttttttttaaattatatatatatgtgtatatatatgtatatatatgtgtatatatatatatgtatatatatatatatatatatttttttttttttgacacagagtctcgctctgtcacccaggctgtagtgcagtggcacggtctcacttactacagcacgatctcggctcatggccacctccacctcctgggttcaagcaattctcctgcctcagtctcccgagtacctgggattacaggcacctgccactatgcctagctaatttttgtatttttgggagagatagggtttcaccatgttagtcaggctggtctcgaactcctgacctctggtgatctgcctgcattggcctcccaaagtgctgggattacaggcatgagccatcgctcctggcctattttatattatttatttatttatttatttatttatttatttatttatttatttgagacagagtctcgctctatcacccaggctggagtgcagtggcatgatctcggctcactacagcctct

SEQ ID NO: 7049 - DNA, 6000 bp, Homo sapiens
gccttattttttattttgtagagatggggtctcactatgtcgtccagactagtctcaaactcctgagctcaagcaatcctcctgcctcagcctcccaaagtgctgagattacaggcatgagccaccatgcctagctcaatatgtaaataaattagcaaaatatatggtatgtcagctccaagtggagacacaagagatgggtgtgagctggcaaggctgatagccctggccctggtgcacagtgggacccagaagacggagagcagaaggaagtccccagataggcagcaacatggaccctctagcagagacattagagctgctaaaagattcagagtaacaatcatcgccgtcatacaacagcaggaagcactgacatactgacattccacaccaggtgctgttctgtttgctttacaaatatcacttcatctttacagcagtcctatgaatatggtgctattattatttggatttttctgtttcttttttttgagatggagtttcgctcttgttgcccccagcgtacaatggcgcagtcttggctcactgcaacttccgcctcccaggttcaggcgattctcctgactcagcctctcaagtagctgggattacaggcatgtgccaccacgcccggctaattttgtatttttaggagagacggggtttctccatgttggtcaggctggtctcgaaccccggacttcaggtgatctgccagccttggtgagggccgggaacggtggctcatgcctataatcccagcattctgggaggccaaggcgggtggatcacctgaggtcgggagtttgagaccagcctgaccaacatggagaagccccatttctactaaaaatataaaattagccggcttggtggtgggcacctgtaatcccagctactcgggaagctgaggcaggagaatcacctgaacccaggatgtggaggctgcggtgagccaaaatcacaccactgcattctagcctggtgacctggagagactctgtctcaaaaaacaacaacaaccaaaaaaacaaaaacaaaaacaaaaacaaaaaaaaatgagaactgaggtatagaaaggttatataacttgcctcctagagttattacagtgggtgaatgggctgggattccaacccaggtcatctggctcccatgtggataggtctggacccacaggtagaggggacaagacaaattgccaagcctcaggactgggtagagcaagacaggatcaacaacctctccagtagttggctccaacctagcaggtgtgggagaggacctgtgacaggggcgggagaaggcttagtggggccggcagtccacccactcctcccccaagacagtccaaagcaataggtgacagcaagcccccaagggtgggtggaacacgggaagccaccccagctggtattttccttggatcatagtgtagaagttaagaaacacaccccaccccccaacagctgcacagtctggagcgaatatacacgcccaccacccacacacccaagacccaatacacttttttaaactttatttttacttctatttatttatttttaattattttttaaaaatctaattagagatgaggtcttaggctgggcacagtggctcatgcctgtaaccccagcacttcgggaggccgaggcaggcagatcacgaggcgggaggatcacgaggtcaggagttcgagaccagcctggccaatatggtgaaaccccatctctgctaaaaatacaaaaatgagctgggcgcggtggtgtgcacctgtaatctcagctacttgggaggctgaggcagaattgtttgaactcaggaggcggatgctgcagtgagctgagatcgtgccactgcactccagtctgggagacagagcgagactacgtctcaaaacaaacaaacaaacaaacaacaacaacaaaaacagagataaggtcttggcatgttgcccaggctggtctcaagtcctgggctcaaaggattctcctgcctcagcctcccaaagtgctaggattacaggcgtgaaccactgcacccaccctacttttttttttttttttttttatacaggatctcactctgtcacccgggctggagtgcagtggcaagatcactgctgactgtacccttgacctcagggactcaagtgatcctcctgcctcagcctcctgagtagctgggactacaggagagcgccagcacacctgggtaattaagattttttttgtagagacagacgctatgttgcccaggctgctctcgaactcctggcttcaagtgatacacccttggcctcctaaagtgctgggatcacaggcatgagccactgcacctagcctaatatagttaatatccccgtcaaggctgctcagagggcctgagaggaacaaagggctcagctctggagagctccacccccagcgccaatctctctaaatggcctctttcctctccatattccaccacaaggcttggagtccagcttcctgtgaccttaagtcaccattccaaagccctgcgatctcacccagagaccacaagtgaaataatattataatcctgagaagtttagtggaccaagatggcatgccatcaagacgctgagaaacaaagaggaagatgggaccagggggcccagaagacgctggaacccacagtattaaaagctcagagaggctgggcacagtggctcacacctgtaatcccagcactttgggaggccaaggtgggtggatcacttgagcccaggggtttgagaacagcctgggcaacatggcgaaacccagtctctaccaaaaaatatacaaaaattagccaggcatggtggtgcgtgccttagtaccagctacttgggaggctgaggcaggaggattgactgaacctgagagcacaccactgcactccagcctggatgacagaaccagacctgacctcaaagagaagaaaaaaaaaaaaaaaaaaaagcccagaggggagggtaccctcaacagttttccagccccttccacatccttcctaacctcacttgatagtgttcaagtcctaccttaggcaaggcagaaattataggaccaagccgccaaatggggaaattgagtcccagagagaagtaatgcattatttaagatcccatgcaggactatgagtcaggggtccaagagcccttccaccgtgtgccactcagagacacagagtaggagggggaagggggtcgggtggcaggggacaaaagatgcaggaggcaagcagcagtgactgaagaggcagaggctgacatgaaagacccaggagcagagaatctttccttatcatctccaggggacaccactgggcagggcttggcctccggaaaaaccctgcattccctctgtgggttcatcagggcaccactctcctactagctgggttttttttttttgttttgttttgtttttgagacagagtcttactctgtcacctaggctggagtgcaatggcgtgatctcagctcactgtaacctccacctcccatgttcaagcaatcctcctgtctcagcctcccaagtagctgggattacaggcacctgccatcatgcctggctaatttttgtatgtttgtagagacagggtttcgccatgttggccaggctggtctccaactcctggcctcaggtgatctgcctgcctcagcctcccaaagtgctgggattacaggcatgagccaccacaccctgcctgagctgggttttaacaggaagaggagaagagccaaaactcctcacatagaatcacacagcacttgacagtttccaacctcatcatcactgaagtttagagcagccgatacccataaagatgatctccccatccccctacagttacccactgtgcagagggagatccacacttagagacaggaagcgatttccagaagtccatagcaactcagtcccaggaatctaggtttcctgaccagggcatagcagaaagggtccattcctttccttgcttgtaccttcacagaagcttcctggacagagccctggggtccaggagacctgttattcattcccggctatgctgagacttgctgagtgaccttggggactccttctagagaatataagttccacgagtgcaggaatttttgtctattagtccttgatgtatctccagccctagaacagtgtttggcccatactatgtgcccaaaaaatatccattaaatgactgaatgttgctgtgcatggtggtgcatgcctgtaatcccagcactttgggaagctgaggcagaaggattgcttaagcccaggagttagagaccagcttggacaacatagtgagaccgcatctcgtaaaaatttttaaaaataaaaaatgagtgaatatctagatagccaggattagagaagtgtcacagtcagaaagcctgaagcctaaagaagaccaaggaaccaggggctttatcctcagatacatgaaagcctgaaattctgtccacaagtatttatagagggcccgtaatgttcttggtactgggctaggaactccccagattcagttaagaacaaagtcattacctggcctcagatgcaaggcaggggctggggggtgtgagtggcagggaggcagcgtgatcaatacaaacacttttcttagcctgagctgccctgacatggtctgacggctcacaaggtggtgagtgcagccgggctgcagtgttcaaggagggcgccggctggccgcccacctgtcagaggctgcgccagaaggatgcggaagaagagatttctgccttggctgaggtcacttcccacccccagattccctgcccacacaaccctgcaattttctgacgctgacgactcggatcctattatttcccgattttcaaggtcccatgatgctgacagccccaaatgctaagtcgtcagtccgcccacgccctggacccgaaagcaataaaggcgaggtcagcaagggtcctaccacccactgcctcgaaaggcctctgggggtggtcggcgcgcccctccccacctcgcgggggccgtgtgggcgtcgctcggtcgttggggtgccggggacgtcgtgatgagaacggcgtcccagagacggcggtgacagagccgggacacgtgacagtcacagggtcacattctgcggtccacgagtttgggaccgggctggtcacgtgacgcggtgggggcaccatggggtgatgtgagatgcgggtgtctcggattacgtacaaatgacgtattcctaccccttttggcaaccagatttccgttggaagatgcaacggttccggtgacggtagcaagttctcgcgtccaggcatctccgcttccgctcggggcgcaacaacttccgactccaccttcccagcctcgggcaaggaagagacgcgaccatgtgcgcatgccccgaatttatcacggaggggcggggctgaggctgcgggagctggagcggggaagaaaagggaattccaacctgtggaaccttggggggtccccggggtcggcgccttcccattgactgtgggcggtgcaagggacggagcctctggcggctcgtgggggtgttggggtccgcagggggagggaggggagtgtcagagtgtgagcggggtacgggaattccaaatttgagggcctcccggctctggcgccggggagggagagctcaggccgccatgcgggacaggacccacgagctgagacaggtgagacgccagggcagcggggatggggacgggcggacgaactggaacgcaggacttctggtcttcgggatagggaggggtggctgatggccaggaaggaaagtcccggaagcctgtgggtcctgcggggtaagagccgcagcgaaacggtggtgccaatgactccgggcctggcagggggatgacagctcggacgaagaggacaaggagcgggtcgcgctggtggtgcacccgggcacggcacggctggggagcccggacgaggagttcttccacaa

SEQ ID NO: 7050 - DNA, 6000 bp, Homo sapiens
tttataatgactcataaacttgtaacgatgtgtatattctattttagggttttttttgtgtgtgtagaaacctgtgtgattttagaatgttcatttaagaattgcttcagaattgtatatatttttaagcaattttttgaagtattacttaattacagaaaggtatgcacacaggccattagagtatggcttgatgtatctaagagtttctaatctttttcgatcacgtttcagacactaatatctggagctgtggtagaacaacttgatttcctacgaatcagtgacacagaagagtaagtccctttgggttatttcatttttgggttttttgaaattacattagaaaagcagaaaatatgaaaccttttcttttaatttttaggcttccagaatttaagagttttgaggaactagaacctcccaaacattcaaaagtcaaacggcaaagcagcacccctagtgctcctgaactgggacagcagccggatgtcaacattagtgaatggaaggacaaacccacccacgaaattcttcaaaaactgaatgtgagacagatgcacttcccacatggccctaagtgaggttgctggagcagaagctcccagaatcagaccatatgtctttttgtcctgtcagtgaaggtagcaattaatctggaggtggatgacttgtctactcccagggcaatcatgagaagttgttctcttggtctaacatctgcatggatatctttaaaaatgcttaagaagtgcaggtgaatatgtttgtcttggatatacaagtatggtatgagccattaaagaagtcaatgatagttgcctttgggttctccagatttccctttcagtgccctctttctccctttctgcccccatcttgtcccctgccccagtgtttaggtctaatgcttgctttaggtcagtcctgtcactgagtaaagcaatcctttcactgtgcttatagcacagtgccctaatatgtaataaacactctaaacaagtcccctcctatcatccatctcttcacaacagtttgctagcaacatggtctcccatttaccaataagaagaatcaagaagggagtggttaaatgacctggccaagtctctcagagagtggcaaaatcaatgttaatgcttgtagataaaatattttctgttcattacttatcttgttttctggcaaatttaattattaaattctaccaccccaggaagccagcttgtcacttgtctaccctctatctctaagatatctaagataaatatgaatcgttgtataatgtcatcttatgcttgatattatatcaatgacattttatcttccctcagttacatagtaaagtgtttcttctctgcatcatgtggttttgtgattagttaccctctgtggtaactgctgtacccatttcattccagttcctcaccgtgatttatattttcaggattgcagttgtctggctagccaagccatcctgctgggtatactgctcaaaagagaaggccccaacttcatcacaaaggaaggtaagcatgcatgtctaggagaacattttaagaggacctctctagccttgaacatatatcaaatatgcataagctatccactaaaatgttacaagttatttcccctttcattaaaccttctttttcacttttgaatggaaaatgttcattcataccccctagagtggaggagactgatgtatgaacccctaactggctttcatgcagtgatgcttgattgtttctctgattgtctgaaaagtattggagcttggattgtgcctgtgactgttaacgtctgatgaattccatagttgtttattgacagtttctgtttccagttttatcttctctaatttttcaagaataacattgaattgttatgtctataaaaattagctctctcatggtctgcagcagccatttgaaatggaacatggcatttaatagaattgtgctctgaagatggttaataaaaataaatcatttgtaatcatgtctatgtccactctgcattaaggatgaaaaccagttatcccccagattcacacttgcatgtggagtcaccactgtaaggaatctttaagttctccaccatggtccgcttctgacattttataatacagaataatacagaatacagttcaagtacttaatgtctagctattcaaaaatgtttggcttatttgaaaatactctgttaagaggtgtgtgttgatatggttagaactgaaaaacagcagtggaattaataatacgtatagttctggtaattaactgagcatagttatttattcaaatgagatctacttagtttttgccttattatagctaagagataaccttcttcagtattatagatgtgaattgaatagttttcaatttcttagcttgttaaaggcagaggaacttttagcaaatttcaaacagaatcttgcatgtttctaattagtcttaaaactataagtataagcagaatctcagttatatttaggacattcattgaaatttgcactttatctaaaacagtaggatttttaaaaatcaaacatttcattagaaacctagaattcagaatggctgtttttttaatttaaaagttttagtgcttttaaataaaagaaaatttatataaaatagtttataatgaaaatgctaagggaatgatgttgtaaaccatttttataaatttgagaataatattcattaaatgttttaaatctataaaaccttatgtgaaactttgaaaatcatatgcatctacagaatctgaatataattttatccaatttgttaaaaggctgtaaaaagtttagagtaaaatgttaaagatcttgttttttatcattgttttctttttggcgctctttcctgtcacattgtgattttacgggcaaaatcagtggccaaataatgaaacccactggtgtcttttgagcagtagcatatgttggaatgatcatagccccatgtacataacaaggcctcagtaaagttttattgaacaaataaatgaaaactcatatatattagagtctacagtatttgttcaattgctaattattttactatattctcttttcttcttttctgcagtaaattagaatagcatttgtatttgttaaaagtttagattgcatattaattaggaaaacagttgaatttcgagaaataaaatacctatattacatactcagactaaatagtatcaagtgctggggatagtcacactctatatatttgagttacatatttaaatatgttagttcagaacattaatggatcgatgtatcaactctagtgaagcacagtgaaaatgagtacttttaagaggaataaatgttgtgcatttaattaaaagctttgttcaacaaagactctattatccaatgtctaggtaccgtttctgatcacattgagagagtctatagaagagctggcagccaaaaactttggtttgtattagtgtccttgttgttatgttttatttttgtgttgttatattcgatagcctaaagaaaatggaccaatattaaagatagttattcatcctaatttttacttttaacctccaaggttacagcactttctaagaatgtgcctatgtagcatgtctgtccccccactgcctccaccaaaattctgagaacaaagacactgtagggattgaacctgaagagtattcgctggaatggtatgctaaggtttctttcctgctgtacacctcctctgccccaacaaggtgctttaagttctgttttttaatttaggaaacctgttctgctattatagaaggccatgaaaagagaccagtgatttatctaatcataagcaaaaatagtagaaggctattgtcttgtcacttaagttgaatgaatcccagtgattgtagttgcttcacgaaaaataaccaatttgttctacagaggtagtctgttcccagagattgaaaaaaaaaaagatgtaggaaagtttaaataaataaaattgtttaaattcacaatggagggccaattcacatggccctctgcattttgatgtaattctaacagttttactagcagaatctaacaaattttgaaagtcagagcgtatgtatagatatatatacacatgcacacatttttttaatgatacgttatccacttaaaaaaaaaagtctcaagaatgtcataagaaactcccttaacctcaatgagcctcaggtttctaatccctaaaataaggggattaaacaaaacaatcccttagaatatttcaattctatttttataataaatatgccgttcctcctcagaagaaataatgtaataatcctatagttaaatctttcaaattttcactgtaaattttcagtacagtaagacatcaagccaataagtgatagttctggtaaactttcttagccagtaagtttcaagtgtggtctgtagtcttatttttgattaagcacatctgttcttgctttatgtattacactttatgcatttcagataaatcattaactagcaaacatttagaatgctgactgttatgtttggaagaactcctggaagttttatttactctattttcccttttatggctttccactgacacacccaggttggcggtgcgctacggggctgcatttacccagaaattttcttcctctatagccccacacattactacttttctggtacatgggaaacaggtaacatgcacagaatttgaaaacccaagctgcttgaaatgtgtgggcttatttgcactctgaaggttaaatatgtcttttggtcttatagtgtgtgggtgaaagcttctctagaagtaggaagtgtttgtttcactaactttattagttattgacttaattttcttttagtcatctatgttgaaattaaggaatataaatgctttttataagtcagcttctgtggatatcctgaaatacatgaagattgcagccagtttcaaacctacatttttatttctctatctaaaagttccacgagaatttttacttttgagggaaaaaaattgtcttatgtattgcatgtgctgtactttaaaaaaaaaaaatctgttctccctaggttctaagactttttcagtaatataaaaatagcagtgtgaattccttcccccaacattatggctttatcagtaaaaagaaatactggtatttcattgtagcactttctaaaattcagtactaagtgaatcctctaatccagagatttggttatctaggcaccaaaagaaacatgatttaaagtggttatagaaataggtcacatgtactagtgacagatttagtaatgaacttgttaatgcaaaatcagaataccctcttaatccctcctatacaccctccctccctaatcaaaataataattaggttttctttttttgctttttatatcaatagtgtcatcaataatatttttgtcacagcttggtggcagggatgaggtggagggatccctccctaattctgaatggtcctgcagtctgggaaatttcagctgttaggttcaatgtcctgggcagtgtttcctccaaatgatgatgtgaggattccactgtgtatattttaaagactacccaatcagggccccatgcattcctcatcttttagatttgtgaacatctggcctgctctcttctttgcccccaggtcggttgtacgccgtgcagcaagtcttttaagtaaagtagtggacagcctggccccatccattactaatgttttagtgcagggcaaacaggtaagtatttgcttttcagacacttatttggtcccggttgcaaagatttctggctaggacccttaattttaagtctggcaaacctcaatgtcataggcctcttacaatcagatttataagggctcaggcactttctatcaaagtctccttccccaagcaaaatctagtcagaaagttattaaatgggccttcccctttcctgctgcaccttaaagctataatcttcaactcctgtgttg

SEQ ID NO: 7051 - DNA, 6000 bp, Homo sapiens
gtaggtgccgttcacctccagtttacagaggagacagggcccagaggggctgtctatcctgaataacccagcagatcggtcctcaggcatccagttgtgcccaccacagtgtggtctgctgccacatttgagcctggagtcagggccagcacactgtgtctttggcgagatcagatggggcaaagctgagaacaggggctctggttggtgctgagggattcgtgggggtggtccttactgggaagatgaggaattgggctcctgtgagggcctcccctaccctgccctgtgcctggacttcgctgggcccactgcgggagagaagaggtaggacgaggccttctgcgtggctgggccagggtgggctgtctcacgtgctttcctggatgtgtggttgggtcatgccttagccaggaggtaggtggtttgtccactccctgtcattgcaagggtcacagaggtggctgggtggcctgaccctcagcaccgctccttgcctccctcctgctgtcctggaggaagaggatgtggacttgttcatactgaggtgacacagcatcctctctcctacctctcccactgcccagggagagagcagcgcttaactccgctggagaaagttccaggcctttgagggagcatgcagagtgggtcacagtggatgcctgtatcagagcagcccattctagcctttcatggggtgggagggaggcatttactacttttaaaagacacgtgtggccaggcaccgtggttcacacctgcagtcccagcgctttgggaggctgaagtgggcggatcacttgagctcaagagtttgagaccagcctaggcaacatggcacaaccccaactctaggaaaaaattacaaatattagccagcatggtggtgcatgcctgtagtcccagctacgcaggaggattgcttgagcccaggaggtggaggctgcagtgagctgagatcatgccactgtactccactctgggtaatagagcaagaccctgtctcagatagatagatagatagatagatagatagatagatagatagatagatagataaacagatagatagacacatgtagccaagagctggaagttagttggaactggagaatgagaccacatctgaacaccagccagagaagcaggggtcttccagaggttatccggtccagcatcccgcctccaggcagaactggactgtgctctggtccggcggcacgggttccagctctgttctgcctcctcccaacagcgtgtgagatgagcaagggatggagcctgtttcttgcacctgtgaaatggggttggtaaaggtaccccctgcatcaggtggttgtaaagattaaatgagctgatgcacactctgctcctggcacagcggaggcgctacctaagtggaagtgtgcgtcactgtcggtgtcgtgaggctctcgtctgccttgtcctgccttgggtgggagattggacctccctgggggagcctgggtggtgcaggcaggcagggctgagctgagcagcctccctgtcacctacatccctcggactaatcattttctttctgttcctcagtttccttatctgtaaaatggggctgatggcagtgctcaggtaggttaatgggagggctagctgggtgaaaacccttcccaggcacctgacactggtgtgcccaggctgagaggttgccacacagtggctggagcccctccagctgtgtgtgccggggatcccgccagccccctcatctgtgcagtggccccctccccaccaaggacagtagcatggtgtcacccggcttgccataggcatctggcctgacctgctgctgcacacggatttctcaactggccacatcatggctagggcattgcccaaccctgagtgcagacctgcttggccgaagcaccctccgttccctgctctcccctggaagcctggaagcctttctagaagggaccagtgttggggtggagaagggttgggtggtgagtctgggaccagagctccgttcctctttggtggcctttttccttggaatacctaggaccgtgctttcctgccgccaccagctctctcattttttattttgacagggtctggctctgttgcccaggctggggtacagtggcctggtcatagctcacagcagcctcgacctcctgggctcaagagagcctcccaccttcacctcccaaagtgctggggttacaggcatgagccaccacacccagcctgtcctctttgatgggccaatttcacaggcattttctgagcacagcacagcccagtgctgccgagatgaacctgagcagactctgtgttaggatggggtggggacggctgaccttgggcctgggagaaggtcctccctgttctagagcacagccatctggtcagtttctcctggcttgtgaggccctcccagaccgggcctgacttccctccccactcccgccacttgtcaccgttatccactctgggccagcccccctgacattttcactcccagcttggctatctcctgcccctttcctgcccttggcccccacagttcccactgcctggggtgttctccccaactgctgcttggctgtgtcctccaggtgagggcctccttcaggggtcctccagcatggggagaagaggggacccagccggctctgctcttgagctgttcactcagccgcctcccccacccccttggccttgctttgagcccctgtcttgctgtggctggggcccaagggacgccgggataccctcttctcaccatcctccctttatgtccctgtttcccccaccaccgctgaccactggaagggtgaacccacgactgggcctgagggaaagggaagccaagggaggtctttggtgcaggtacccccgtttccagttgtgtttcctggccccaggctctgcccattcttgcctcctcccagggtatcaggacatgctggaggtgacagggcagaaggaatggccatgaccctcagacacaggcctgtaccctggggaggagctcatgtccctggaaggcagaaggtacctgcagtgggtgatgccaccacccgccttctagggcccggatccctggaggccgctggacccagggcaccctgatcggggtgctttgtcttccaggccccaggctcttcctgccctccagggtgcccttcctgcccctgtaactggccagctttcctcatgctggcctctgaaacaacctagtcacactgcctcgggcgcagctgactgagatcattgcttcctggagtcaccgactggctgggcagggagaagcctagcaccctgggatgcagctgctctgcacagatggggaaactgaggccctgggagctctgcagccttggggctggtgtgtcttcctggtgggagctatgttggagttgcaggccctgccccattcacaagcacatcccttggcctcactcatgggagggatgtggactgggggccagtcttgtgggcttgtcttggtcctgctgctgttcttgggagtctgggtctccctcctcctgggcatctccttgctggagcaggggtccagggtgctggtgtaggctgggatgagacctccttctgtgtgtgtgcgcatctggctcctgggcccccaggcctgtctccggtaccccctctggctgggaggaggagcccttttaagctgtctgaaggagctattttaaggggggcctgggctaatgggaagtggcctcttttgatatacccagactccctggagacactgctccatcccctgggggcagggaccagcacttctgtatccctttgtcaggctcagctctcctgggcatgggtacaagagcagagctgccctttgggggcaggcaggaagtgaggctgagaccctggtactgaagtgtgtccccagtgcctgtttatgtcacgatttctcaggctgctcaccctggtgtctggagctgactggggtggccctgggtgatggtacttgctgtgtgcccacatctacgtgaagcccctgagaactggtattgttaccagtccattctgtgggttaggaaactgaggcccagagaggttcaggaacatgcccaaggtcacacagctcctccaaggtggagctgagattcacggcctgctgttggatctcagagcttgtgctcccaaccaccatgctttcctgccttccccttctgccctgccctggcatttcttttcctcacttggctcatttatgacaatctgccctcctcctggcatgagctcctcaggggacccatgcctgtcctgtgtgttgtagcagcagcagtgcctgcacctgctgcaggcaggagctcagtggcacttggcagatgggggtctggtggcaccaacatgtggcctctttcctggtggcaggatgggcccctttccatgtgcaatgggggtttatgaggttttatagctatgaggtcacgtcactgctagaataggccatggagcgaagagaagggtttcatccccattgctcaggtgagaaactgagtcctgagaggcaggtcacctgccagagctcatgcagttgggactggggattccagggttggggcccagtccttagctgccagttcagtgctggctgtaccccccagtctgtggagtatggggtttgatgtccctgtgtaccaggcagggttagatcctgggagctgggtagtgcatggctggacgtgcagccaggtagtgacaggtcagggtagcctgtgcttctgtgggaggtgcaggccctggggaagctaaggaacaaggccagactgggaggggaccaggcagccttcctggaagaggtggcagctcaggttggccctgaagggcgggcaggagttcgccaggcagaaggcatttggaggtgaggaggtgggcgtgtttttagattgccggagctggagatgaaagggtggggcttgtttggggaaccgaaatcagccaaatcacgcagccacagaggaggccagggaagctctagaggcgttttttggccaaggggtgagcagagatcgggcttggtgttttggggggtcctgggtaggtgtgggaggcctcgtttcgggggccacggggctcctgtggcgtgagactccatcacagtgacctcctgtgcccaatagctccgtaagggcagggtttgtggaaggaaggagtgagtgaccgggaatggggtcttgggctccagggacagccatggcgagggctcttctgtgtgggtgcaggtccggaagctggggctgtggttggtgggggaggctgggtggggctgcttcccctgcagaagggctcttccgggctcttggcgcggtttcacgaggcagtcccctctgtgtctctcgtgccccctaggcctggatcgggttctcaggaagcctcggggaagtgagggtcttagcgccttggtttggggctgggcactttgcgagctggtgtcatggaggccaaactgggggcctccgggccaggtggtggcttcaggcttgctgttgggacaggaggccaggctaggcagtgacgcctcactgagctccatgggtggcacgctgagctctgggtgggagaggcctctcccactgacctctctgtgactggcttctctgctggtctgagtgggaagggccctcagagaccctggaggcctttcctgccctggaggagtcaggcccagagagggtgaagaattgcccgagtcacacagctggtgacagggagagctgggactgtaccttacatcacctgacattcagcccagggctctattccctgcactgtggcagatggggaaactgaggcaggtgggccactcctctgcattccatgggagaggcaggaaattcgacaggagccctttgccgggttggcacttggagctgttttcctgcttgcttttccccagggcaaggtgcttcccagctgaaaactgcctagggagggtgctgttgagaccgtgagcacctgagagccctg

SEQ ID NO: 7052 - DNA, 6000 bp, Homo sapiens
ttaaaggactactctttcccaatctaaatgtcttggcattcttactgaaaatcaattgaccatcaattgaccataaatgtaagagtttatttctggattctatagtttattccattaatccatatgcctatccttatgccagttccacactgtcttgattattatacctttgtattaagttttcaaatcaggaagtgtgagttctccaactttcctcttttgactattctgtgggtatcacttttgcaggtctcactgaggtaggatctaaaccttagttttgcagtttcaggatcctttttttttttttttttttgagatagggtttctctctcttttctcccttccttccttcctttcgttcattcattcattctttctttcgttctttctttccttttctttctctgatggagtctcactctgtcacccaggctggaatgcagtagcacgatctcggctcactgcaacctccgcctcccaggttcaagcaattctctttcctcagcctcccgagtagctaggattacaggcatgtgccaccacacccagctaatttttgtatttttagtagagacggggtttccccatattggtcaggctggtcttgagctcctgacctcaggtgatccacccacctcggcctcccaaagtgctgggattacaggtgtgagccaccgcacccagccaggtctcactttttcacccaggctggagtgcagtggcgtgatcacagcccactacagcctcaacctcctgggctcaagtgatcctcccaactcagcctccctagtagctgggactacaggaacatgccaccatgcccagcgaatttttctctttctattgttttgcagagataaggttttaccatattgcccaggctggtctcaagctcctgggttcaagcagtccacctgccttggcctcccaaagtgctgggattacaggtgtgagccaccacatccagctagtttcaggatcttgattgtataagttttctccagaagtgaacaggtactacagcattgattcatattcctcaaacttgcaggaaaactccacaaatttacattgtcagatattcttttggtgacctaaaccaaaatgcttatatagggaattttccattccaagatgccaaattagttactaaaatagacatgcctgataaacatggaattggaaactcaggctgaggggaagaatacagtataatggttacaagttatagcctttggggccagacagttctaagtgtgaatattgtttctgccactcaatgactgtgtaaccagggcaagattttagactatctgtaaaatgggggcgggggggaatccctttctcaacgggcacagtggctcacacctgtaatcccagcactttgagaggctgaggtgggtggatcatttgaggtcaggagttcaagaccagcctggccaacatggtgaaaccccgtctctgctaaaaatacaaaaattagctgggtgtagtggtgcaggcctgtaatccaagctgctcgggaggctgaggcaggagaagtgcttgaacctgggaggtggaggttggtgtcccgggaggtggagattgcagttagccgagatcattccactgcactccagcctggccgacagagtgagactctgtcaaaaaaaaaaaaaaaaaaagccctttctcatagagtggttgtgaagataaaatgaaataacaaaatataaacctttaacacattgcttgggactaaatttcagtaaacgtatctattgtaggatgtttctttcaaggtgaggagagccactccgtcatagcacaggctttctggatacccaaatccctgtgtccagataacagggcctctttaattggaaagacattgagtaggaatggagacatttttttttttcttttaagacggagtctcgttctgtcatccaggatggagtgcaatggcgccatctcaactcagtgcaaccgctgcctcccagattcaagcgattctcctgcctcagcctcccgagtagctgggattacaggcatgcgccacctagcccagctaatgttgtatttttagtagaggtgaggtttctccatgttggtcaggctggtctccaactcctggcctcaggtgatctgcccacctcagcctcccaaagtgctgggattacaggcttgagccaccacgcctggcccggaatggagacattcttactctggagtgggattgagggacctagagagtgtggccaccgcttggctttagacagcccattgcctggtggaaatggtaggccagtgttgctagattttgatgttgttcgtgatattgattcttgctaacttcaattgcaaaatgtaatatttactaatttgacccctaaattctgagattcagagccaacctctgcaacattttcccagagtccccatattcagaaaccacagttactgagaatacctccaaaatttaagacagaagtgaacaccattcactgaccagtgaaaataaatgtcacaagaacttatgtacttaacacaggagaaccccacagaaaatctttctacaaaacctgagagtctaagctaataaaagtttatcgatgtccaagttcataatggcatagacgcatcaaaaaagtaggaaagaaggttgttaggtagaagaatagagaagtgtcagcccagtagtgaggaaggagatagcaaaaacagaagttcaaaacaaaacaaaaacacaaaaaccagcatcctagaggccatttattatagggacaaattttgcatattttagagaacattcactgattaaaatggcatacaataatgttgataattatagcactgctctttaatgaccaagcctaagtaattttcagagggctgcattcaagaaaacacgaacgttctctatcagatgatggggaggccgctcaagtttttcatttaagtgggatgtcattctgctgtgatgtcagatagatgagatgttactggccttaaatttgactcaacaagttgaatttgcaaactaaagcactatccaaataagtggtgtggggggccccagagataaactctttctgtgcattcttggtctaatatgtggttgttataagtatccttcagggaatcaaagttggaactgtaaccgccctttcagcagggtttcttcccagccctgtcagtatctcagctaaatagagttatgctgatccactctggagggccttcatggggaatataaagaatgaaattacttggcaaataccactgtgtataccgcagccattccattctggctaggcataaacaagcgcagtgtcgctccttagcggaggctgaaattcaagagatttctgtcaactgtgaacgtgaaatatcacctgcactggatcggaaatggtcaacagttttgaacaaacataaagtaggccgaccgaagttcaaacatttaattcttttgtctagctcacgttttcatatgggttttaaatttttaattcggtagaaagccagctaaggacctgaaaggaggagacccttagaattttagagctggaggacttttggacaacttgtgcagcctcttccttttacagaaggcaaaaccaaggccctaggacacgctaggatttgatgtaggtcactcagttaattcgtgaaggatcgagagggaacccaggttttccagtacgccccctgctcctaaaccagtatcaccctcccccacggctgtctctctctcttcttaaattcttgcgtttatttttctctcccttcgtaactgtgcaatggagaacgggagcctgagcctcgggaagacagggttgcaaccgcaggctaggtgcgcgctctcccctagctcgcggcgtggagctgggtctccgcggcgggcgccggctactgcaggtgctggcacctgggctcaatcgcagcatcatcgcgacacgctccgtgctcccgattctacagcacgggcgcgtgacacccgggtctccgcgcgaaaggagaacgtgggactaaatccacggctccttaagaaggacgtctttggaaactctcgcccttcctcggcggacccgagctgcccgagagatgccctgcatgtgagtgacctctgcgccgaccccgccactggtcagctcgcggctggggcgtgccctgccggggcctgacgtggcggcggggccgcggggcgggcggcgcgaggggagaggccgccgtgagggcgcggcctgacgtggcggccgcggcggggctgccgggggagcccggaccactgcactgccccgcgctccggccagagggcgcccggccccaagccttccccgccccgaggccgcccagggctccgggagtaaccgcgccagcgattgggtcggcggcgcggcggggccatgttggagcggagcaacgaccccgcctcgcaccgccctccgccctgggtcgggccgcgccaggagggaaggggagcggcgaaggggacgctccctcttaggcagcccgacgcggctggagccgcggcaggagcggcggcggtcacgaccgcccctccgcgcccgggccaatcagcggcgcgggcacaaatatgcaaatagcgcgccggtgctgccggagtgccgctcgcaggggctggtggggtcgcgctgggggagtgaactgggccaatcaggcgggtgcgtggcggcgcgggggaggcggtgccccttcactcctccctccactccctccctgccccgcgctgacaggggggcctggccgcgcagccggtaagtgccgccgccgccgccgctgccacccaccgcctcgggcgtggggaggaagcccgggggcaccgcggggcagcggccgctgctcaactggtggggagatgcgggggcgggtcgtgtcagacgggtggtcgcctgaggccgcccccgcccggccagccgcgagtgtcagtctcagtcgaggcggggggcggcgggggcgcctcagtcatggcgaagcgcgagagtcagcgagcggcggtgagtacgtgcagccgccgccgccgccgccgccgctgctcggccggtggggggaggggggaggggcaggcggggcggcgcccccgcctgaggtgagggatccggtcccggggccggggtcgggcgggcgggcccgcggggaggccgggcagggggcgctgcctgcacgtgcggcccagcccgcccgcggcccgccccgcgcctgtcatggctgcgggctgctgcccccgccccccggcccacagcccccggggtcgggacacggcagccgcgcctgttgcgtcgtgtggaggtgagggccgggcggccagggcgtgggaaggcgggccctcttccccgtcccgcgcgaggtcggggcctcccccgggttgggttccctcccgacggtcgggcttccctccatcctgcagcctctttccctgcccgtgctttctcgcctccgtgagtcatgacagggcgtcccgcgcgggcacccgacgtcccggagcacgggacgtccccggcgctttcccaggccttgcctctcggttccgaccgcagtgccttccccgcgatccttcaccccgagtgcctctccccgtctgcagcgtggcccggaccccgccagcccccgtgtgtgcggccgccgtcattttctgggtacctgggtgtgggacctgcgggatggctccagggctctctgcgtggacatccagcccaaagccaagcactacccggaaagcccgggtgtctcactggctgtcacagctgccagctcagactggtttctgtttgttcttatttttatttttaaaaaaaattttttttggggggggtggtttgcttttttttcttttttaagaaaaataaaacttttcagaacaaagtagatgagaattttgttgttgttgttgtgatattaacagtgctacagttactttcctgaaagtctgggatttgacgctattgtgacatttatttatgtgaaatattcatacctaagaattcccct

SEQ ID NO: 7053 - DNA, 6000 bp, Homo sapiens
gcctattgtcccctgatcaagacagaaagacagaatgaaaaggaagaaggaaggaaggaagggagggagggagggaaaaaagaggaaggaaagaaatcagggagagaaagaaggaaaggatggaaggaaggtgggaaaggagagagaaagaaagggactaagggagaaagaaaaaaggaagaaaggaaagaaaagagaaagaaaaagaaagaaagaaaaaagaaaagaaaagaaagaaggaaggaagggagggagggagggaggaagaggaaggaaagaagtgagggagggaaagaagcaaaggaaggaaggtaggaaaggagagagaaagaaagggaggaaaggagaaagaaaaaaaggaagaaagaaaagagaaagagaaagaaaagaaagaaggaaggaaggaaggaaagaaaagagggatggaggaaacaaatatgtaggcaaacctctcctcctttttttccttagtctcctcattggtgccatggaggtgtaggttctgatagcgtcctcagcggacacaggcccttggattctaaatgtgtcccagcccagctgttgtgtgtcagggccccagtgtctgtggggagatggccagagatggactcacagcatcagccattgccttttaccccatggcctgtgtcaccaagtgccatggtaagtggaagtgatggctccccagagatcacattagctctgataatgctccagcctcccatgcacaacttgccctcaggccacctggctgggcaggaagaagggctcccagagaagccacatggccccatggcggtgagtctgggcgagagatggagagagacgccttcccttttagcccagtcccagcctagtgtcctcactgctgacccccggtagtctctgaaaccacagatggagctcccagacttgctgattggcccccgtgatggcgtgcgcattaggaggaaatgcctccctccacccttgtagcaaacacttccagctccatgcccacaccccttatcatccactgttcctgccagtgcagacccaacccaatggcttcctgctgccagtacctggggctctgctgttagcctttctctggcagcaggacaggctcatccctcttatcagacaggctggacttgctgggaagttgacactctgggggcggccttcatggataaatactctagttttcttgcccctcaagtgagacaaccccaaggcgtgctctgtgcagtctcccgaggcccccaccagggctgagcacctgtttccccagcagcaagtgctccttaatctactttctcctggtttccttccctttgctgtctcacttctcctctccccaacgattgcttccaggattatctcctaaataaattacttgtattctaatctttgtttccagttgtttcttgaggaatccaatacaaaacgaaaccaatcaaagacaccaaacccaacaaaagaaagagaactcttctggttctgtattgtacatgtttctggagcaccatttaagtaacagaatacatcacgcactgtctttgacgctggtagggaggtctcacaaataactgtacaggcaaataaacagcagtataaaagaggagtttgactctgttgtaggaggtggttatcagggaaggcttcacagtgagggtgactggaggttttggaggatgggtaggagttctccaggtagaaaaaagaatgatggaaacagcatattaaaaaacccagaagtgtaaaaaagcacaaggtactcagggaaccactagtagtttagtatctctcatactactggagaataaagcatattttggaagtgataaaggatttgtaggaaaaatgaggagagaattagaatagcaggaggtgtggttaaatagccagagtcttgtctatactcctcaaagtgtttaggcattatcttggaaaggttggaggattttttaaaattgtgggttatctttttctgattgcataaatatcaaatgctcattgtggaaaagttggcatatacagagaagtatagagaagaaaataaaattacctcaaatccagagttaattaaatcacatttatgtgttggtgtgtttcagaggagtttcaggcagaggagtgaggtggtcgcacttgagttctaggtagagctctggcagctggtgacgatcatgcagctggaaagatactgaacgtggggtgaccagctaggaggctgctgcagtgaggggtgatgagggtcctctgttgtggctttgcagggtgtttcagaggtgggattctcagcacttgaaaactagttggatggggtgtggggtagaggagagaaggggaccatgactactagagagattctgagtgtctccaccatgacttggtggagggagcagaggctggaggccaggagacttgggttctcatttccactctgtgacttccaatctgtgggaccttggacaagtccctttagtccacagagccacagtttcctgacctgatacgtggaaagatgattctcttcctgctttccttacaggattgtcatgatcgtccaatagatcaaaggagataaacacctttcatgtgtggaaacctacagttctgagctcttgtcctcaaacctctgctcaatcttttccctcacctgccttctgtcatcttccccagaagccaggggaacccatacccctctaggtttcccttcctctcccctctgcatcctgcccagaggacatttgtcacgattgtccctctggtacagatgctctaaacaccgccacacaccaccattctttcattcattaactcattcacttcataggctggttgatgctctagtacgttccaggtgccagaacacgtgctgtaaaagacagacaaggtccctgtgctcatggagctcacataccacccaaggggggacataaagttaaacaactaggacaaattcggatagcgatgtaacaaatgaataaatagggtgataggatagagtgagcgtgtattttcgatttgagtcgtcgggaagggacctctggactgagacctgaacaactcaggcagagaaaacagcaagtgtaaaggtcttggggtgggtttgagcttaggatgtttacagaatggaaaggtcagtgtggctgggctgatccaagccccacccaacccacttagcacggccacctctctgaagcctccttggatcaacaggatgcttcccttgctgattcagctccaccctacttccacacatctgtggtcacaacacatcctgaccacactgggttgtgatagactctatacactggtctgggagctccttgaaggcaggggctatctcctctctagccagcactgttcacgcacacagcagatgatcagcatctgctaaagggattaatacattaatcaatagatgagtgaatgaatgagaaaacgactctcaggtccaaatggctcactcctttacttgtctaattgttaccttctcaaattccctgaccccgtatgcaaactgcagccccactgtccccccattccctcacccatcatataacgtgtgtatttattatgtttcccgtttcctctgtctccgccagcagaatgtaaactccatgaggtcaggaatctccgagttatgttgcgccagtgtaatccaagagcccggaacagtgcctggcacacagcgggcatatggaagaacaaatgtgtgaaggtgtgaatgaatgaataattgaaagaataaatagtagttctcagcctcacagaacacgggtcacaacctcaaatgacctgctaccctgcccataaataacagagatgcaggagtaagtgctgggctgtgacctgtcaacatgctaagccgctcaaacaaaactgcccaacagcccgctggccgcctatttgcagcactgggccctgagccgcacattcccatttcgttgataaagaaactgaccagatagtttaagtggcctgctgcggaagacagagctggtgctgcaccggtcgctgcttccccagtccttttttggcctcctttctgacgcgacgcagaccccagttctggagagtctgtcactcgctccccgtggtgggagatcagaggcctggtgtccttgggagcggcgagcggtgctcggcgcaggatagaaagggagtgcgcgcccgagtcccccagatccctgggaacccgcgccaccctcccgcccctgcccatccccggccgcgctgtcagtctccattagcgctaacaggctccagacggagcgggccgggcgctgggttaatgcaatcggcgcgttacctggggcgcaggctacattaccagcccggcccccgccaggcacggccagaaccagtcagcccgcgccctgccggccgccccgcgcctccagctcttccccggccccgcccgaacgccacacggcggagcccagccccagcccgcgccctagagcctgccaaggcgccgccggtcgggggccggcagggcgcaaggcaccagggatcccctcgccgccggacacgtgagtgcgccctgagcgcgggacagggctaggtctgcctgggaggcccgggccgagacgcgccagcagagggctagcgagtttgtagtgcagtgacgttaagtgtccgagaaggctcctgtggctgttgaagtgtcgcggacctgagctggggagggggtcggcacgctgccctcagcctcggtgagttcaatcccagccatttggggcaggcgagagtgggtgaacgaggaaaagtgctgcagggtcttcagccgcccccagagggctgtcagaagtctccaactcttgagttccggcgtgccccaacctctgtttccaaatttttccagcggacgcgcgcccttttctgggaaccctgcgtccgctcagcgcgcgctcatcccagtgtctaaggcgctcccgggtggtcttgggagttgcaagtagggaggaacggccgggtaaccacctcttttccctttatccaagcagagcctcggcgtgcccccaggaccggtaaagttcctctcgccagccgcatccatgcttctggcgcggatgaacccgcaggtgcagcccgagaacaacggggcggacacgggtccagagcagccccttcgggcgcgcaaaactgcggagctgctggtggtgaaggagcgcaacggcgtccagtgcctgctggcgccccgcgacggcgacgcgcagccccgggagacctggggcaagaagatcgacttcctgctgtccgtagtcggcttcgcagtggacctggccaacgtgtggcgcttcccctacctctgctacaagaacggcggcggtgagcgtggggtcgggctgggaatttgaatctgggaggtccactgtctgcagcggtggctgggacaggagctggaatacacacggaagggaggcgaggagacaggggcaaatctggggcgcagaaagaactggacagggctaacgggaaaaaaaaagattggagtcctctggaaggtcattttcccaggctctttgcagagtacctcgagctcattccagcggaagtgtcaggattgggcaccctggaagcaaaacagcagaagagtgaaatcgagtcatgaccctaaagtcatggtaggggtatggatggaaaggacagaatctggggtgccaggttgggtgggggagcctgaccttttgatggtctgctggaagggaggtggagattccaagagctcttgaaggggcaccagaagtgggtgggatttgacaaccaggcccacagtgaccctaaatctagcactctgagcctgggggcaggaacctttgggccagaagcagtgggaatacttcggttttctgaaggcacctggggaggccctgtggtcttggggatagaaacacacaagaagaagccagtatcagaaataatgccattctcagggagcacagcccaggtggaatcaggccagtaggtgccaagaactggcctggtcctcaaggcaggaggccc

SEQ ID NO: 7054 - DNA, 6000 bp, Homo sapiens
attattactttcattcaaatctcacccatccttcggaattcagctcaaattctacctcttccatcaagttttctctgactccctctcttcttttctcaatgtaatcataagtccttcagaaatgtattcgactttgggatagtcttttatttctgtgttttttgttagcatcctcattatatttgtaaagtcattgagaatagggtcatgctgtgtttatctttctattcctggcacattcgttgacctgtatttaacattttcctaaatgtgctataagcagaatcaccgaatttctctcttcttttttttttttttttaatttgagactgagtctcgcgctgtctcccagactggagtgcagtggcgcgatctcagctcactgcagccaccgcctcccaggttcaagcgattctcctgcctcaaccaccccagtagctgggattacaggtgcccgccaccacgcctgactattttttttctatttttagtagagatgatgatttttcactatgttggccaggctggtctcgaactcctggcctgaggttatctgcttgccttggtctcccaaagtgctgggattataggcatgaaccaccactcctgtccccaaatttctttaaaaggagctatctcaccaggcgataactcaagagagaatcacagaaattagattgccttttccctaggggaagaaaatgcaaaatcacactcctaaactttctttcttctgagtggaaagggataagatatcttaacgtcttaaggggccctgaggcttgtcactgcaggtgaggggaaaccacactactggcatatttgatttctcaatgcagctgtcacctcctgccttgctgcctcctttaatgcctatgttggttttacctgggcttgctccactggttagcttctccctagttgcaagactaccagatcataatcagttattatctcccatcctgatgtgtgaaaagctacagaatttgtgggacccagtgcaaaatgaaaatgcaaggcttctgtttaaaatttattaagaatttaaagataatagcagagcattaaaccaagcatggggccccatccactacatgggtcccacacccatgaagccagctttgatgaaaaaagggttaggccaggtggtggctcgcacctgtaatcccagcactttgggaggccgaggcaggtggatcatttgaagccaggagttcgagaccaggctggccaacatggtgaaaccctgtctctactaaaaatacaaaaactagcttggcttggtggtgggcacctgtaatcccagctacttgggaggctgaggcaggataattgcttgaacctgggaggtggagttgcagtgagcggagatcatgccactgcactccagcctgggcaacagagcacgactccgtctcaaaaaagaaaaaaaggtcagagccttctcagccgaccaaaaccacttgcagaaagctgagtgtggggacaatttatttccaaagccctcaacctctcatcttaatataaagacagctgagaaagaaatcaccctgtattgtgtgttatattaagattgactattgtggactgaattgagtcctccaaagagatgctgaagccctaaccaccagtacctgtgaatgtggcagcattgggaaatagggcctttgcagatgatggagttaagatgaggttattagtgtgggtcccaatccatgatgactggtactcttatggaaaaaagaaatgtggacacagagccagacatgcacacagggaagatgatgtgaagagacctacaaaaggagaacccatgagaagatgaagacaggttggggtgatgcttctatatgccaaggaacgtcaaagagtgccagcaggccgggggcggtggctcacgcctgtaatcccagcactttgggaggccgaggtggacggatcatgaagtcaggagtttgagaccagcctggtcaacatggtgaaaccccatctctactaaaaatacaaaaattagccaagtgtggtggtgggcgccagtagttccagctactcaggaggctgaggcaggagaattgcttgaacctgggaggtagaggttgcagtgagccaagattgtgccactgcactctggcctgtgcatcagagcgagactctgtctcaaaaaaaaaaaaaaaaaaaaatcggccaggcgccgtggctcacgcctgtaatcccagtatgttgggaggccgaggcgggtggatcacaaagtcaggagatcgagaccattctggcaaacggtgaaaccctgtccttacttaaaaatacaaaaaattagccaggcgtggtggcgggcacctgtagtcccagctacttgggaggctgaggcaggagaatggtgtgaacccgggaggcagagcttgcaatgagccgagatcatgccactgcactccagcccaggcgacagagcgagactccgtctcaaaaaaaaaaaaagtgccagcaaaccaccaggataggagaggggcctggaagattctcccccgaggcctcagaaggaaccaaccctgccgacaccttgatctcagacttccagtttccagaaccaagacaataaatttctgtttcttaagccaggagttcccaacctttttgacactagggaccagttttgtggaagacagtttttccacaggccagaggtggggtggggggggcattgtttcaggatgattcgagcacattacatttattgtgcactttatttctattattattacattgtaatatataatgaaataattatactactcaccatggtgtagaatcagtgggagccctgagcttgttttcctacaactagatggtctcatctgtgggtgataggagacagtgacacccgaagtatggtgcttatgtcaagtctacccattttggctgctgtcactgcagaaaaccctgcttcacagagatgggatgttgcaataggccaggcatggaggctcacatctgtactgctagcacttttggaggccaaggcagctggatcacttgaggcgaggagttcaagaccagcctggccaatatagcacaaccccatctgtctctactaaaaataataaaaattatatatatagccaagtgtggtggtgcactcttgtaatcctagctacttggtaggcggaggcatgaggcacaagaatggcttaaaccagagaggcggaggttgcagtgagccgagaacgtgccattgcacttcagcctgggcgacagagtgagaccctgtctcaaaaaaaaaaaggatgttggaaatgaaagcaggcttttcagtgtttttgtggccatctcaggattaaagcctagactttaacccagaacgtggagatttgaagttgtctcaaacatactgtttttttgttgttgttgttgttgtgtttttgtttttttttttttgagacggagtctcgctctgttgcccaggctggagtgcgatggcacaatctcggctcactgcaacctccacctcccgggttcaagcaactttcctgcctcagcctcctgagtagctgggattacaggcacgtgccaccatgcccggctaatttttgtattttttaggagagacggggtttcaccatgttggtcatgctggtctggaactcctgaccttgtgatccacctgcctcggcctcccagaatgttgggattacaggcgtgagccacctcgcccagcctcaaacatacttttaaggccaccagatgcagctgtacaactgaagtacatacacttgccattgtaaagcctgccaccagatgcagcttgtcacttgccactcactgatagtgttttgatatgagtctgcaagcaattgatttatgatggcctctgtgcagtgaaacctctctgctaatgttaatccgtatttgcagccactctcagcactagcatcagcaactcagctccacctcccatcatcaggcattcgattctcgtaaggagcacagcctagttcccttgcgtgcacagttcacaatagggttcggctcctgtgaggatctaatgccccctgatctaacaggaggctgagctcaggtggtaatgcagcgatagggagcagctgtaaatacagatgaagcttcgctggtggctcacctcctgcggtgccgcctggttcctaataggccagggactcatagtggtccgtggcccaggggggttggggaccccgtcttaagccatccagtttgtggcactttgttatggcagctgcagcagatgaatatacccaccaaccagaccaggctcctcctgttaccttcctgaccttgacaagctcctgacaacacctgaaaaaacagatgtcccaagggggttggaacaaggagggagccggggcaatgtcagttttgtttttcaagcctttttttttttttttttttttcctacagaggaggaggagggaacgcctacaataaagaggcctttatggtcccacttcaggaatcggagaaccccgccctcctcgtctcagccccaatttaacgggtgcatgtgtgagtatcttataaagtgacgcgttttgagggggactccagtgtgagcaggactgtggctgacttgtcaatcatcattagggtgatgtcccaaacgttcaagtctgaggcccagggaaattggcaacagctgcctggatgcctccatcctcccagcccaaggaaaatctggccttgctccttcgttgtctttcttaggagcacgtggagttctcctaggtgggcttgcactcggggtcgcccagccgttctttgagggttcgagtgggtaggcttcccctgtaggacgggcttccccgtaggtttccacgtggggccacagaggcaggaaaaggggaagtgggcactgacacctggggtgaaaaagggtgggggtgcggctttgtgaggaaagaatttgcagagactgctaaactggggtctgctaggataccccactccccaccccctgcctcgggcgccctcagccacccgagctgggggcctcgcaggtctcagaccaagctccccgcgcggcctgcagcgcacccaaacatggccaccgaacccgggttcccggggcacagccgcgcctctgggtgacgcagacgcggcgggttgcatcagcccgtgcccacgtgctcggtccgccctctgccacccggatccggacgccgattgggccacgttgggagagtgcctccgcctcagccaatgggcggcagccacagagcgttctgtccgcagagccgggcgcggggcttctataaaaggcgcccgaagcgggggcgcgcgccccagagacgtgaactgtcgttgcagagattgcgggcggctgagacgccgcctgcctggcacctaggagcgcagcggagccccgacaccgccgccgccgccatggagtccgagaccgaacccgagcccgtcacgctcctggtgaagagccccaaccagcgccaccgcgacttggagctgagtggcgaccgcggctggagtgtgggccacctcaaggcccacctgagccgcgtctaccccgagcgtccggtgagagcggccccgacttcccgcccctaggctgtggccccccgccctctgctggggatgccacgtccggctgccctgtcctgtggcctcctcccgctgacggctgcgatcgctcggccggtcacctcccccagggctgtggtctccccttccctgccccgccgacgcgggcgcccctctgttgcccagtagccgtcagtaatcagcagcctgaccttgggcgagtcatttcaccctccaagcctgtttctcccccagcggccaggcaactcggtgttcctaattgggcttgcatccaatggctagaagtaagaaaacatccgtgctgcaaaatgaggtttctgaacgcagcctctctgcagggagaggagcgggcaggtgccacccggggccgtggcttgagaaacctggggaccgcccagacactgtggacggaaggcccca

SEQ ID NO: 7055 - DNA, 6000 bp, Homo sapiens
agctgactgatgagagctgagcacccagacctccctctgccctggcaaatgacacacagctgctgtgaggtgactctgcgagagccagtctcagccctgtcagagggaaggagcttgagggtggcccatgtgctccaagggacttctctccagagctagcagcagggcccctgctggacacacaacagaatccaaggggcttttctgcaccttcagagaacgctttgttatgtggggccagacaaagcccactgaggagttaatgtccccccaggagccacgtggtccgagcctgtgactggtggactctgctttgctgaagtctggtgtaggtacagccgtgcatctttttttttttttttttcaaatcaaggaaggaacctcattttattctgaatgtgttagttttgaccgtcttcaccctgaaattttctctttgtttaattttatttatttattttttattagtatactttaagttctagggtacatgtgcacaacgtgcaggtttgttacatatgtacacatgtgccatgttggtgtgctgcacccattaactcgtcatttacattaggtgtatctcctaatgctatccctcccctctccccccaccccacgacaggccccggtgtgtgatgtgcatcttaatgactgggacacattctgaaaaacgagttcaggtgatttcgctgttgtgcaaacatcagagagtgtgcttacacaaagaaatctggatcgtatagcctgccgcacacctaggctgtacggtacagtctattgctcttaggctccatacctgtgcagcatggtactgtactgaatgctgtagccaattttaacacgacagcaagtattgatgtatctaaacatatctaaatacagacaagatacaataaaattcccatgtaaaagataaaaaaggagcctgtaatcccagcactttgggaggccaatgcaggaggatcacttgaggcaggagttcaagaccagcttgggcgatatagtcaaacccctccaccccaactatctcttcaaaaaaatttaaaaattagccagatgtgctggcacatacctccttgtggggctgaggtgggaggattgcttgagcccaggagtttgaggctgcagtgagccgcattcacaccacactccagcctgggcgacagagggagactcaatctcaaaaaaataaaaaagtaaaaaataaaaataaaaataaaaaaataaaaaatggtacacctctctatggtacataccatgagtggagcttccaggactagtaattggtctgggtgagtcagggagtgagtggtgagtggcctaggacgtcactgtatcctactgtagacttaataaacaccgtacacttagcttcactaaatttacttaaaaatatttttctttcgtcaataagaaattagtttactattagggtagtgcaaaagtaattgctgttgttgccgtctaaaaaaaaaaaaagccaccggctacggtggctcacgcctgcaatcccagcactttgggaggctgacgcggcggatcgcctgaggtcaggagtttgagaccaacctggccaacaaggtgaaaccccgtctctactaaaaatacaaaaaaaaattggccgggcgtggtgtcacgcgcctgtaatcccagctacttgggaggctgagccaggagaatgacttgaacctgggaggcggaggttgcagtgagctgagatcacaccgctgcactccagaacaaaactctgtctcaaaggaaaaaataataaataaataaataaataaataaataaaacacaattacttttgcaccaacctaatataacattttttataaagttggtctacactaccatcaccccaaacacacgagtaatggcttgtgctgtgacgtcacaatggctgcaatgttactagggcagaggaatttttagctccattaaaaccttaggggaccacattcatatgtgcagtccattgttgaccaaacagtcattttgcagcacatgactctatttatccatctgaccgctggctgcggtcagccctagggatcactaacccatcccaataggccccaggaaagagaaaaccacattcccgctcactgtattagagatggggttcccagcaggaaacagagcgaaccctgggaggccaattgaagagattttatgaagggactgcttcagagaggtgggctcctttaaggaaaccaaccactgcctgcacagaggtgggctcggatgttgaggtacccagagaccagcaacagcacttctgcctggaattcccttccctctcctgtcagtcctgtggctggcactcagatgtgggctgaaacgtccgctctcccagaggccttcctggcctcacaggctcagccagctgccccctcactctctgcagcacctcccattgtaattccctgaacatctctgatcgccagctgatacgtttcctcattgacttatttattttcctgttgttcccattactgcagactccccaagggagtgtgtcttacttactgcggcacccccattgcctagcatggagcccatcatgcagtaggcacccagcacctatctatcagctcagagcctgggcgctcaccctgttctgcccagagccctgagaactctccctctccctgtttctcgttttcacttctgtccattttactttgtcatctttgagtcacttctcacttgaggcaggaagaaagaatcaagacttgcactttctttctggacaaagaaggaaatgagccacagggtctgggtccagtgaggctggggcaggggtcatgcctgccgcctcccctgagtcagggaccagcttcctggccaggactcccaacctgcctcctttcttctccaagcctttcctcaccgccttcctcctgcctagagcatcccttcaagggcctcaagtctcttccaggttgaccccctcatttatggctgaggaaactgaggcccagaggggtcagggcctctcccaggcatatggcacttgcattctggggcctatccccaccctgggagtccacttcctccagggccagaggcaggaaccagaaggcaggggccgtcgatactaaaatcagtgggcccagaggtcagctggcccagcacagacaccctcagccctccctgaggtcagcctggcgccagcaaatcaggggaaatgttactagagtttacaaacctcttgtgatgtacagagtccagcctctccctctggccagacaggggacagtcaagggaggaggccatcccatccagcaccttgtagatccttgtctgtctccatatgtgagtcctggttccctctcccacccacctgttcttcctctacatcatcccaggagttgcaggtcagtaacacagggaccccagagggtggagagatagagtcagggctgagagaacatgctaatggccaaggtcacagcctgcactcctcgtggggctgtagagaaaacccctgttcctggaattcagaatgaagccaggccttgatctctgggtgatccacatccctaccccacagacctgccttcaagagtgtgcaacctgtgcaactgtacagggcttgcacttcaaagggcatcatccttggtttaatgttctgtcgccttcttaaaattcttttgcactgggccacacaaattatgaagccattcctatgaacccagaccctcaactcaccaccccacccacccctgctcttctgacagcaaagctgaccactcactgtaagatctggagtgaagggctggccctcagggttaagacagttggattttcctaagagccttctgaagacagaatcaaggcaaaattgtcaaaggggctttcaggcaggaagatgtttgccgagagaaggctttaaatcttaccccatagcagctgctgggacaagggaagtcaggaggaaaggatttgaacttccgggccagacaaccttggttcaaatcctggctgtgctccttacagtttgggtgatttcaggaatgttctgaaacctctctgttcctcttctgcaaaatgagggttataattacaccaacctggaagatgatggggaagattaaatagataagatatataaagtgcttgaaacagtgccaggcaaaaaataaatgcttgataaagattagctatcagacacttgggttcctgtctgagtcccaccacttactccaatgtgaacttaacatctgtgtgcctcagtttcctcatttgaacaatgaggataacctgagcacccaatgcctggggacttaggagctgccattggcatcagcctcacaccctcttcctggagaccttccccacaggccctcctctgggctcccatatcccctgcacttgcttccgtcctagcacatgtgactcgcaagtagaaatggtttccacgtctattttcaccctccccagttcggagttcatcaaggcatgaagggggtctggttctgctggtgtcagcagacagtgaaggatgaaggagtgaacagataaagggagttaggttccctatggaagctgctcacacccttaggcagtggccaccatatatgggcgatcggtcagagtggtggaagaaattttagggaaaggacgcaaaccttcttgaaaggtcagaaggttttgcatagcttcggggaagaataagcagaaggcagctgttctaccctgaggcagagggtgaggagtaggtacaaggaagtgtagggaaatttatcttaaatgcgcttgtttactcatgttgtcctaaaaccgacctttcatccgagtgcatgactgctccctgaaagggggaacaataatgttaattacccgcagattgtgtttgccccaggcttttggcattatatctagctgctcttatgtgaaatacctgtgtctaagtactcctttcatcgtcactggccagagtctgaatgtgtctcctctttccccagatctgttcctcctgggaagatgcagaggctcatgatgctcctcgccacatcgggcgcctgcctgggcctgctggcagtggcagcagtggcagcagcaggtgctaaccctgcccaacgggacacccacagcctgctgcccacccaccggcgccaaaagagagattggatttggaaccagatgcacattgatgaagagaaaaacacctcacttccccatcatgtaggcaaggtaaggctcaagccccaggacaggagaagccatcagcagctggcccatagtgacaagtggtggtggtgatggcgatggtggcaaaggtggtaatagatattgtggtggttgtaggagtggagatgataagggtgaaggtggtagcaatagtggtagaggtcgtggtggtagaagtagtggtggtaatggtagcaatggtggtggtagtgatagtgatggtggtgaggatgggaaaggccaaggtggtggtgggagtggtgagaatggtggtgatggtagtgatgataaaggggtaggtggtggttgtgatggtggtgatggtggtggtggctgtgatggtggtgatcacggtgatggtggtgatgataaaggggtaggtgttggtggtgatcacggtgatggtggtgatgataaaggggtaggtgttggtggtgatcacggtgatggtggtgatgataaaggggtaggtggtggtggtgatcatggtgatggtggtgatgataaaggggtaggtgttggtggtgatcacggtgatggtggtgatgataaaggggtaggtggtggtggtgatcatggtgatggtggtgatgataaaggggtaggtgttggtggtgatcacggtgatggtggtgatgataaaggggtaggtggtggtggtgatcatggtgatggtggtgatgataaaggggtaggtggtggtggtgatcacggtgatggtggtgatgataaaggggtaggtggtgattgtgataatggtgatgacagtgatgataaaggggtaggtggtgattgtgatg

SEQ ID NO: 7056 - DNA, 6000 bp, Homo sapiens
tatacccagacatggaattgctggatcatatggtaattctattttttttttcttaaggaactaccatactgttttccatagcgactgcaccattttacattcccaccaacagcacacaaggatcctaatttctccacatcctcaccaatgcttgttactttctgggttttaaaaaatcttctgccaggcatggtggttcatgtctgtaatcccaacactttgggagactgaggcaggaagatcgcttgagcccaggagttagagaccagcctgggccatagggagatgctgtctctacaaaaaaaaaaaaaaaaaaaaattagaaaattaaaaaattaggccgggtgcagtggcttatgcctgtaatcccagcactttgggaggtcgaggtgggcagatcacctgaggtcaggagttcaagaccagcctggccaacaaggcaaaaccccatctccattaaaaatacaaaaattagctgggcgtggtggcacccgcctgtggccccagctactcaggaggctgaggcgggagaatcgcttgaacctaggaggcggaggttgcagtgatcccagatcgcaccactgcaccctaacctgggcgacacagcgagactccatctcaaaaaaaaaaaaaaaaattagccaggcgtgatggcacacacctttatttccaactacttgggagggtgaggtgggaggatcgcacttgagcctgacaggttgaggctgcagtgagctgtgatcatgccactgcactgcacccctgctggggtgacagcaagaccctgtctcaaaaaaaaaaaaaaaaaaagtctgactgtttcagacccactccataatgaccaatctgaaccaagccgtttcatcttttgcctggataactgcaatggagcccccaccagcctccctgcttcccttgtcccttataattttctcaacatcactcctctgctcaaaaccaacagtggctgcctcccctggttccccaagtaggggccaaagttcttacaatggcctacatgctctacaaggtgtgatcctggccctcccatactctgactcacttcctacttgctctctctactccagccacactggctttcttgctgttccaagtaatctactgtctcggggcctctgccctgttttctctgcctggaatgctctttccaaagcgtggttccttcacttccttcaagtctttgttctaatgccactttatgagtaaggcctctgggctttcttgtttgctctccgagttcccatcattttctgcccttctgtgccctgtcctgagcctggggagaatgacccctctagaaagcaacctgggctttcttgcctcaggcttctgagtgggtttggtgaatgggaggtgccaccaggagatgaaaggcaagaggggagagatgctggggtattttttttccctgcactttctctgctctgctctgggcagtggctgtgccttcctcgatcacagctgcatttgggaatggatcccacacttccctgtccccttatccacggacttccaataacatgatttcctctctgaccttcagttctcaaagtagtcatgccttccagcttttgtttgtctctctggtgcctcaacacccctgttgtctgggctccctgaaccctgcccatttctctcgtcccttccttaagacttgaacctcccggctgggcgcagtctctaacgcctgtaatcccagcactttgggagatcgaggcgggcagattgcctgaggtcaggagtttgagatcagcccggccaacatggtgaaaccctgcctcaactaaaaatacaaaaattagctggggatggtggcaggcacctgtagtcccagctactcgggaggctgaggcaagagaatcgcttgaacccgtgaggcggaggttgcagtgagccgagatctcgccattgcactccagcctgggcatggcagcgagatgtctcaaaaaaaaaaaaaaaagtgcagttgctatggaaaacagtatggtgtttcctcaaaaaataaagcaggctggagtgcagtggtgtgatcatagttcactgcagcctcaacctcctgggctcaagctatcctcccgccttagccttctgagtagctgggactacaggcccgtgccagcaagcctggctaatttttttttttgtattttttgtagagacaggggtctcgctgtgttgcccaggctggtgtcaaactcctgggctcatccacccacctcagccttctaaatgggattacaggcgtgaaccactgcccactgcgccgggcccccctgtccttgttcttgtacacggtacatgttaccatctaacatattatatttccacgtattttttcactttcctctaccctccacactctggatggcaagtccgaaggcgcagggatgtttgttcactgttgtatcttaagtggttggcacatcgccggctgtcagcaaatgtttttgaaatgaatgaatgagtgaatgaccgacaaggggagctaaggggaaggcagcggtgcggtccgcgtcgcaggcagaagagctgactctccaatctccgctcctctctccgcccccgtccggaatgctgagtgcccgagaaggaggcggaaatgagcgcgctcaacagcccaccagccgggtgtttacttaattagggcctgcatcccgaggctcgtttgtgtttaaccgtccgcctaatggcttcgtctggctccgggcgggcgcgggggaacctgcgaggcgagcgtaggcctggccaccctgtcccgccgggggcccactccattgcgccgcgcgggtgcgcgtagacctgacctcccctcgggcataaaaagcgccctgcgggagatccaggccgggagggcgcggagctcagcgagcagccccaggctttcccaaccgcgtggtccacccccagcctcagtcccagccccagctgctgggctcacccgccggctaagggaatgctcccgagataccagatgccagttgctcgttgtaccctcagccatgaaattggaggattacaacgcttctcattctcttaattcaggggatgtggggatgctagaaagagagacggctcgccagacatctgagagcaataataccaggcagcatttgggcacttgctgtgtgccagatatgatgtttagcgttttaaaccttctaatttatttaatactcatctatgagagggtaaaatactaagatcataacagccccatttgacagatgcagaactgaggcccagggggtttattttacttccccgaggcttcagcgctactaaggggtgggacctggatttgaacccaggtggggccggccttaagggcccatgctaggcctgagagagcaagacccccaccctcgcaacgcaagcaatccatggcttagccacaggcctggcggggaggaggacggatagattaccaggttagccctggaaggtcaaagaatctgtcatttaaaactccaggctgggccccgtttctcacgcctgtaatcccagcactttaggaggccaagggaagcggatcacttgaggtcgggagttcgagaccagcctggccaatatagcgaaatcccgtctctactaaaaatacaaaaattagcctggtgtggtagtgggcgcctgtagtcccagctactcgggaggctgaggcaggagagtcgcttgaacctgggaggcggaggttgcagtgagcagagatgacgccaccgtactggacgacagtgagactccatctcaaaaaaacaaacaaaacaaaaaaacctctccagtctccagtccgttcctcaaacccctaaatctgagctggggacggggagggagaaggaccaggaggtggcatccagggcttctcaaggcagcagcagaaggtgaaggaggagtgaggggacaggtgagagagactgaccgggaaagctcagctccgtggggaagggcttgtggggtagtgattgagactcaggaccgttttcatggccagagcccacttgtgtgcagcaagaggaaagcacttcgtgtctaacgtagtggaatgagagtaacgtagaagaacaacgaatcccaggtctggcgtttatctcctaggaagggtgtgggagagctgttttccaagggagactctctggaggctgctttgcgcagcaagcagtttttacccagattatatacagtatttcagaccaatttcaaaacctctgcgttttaaaaattgtctttatttacattttacagaaagttgagaaagtgttatttatatggggggtaggggtgctggagattatgagactaataacaaccctcttagctcgcaccctttggcaccactacagcttccaaactctgggactttctcgactagcttccctttgtttagctgtgaaatggaagaagcggtccgggtgtggcggctcatgcctgtaacctgagcactctgggaggcggaggatcgcttgagtccagaagttcaagaccagcttgggcaacatagggtgaccctccaccctccccccgccccaccacatcgctacaaaaaatttttaaaaattagccgggtgtggtggcgcaagcctgtagtctcagcgggagctgagggaggagaatcgcttcagcccgggaggtcgaggctgtagtgagccgagatcgcgctactgcactcctgggcgacagagcgagaccctgtctccaaaaaaaaaaaaaaaagaaaaaagaggaagttgtatccaattcagaaacgcggtccttcgggacctgctagttttataccccggaggatcctccccggcgggctggcacgggaggtggagaaagaggcttgggcggccccgctgtagccgcgtgtgggaggacgcacgggcctgcttcaaagctttgggataacagcgcctccgggggataatgaatgcggagcctccgttttcagtcgacttcagatgtgtctccacttttttccgctgtagccgcaaggcaaggaaacatttctcttcccgtactgaggaggctgaggagtgcactgggtgttcttttctcctctaacccagaactgcgagacagaggctgagtccctgtaaagaacagctccagaaaagccaggagagcgcaggagggcatccgggaggccaggaggggttcgctggggcctcaaccgcacccacatcggtcccacctgcgagggggcgggacctcgtggcgctggaccaatcagcacccacctgcgctcacctggcctcctcccgctggctcccgggggctgcggtgctcaaaggggcaagagctgagcggaacaccggcccgccgtcgcggcagctgcttcacccctctctctgcagccatggggctccctcgtggacctctcgcgtctctcctccttctccaggtactccacagcctcgccgtggccccgaccgggaccgctccctggggggcgggcggggtccgcatggggcagtggcgtcggggagagcgcggggctgcgctccctggggccaagggagtcccggaaggcccgtgaggaccctgcggtgtggggagtgcagggccgggcacgcctggacccagcctccttcactctctgccctcgggcgcaggtttgctggctgcagtgcgcggcctccgagccgtgccgggcggtcttcagggaggctgaagtgaccttggaggcgggaggcgcggagcaggagcccggccaggcgctggggaaaggtaagatcctcagggtggaaccgcagggtaggggccgcacgtgaccattttggtgtggaccgcgcgaggggtgttcgggccggggcaagggactcctggcgccacctcagttcccggggaggcgcagaacgcgcctcgggggctgggattgggggtggtggctgacggagaaggctgggcagcagagcgcctatgacatccagccccttgtccggtagccactgcttaccttgaccccctcctccgagatgccggatggctgagcccctcacccag

SEQ ID NO: 7057 - DNA, 6000 bp, Homo sapiens
taacaccaggtccctggccctgcagatcagaaaaaaagagagtgctccctagggcaggccatttagggggcaaagccaattaattggtacaggcagggtgtttgttgtcctcatgaggttctatctggacccactgttggttaaggaggttttcatggactcgtgaggttgtgctgaaccagccccaccacctggaaaactccgtggagctggcggcgtgagaagggcaataagccttgggacacagttggagtctaagaaactaactaggcatgagatggtcctggcccagccccagggagacaaacttgcacccagagaagtcatgttgctgctgagtgaggacggaagggatccttccaaactggcttctccattccttgggcttctaaacaggtcacttacaagcagccagttggctggatatgactcagacacattatgtctggcctgtggagtgtgcatgtgtgtgtgtgtgtgtgtgtgtgtgtgtgtgtgtgtgtttccttcaacatttgaattaccaatgcttaaaaaaattaggagatttcacatacaaaatctggatttctggcttctcttgacaacagagcacctggccacatgaggccctccctccacagggagatgagcctctaaacggagcgtttgctctccaccaggctgatgcactcatttttgcccttgccaagcccctgcttattttctctgatgttgcagattgcaaatctgggaaggaggaaggatcagagatatcctcatctgcagcaactccaggggtctgtgatgcctctgggtgtgcaggaggtagcccagggctccagggttcataatgcaagagagacaagacatttttctttctttctttcttttgagatggagttgccctcttgttgcctaggctggaatgcagtggcacgatctcggctcactgcaacctctgcttcctgggttcaagtgattctcctgcctcagcctcctgggtagctgggattacaggcgcctgccaccacacctggataattttttgtatttttagtagagacagggtttcaccatgttggccaggctggtctcaaactcccgacctcaggtgatccacccgcctcagcctcccaaagtgctgggattacaggtgtgagccaccacacccggccaggcagttttcttttattcaaacactgatccttgaacttgctgtcactgagtgctctagagggatggccatgtagaacccgtggcatgggcaaaggatgctgctgtctggtttactaacacttgctgagcgcttaccctcagccaatctcttcaaacttcctatcagtccgcctagcaatcccatctgtgggatgaagacactggggcttactggcagactctagagccctcccctccaccaacctaaggcttcttctccatctttgtgtaagtaggaatggctctggtagggcccctcaggccatctgaagttcaaaacacattggcagctgggctggatagcatgcctataggactagctcctagggaggctgaggcggaagggctgctggagtccaggaatttgtttttgagacagcgtcttgttctgttacccaggctggagtgtagtggttcgatcatagctcactgttgccttgacctcctgggctcaagcaattctcctgcctcagcctccctagtagctgggactacaggcacactccaccatgcctggctaatgttttttttttttttcttttcttttctttttctttttttttttatttttattttttgagatggagtctcactctgtcgcccaggctggagtacagtggcataatcttggcccactgcaacctctgtctcctgggtttaagcgattcttctgcctcaaccttcccagtggctgggactacaggcacgtgccaccatgcctggctaatttttgtattttttagtagagatagggtttcaccatattagccaggctggtctctaacttctgacctcgtgatccgcccacctcggcctcccagagtgttgggattacaggcgtgagcctgcacccggccctggctaattttttaattttaatttttgtagagacgggggaagtctcgctttgttgcccaggctggtcttgaactcctggcctcaagcgatcctccatcttcagcctcccaaagtgctgggactacaggtgtgagccactgtgcctggccaataatgtaagatgggattgtgtggagtaggtgtgcctggggtctttgcttgcctgcggggactgaggtgtgaggtctgtggcccagactgagcaatggtgggcaggcaagtccctgagcccctaaaacttgcgagaggagaagtttatagactgcagctcaggtgcctataaatttgttgcagcttgggaagaagtgatagaaattatatcaggtgtatttggaaaacaggtaaactctgttttttggttttttttttttttttttttttttttttttttggagacggagtctcgctctgctgcccaagctggagtgcagtggtgcgatttcagctcactgcaacctccacctgcggggttcaagcgattctcctgcctcagcctcccgagtagctgggattacgggcatggtgcccgtaacgccgaaagtgctgagattacaggcttgagccacggcgcccggccactcattttttaaaaactagttattaattataatttctcttcaagttttcctgagatgtaaaaactcatcgccttcagctggttctaaacttcttgtctctgctaacaactctcccccctcctcgatctcaccccaccccagtgcaccccaactcacttcatctcactttactcgagtctagcactatcttttagggacctgaaaactactgtcgataaggtcagttgggaatttaggaggtcatggatgtcggaaataaaggtgtgaaaaagaagaggaggaattgttttggctttaagacaccggaacctccaaggttcctacaaaaccgtttgcagcttttgcaaaccgccttaaagtcatcagcgccccactgcggaattcaaagctaagctgtcacaattgttaacaccttctttgaccagcctttttacatttgacaattctcttcagcgcctctttcctgccagcaggaaggttttgctgccttggctttcgggagccccctagacagcgaactgccccttcgcgtgcagaagtcggggaagagtgctctcagctcgccttccttgcagggtgagtaggttttgcgggttagagagcggggcgtgggggcggggagggagagtaacaattttggaagtccctgcgtggtatctggaaagttaacgacgcttcaggttctaggttgagcccaatgaccgtcttgccttggcagctggtcccagggcgattgcagagccgcgtggccttcggccccactcgggggacccagcttcggagagggcgcaggggctgcgagtcttgcgagccggagccgcgtccacccgggactaggcgtccccgccgagcgctggcttgtggcgctccctgggaccgcgcggggtcgggggtgcgcccgcgggggccctcccactctggtcaactttcccggccccagggccgggggaggcgcctctcctggcgggcacgcgccgggtacttaagggcggctcggctgggcaggcggcagtcggagcgcgcggcggcgcggagcggagcgggaggaggggcatggagccgccgcgggcctgctgagctccggagcgcggcagccggcggcacggtgagcgcgggccggccggcacccaggaggggagggccgcgcggggctgcgccgaggccggggcgcgccgggtggcaggggtgcctctcgccgagccccccgcacccggccagctcccagccctgcgggcgccgcgtccggcgcggggaggcgggttgggggcggcggcagccccgggcttcccggcggccgttcctgcagccccctccccactgacccctcctccctttcttcctgcatcctctcctcttccagcctcgcctccctcctccccggcggctcctgttttgtgaatgaattaggaggcggacgccggtgcggggctccaggctggctggggtacccctcccccgcaccttctacgacctcccgggggtttgcacctgtccgggcaccaaggtaccaggcgcccacgttcctgcgggttagccgggccgcggcagcacgtgtccgggggagtgggctcccctcccctggccggcctggaggggcccggagggcggccgggcacaagaggaggagccccgttgggcgcacaagtttccatgccgctgcgtgtggccctgccgcggggcgcacctgtcagcgggagagacgctgcacaccagcagcccctcaaagtttcggaggcttgatggagaagcgtgcgtccttgactgggggttctccttccgtagtcctgggagccggacttgagagcgcccccaaccttgtgcccttgaaagccgagtgcgcgttagtttgcctgggctgggctcccgtggatgagcgaagggcatgaggaggcggcggtccaggctgtaggatcaccccacagcctctgccggcttggggtgacacagccccccgccccaggtctgggcaggagaacctcgaccacagcctgcaccagcgcctgattgcacgtggggtatctggctgagggacattttgggggcctctatttgggggtgggggtagtaacctgggtaatgcctctaattcctgcgggggaggggtcccgcccagggaaggagagggccggctacaccggggatgcgcctttgtctacaggcacactttgccaaggtagctggggtaccaggaagagcagggcctggtccgactgggatcccttgggttttccgttccttcccggttgggtcgtgggaaagcggcacgtgggtgtggccggcgccgcctttgccaagaggcgaggctcgagcggggatgagaagcgtggcgagtgcgttcgcggctgctttgacctggtgggcgccgcctccggcactgcaccgaggcggggcgccagcgcccaggttgctgggctggccttggcgcccccttcccctacccagagcgcaggcaggcaggggggtcccgccgcgccccttcagcatgtaagctccggaggggaatgggggcgctcctaggctgcggatgcaggcctggggactcctgggccgcaggcgcgagcagtagggtggcaacagggagggctgggagtcctgtgaaggaagcacacggcgggctccccgggacggtggggcagagcgcccggaggccgcgcttcccggagaggctaggctgccagcagctcttttcgggccaacgctgctggaaggctgctagtgccggagtctcaggtcgatttaggcagtgactgcgtgttcttcgtcccttctacgtgagaggcgtcccgacaggaaagtgtgtttgttttgggggctccgtttcctgagacctaagagttggagcaagcttggaagcgaggcatcattgtctgtagacctcagtgaacatggggttctctagatcaggcaggtggcagagaggagatagtgtgggtcagaatgggaaggccggcagccatccttgccaccttttctttcccctccctcacatccccctccccacctgctctggaggaaaccacagtcaccctcaccactagggtagctcttcggggccggaagtgtttccatttttagggaaatgacttacctgagacatgaggcaggaatccattagaactcccattgtgctatggggagaccaagtctcagagaactggggcaaggtcaggcagccaggaggcagaagtgctgtcttaaacccaattctctagtgccaagtcctgggctgttataaaatacagctgtttccaacaggggagatgttaggagccctgacttagttgcaaatggaaaccgggcattgtttccaggagtggctgggcagggg

SEQ ID NO: 7058 - DNA, 6000 bp, Homo sapiens
gatagacttttttactcaatctcatttcttgggaatccatccaaattgtacatcagtagtctgttcacttttattgcagagtagtatttggtgatatgtatgtagcacagtttgtttaatcactcacctgttgaagtgaggttggactgctatgaacatttgtgtacaggtttttgtgtgaacataagtttttatttttctggaataaatgcctaaatgaaattgctgggatatatgtaaattgcacgtttagttttacaagaaattgctaaattgctttcctctaaatttgtgaattgattttcatgtatttgagaaaagtgatcatatagttatttcaattttctctatgtctgtgacaatttcctggtttaattctcattttgtatacttatactttctccataagaataggtagtgggattttttggttataatttattgtcttttttgttttgaagaactagatcgtagattgattgattttgttgttattgcattttctaactgattagctggcattttttttaaaaccaattccttccttgtgctttcctgatgtttatttcattgttttttctaagttgagtgctacgtaatttattttcattgcccgtttttaataaagaaattatctaaggcttttgaatttaaggctctaaattccccatccttaatttagctattactgagaactggggccgacctgaccatgggaagtgggtttacttggcttagcagtggggaaggaactgagggtgtccagagcctggcagtctggcaagacccatcattcgtttttgttgttgttttaattcagcttttatttagatacagggggtacatgtgtagatttgctacatgggtatattgcacccaggtagtgagactagcacccaacaggtagtttttcaacacatggtcccctccctttctccccactcaagtagtctgcagtgtcagctgttcccatgtttatgtccatgtgtgctcaatgtttagctctcacttataagtgagaatatgtgataactgcttttctcttcctgcattaatttacttaagcttatggcttccagcttcatctgtgttgctgtgaaggagatgattttattctagtttttggctgcataatattccatggtatatatgtatcacagtttctttatccagtccaccactggtgggcacctcgattgattccacatctttgctattctgaacagtatggtgatgaatatatgaatgtatgtgtctttttggtataaaggtctagttgtcctttgcatgtatacccagtaatgagattgctggatcaaatagctccgttttaagttctttgagaaatatctaaactgctttctacagtggctgaacccatccttcttaataaggttatagactttcatttcgaagcagttagttggttttgatatttttctgaagatctgtcttttctcattgttttccactgcgtatcaacagtgggcccttaacatccagtggcaaatatgccctttcccgactccccaatctctacaaaaacaaacaaaatcccacgtgaatgcaataaaacatgattggctcctacactctgaaactgtgaatatttagttggaccagttatagaaagcaaaatgttgaaagcaaaaagtgaaaaatctaactggtgctcaagtcagaggatttgaacgtgagatgtcacaggcaggagtcaagatgattcgcatacgtccagtgacaggtacagtgcttgatacgaagattttgtttccacaattccaaatcaatttatcacactgactaattttcgaggtggtgcattaaagacaggcatatgaaaaatccttgatgagaacacacttttctttgcttaatggtattgggaggtataagaagaagggatggattattttaagtacctactctgtactttttaaatgttatgtatggtataacatgaagttcttgcagttctgttgtgaaggggatattttcatctgcactttataggcagaggtacatcaagttgaagcagtatgtatcagacctcgggaagtaccagagcaagaatttgaggactggcctctctgaatccagaccccatgttttcacaatgcttaaataggtcactaacaaagagacaaatgtttgattacaatagatggttaagcacacagccatagcctaacaataacaaaagtacttcattgaataacacaaaaagcatgagcaaaattaaagatgaacataaaaacagaaaaagcaactgaaacaaatatgtttggccaacaatgtatataatatcgtaattaatttaaattatgtttctaagtggaaaaacagaggataatgacagacaatttgcaggtattgagaatggataacaacatatggaaaacattgtttgactgcattaatcaaagcaacgatataaatacacaactactacaatttgttcacttagtaaatcagcaaaccttgctgaggtgtgtgtgatgaaatggagactaaattgatattatcattgtggaaaaaatggaaatatgtttcagcatctttggatatattttttaaaattaacttttgatcctctaattctcctagatatctattttaaatgcatatatatatatatatatatatatatatatatatataccaaactccagaaatgcttaccccataaagatgttcttttcactattcctgatatcaaattaggtgacatggcgtcacatatggccaaattatctgtcaataaaagtctgtaatgtgtgcagatttctagatctctgatgctctctttactttctaaaaaattattatttcttctaccccttcacctttgattggtctctttgtcttaatatctggactttaaatagttgctattaaacctctaaaatcaatcagcccctggctgttctgtcattagaagttaactgccttcccattaatccattaattgtgaagattaattggaaaagctattcaaactcaggctataacttggagcatgtaagccagtgtttgcctccaaatgaaagcttaggtcaataacatcacagagaattaacagttatatataaattctactcatgtctcctataagagaaaatgcatagaaatttataggctgctgtctaaatgaattacttgacaattagaaaattatccctgtcttagtagtttagctctaggaaaacatactgatagttacttgttttaaattgcaggaacattttttttttagatttaagccaatgactgacagaattagaagctcatgtttgtgttatttcaaatatctaaaaccaggattctcaagtaaatgttaattttcatgtcaatgtcaaattaatacttaaagaagctaaagaactgcatagtagtctacactcgtggcatttaatcgagttgaaatatcattttaggtaatgatgagaggatgagagacgatgccaggattggctcatatttcatcacctatgcttagaaaaattatattttattcaatcctaggtgtattgtcagttttccctaaacttattctctttctcatcagaatgtgacagtgcagcagcttcctccacacaccgtcaggcaccatggctactacatagggagagaggggtggggtgtcacaccacaaaagttccttcagtccttcgggctgtgttccttcacagtcccgtgaaacagtatggaaagcataaggacattatgaaaggaacaatgctcatcactggacagaaattaatttgcagctctattttagtggtttccagactagcatggttctggctgtgggacacaatcatgggaaatttgacatctccccgaggtgatgctaccaggcagttaggatgaatcactgaagatgcacactacagagatgcgacaaccctgcaacctggagctaagccatagaattttatttttatttttaattttattttagagatggggtcttgctctgttgtccaggctggtgtgcagtggtgcgatcatagctcagggcagcctcgaactcctgggctcaagagaccctcctgcctcagccgtctgagtagctaggattccaggctaatttttttttttttttaaagagatggggcttgacatcttgcttaggctgatcttgaactcctggcctcaagagatcttcccaccttggccttgaaagtgctgggattacaagcatgagcgagcacacctggcctataatactttttaccaggtggctgatgctgctttttaaacatacttgtgtcttctgggtgcttaaaatggactttggtggctcttttttggtgttgagtgtagactgtacagctgcagctgtgaggatgagatggcagagctgggggaaagctccagggtatggagataaatgatgcccacccaaaggaaatcaagcagaggctgtttatttagagtttgctgcagcaaggtggttggccaccaccatttgagtttggcagagactcaaaggcaggcagaggagaggaaactttacactggagtaaaggggcaggctcaggtatgccctggttggaggccttggctaggggaggctgtaggcaggctgaccagaagtggggcatcctatgggattagttagaggtatacatttggctttctctatacttagtaaaatttctaaatatttcctaaacatattcagctggttctaaattggaaacatgggcaaaaatgagggaagctgtaagttattaagtcctggctatttggggctgataggatttggctgtgtccccattcaaatctcaacttgaattgtatctcccagaattcccacgtgttgtgacagggacccaggtggaggtaattgaattggggtttgggcggagggggtggtccgggctttcccgtgctattctcgtgatagtgagtaagtgtcatgagatctgatgggttgctcaggggtttccgcttttgctgcttcctcattttctcttgcagccgccatgattctgaggccttcccagctatgtggaactgtgagtccggttaagtctctttttcttccccgtctcgggtatgtctttatcagcagcatggaaacggactaaaacaggggccagttgctacaggagttattatttggcttcttgcactggttgcttcagacagaagtctggcttcctggactggctcctgtagatagtagtttggcttcctgggctagttgctacaggttctgttttttgcatgcagactggccatttgccatttgtgtattcagtctctcgttgggcaggaaacagaggtacatcaggtactgggttgtgtgtcatggtagggcgaggagacaagacgccacctgggatcctgaaatgaacctgaaatttgtagcagtagcccagactgggtttatggttacagtacaatgtcattgtcaaaatttctgaatgaaatcttgactaacaagtaatattttttgatatatgcaaacataattccatactttcttaaatatgttgatgatttctaattttaactggatggaaattgtaatatagattggaataaaatgttttgttcaggaaaatagatgtcttgaagggaaggccattccttaatcctgtatctgtcaatggactatttggaataggtctaaataaactattttctgatgggaacgagactccaatctttccaaagcttcctgtcaaaggtctcaccctgcctctggtgtatgaggatttttgatgatttaaactatgtttgctacctattctatttattctagtctgttctgtaatggatatttttatgggacatacgattcattagcaggcatgcaactaattttggcatgtcttccaaataactgagaagatgactactcagtggcaactaagctgaatactgctgaaaatcagccctattttttttttttgaaaagtatattttaggtcaccagtgcttgtttcaacaaagtactggttcagaatagaagatctggcacca

SEQ ID NO: 7059 - DNA, 6000 bp, Homo sapiens
tgacatctttgtcgaaaacgagttcactgtagatgtatggatttatatctgggttctctattctgtttcactgatctctgtgtctgtttttatgacagtaccatgctgttttggttactaaagctctgcagtataatttaaagtcaggtaatatgattcctccagtgttgttctttttccttaagatagctttggctattctgggtcttttgtggttccatataaatttttaaattgttttttctatttctgttaagaatgtcattgttattttaatagggattcgattaaatctatagattgctttgggtagtatggacattttaacaatattgatttttccaacccatgaacatggaatatctttccatttttctgtgtcttcttcagtttcttgcatcaatgttttatagttttcattgtagagatcttttacttctttaagttaattcctagatatttaatttgcagctgtggtaaatgggattacttaattgatttcttttgcagattgctttctcttagcatatagcaatgctactgatctttatcatttgagtttgtatcctctaactttactgattttgtttatgagttctaatagctttaggtggagtctttaggttttttcagatataagatcatatcatctgcaaacaagaataatttgacttcttcctttccaatttggatgccctttattttttactcttgtctgattgctctagctagaacttacagtattctgttgaatagtagtggtaaaagtgggtatcctacgggaaaagctttcagtttttcatcattcaatatgacactagccctgggtctgtcatatatggcttttattacattgagacatgttccttctatacctagtttttttagggtttttattatgaagagatgttgaattctgtcacgttttttcagcattaattgaaatgatcatatggtttttgtctttcattctgttgatgtgtcacattaatttgtgtatggtgaaccatccttgcacccttgggataaattccttttggtcatgatgaattttcattttaatgtgttattgcattcaatttgcttgtattttgctgaggatttttgcatcaatagtcatcagtgatattggccagtagttttcttttttaaatgtgtctttgtctggttttggtatcagggtaatactggcctcgtagaatgaaagtattccctactcatctgttttttggaattatttagtaggattggtatcgcttcttcgagtgtttggtagaattcagcagtgaagccactgggtcctgggcttttcctaaccggaagactttttattatggctttgatcttattacttgttattggtctattcagcttttggatttcttcatggttccatcttggtaggttctgtgtgtctaggaatttatccatttcttctatattttccaatttattggcatatagttgctcctggtagccactaatggccctttgactttctgtgatataatttgtgaagtttcctttttcatttctgtttgtatttatttggttcttctctctttttttcttagcctggctaaaggtttgtcagttttgtttacctttaaaaaaaaatactcttgtttcttaagacaggcctatttaaaaaaatgtctgatatgtggtaaatacacaacataaaatttaccatcttaaccttgttattttttccaagacatggtctcattctgttgcccaggctcgagtccagtgctgcaatcaagggccagtgcagcctccacctcctgggcttaagcaatcgtcctgcctcagcctcctgagtagctgagactacaggagtctgccaccacaatgggctaatttttaaaatttttttgtagagccaagatcatgctatattgcccagactagccttgaactcctgggttcaagcaatctccccacctcaacctcctgaagttttgggattacaggtatgagtcactgtgcctggccttaaccattttgaagtgtacattgtagttgcattaagtatagtcacactgttgcacaaccatcgccattctctatctccagaattctttttttttttcttgagatggagtttccttcttgttgcccaggctggagtgcaatggcgcgatctcagctcactgcaacctccgcctcccagcttcaagcgattctcctgcctcagcctcctgagtggctgggattacaggcacatgccaccacgcccggctaattcttgtatttttagtagagacgggcttttgccatgttgacaaggctgctctcgaactcccgacctcaggtgatctgcctgccttggcctcccaaagcgctgggattacaagcctgagccaccaagccctaccagtttattataaaggcaaaggataccgatgaagagacgcatagggcaggtaatgggggaaggggcgcagggcttccatgcccaatgctgctatgaacatggttgttcaaacatctccctggatgccactctccaggaatatccccacgttcaggtacgtgaaaactcactgaatcctatctttgggtttttagggaagcttcatgacatcattccttcccccagattatagggtgggaccctctcatgggagggtcttaagacccacagtcagcaaagcgggttacattagcatctccagtattcttttcatcttgtaaaactgaatctgtctccattaaacactcactccccattccctctccctccagcctctgacacccaccattctactttctgtctctatgaatttgactagtctatgtaattcatatgtggaatcaacagaatttgtctttttgtgactggtttatttcacttaacttcatcctcaaggttcaacttaaaggtgtatccatgttgtagcacgtgtcagcattttctttcgttctcaggctaaatagtatttcattgtgtgtgtacaccatgtttcatgcattcattcatcccttgaaagattggtgggttgtttcctcctttttgcttttgtgaacagtgctacgaacatggttgtacaaacatctcttggagccccactagcagttcctttgggtatataccccaaagtggaattgctggatctggtagctccctttttaattttttgaggaatcgccacacagtttccataacagctgcaccattttacattcccaagaccttttttttttttttttttttaagaagaaaagatgtgtttctgcatttctggaagtctatgctgcatttccatttgttgaaatttaagaccagagtcgtcttttctgctgtaattataatggtcactggcttgtgccttttcctcctctctctgccccatctgcacggggtctttgaacaagtcccagcaccttggtggacaagcctgtgtccctggcccatcatggaagccgctgcctttcagagtgggagtctgtaccctgttgcctcattccttgctgcgcccatgagtgagcttgtgcctgacctctccttccaggtggacttacacactgggctgtcggagttctcggtgacgcagcgccggctggcccatggctggaatgagtttgttgctgacaacagcgaacctgtgtggaagaaatacctggatcaggtaggaccagaggtgtcattctttgcattaacatgcataagccagcgagggtggggcagccattccatctttcaatgttgatggaaggcatccttggacagctcccgcccctttcacgctgccccagccagcctgagcatcagtcatgagcaaatcaccaactcccaggcaaccgcgatcaggaaaaacagtgatcactttcgtagacagttgagcaggccccgggccccacgctatatgagtaagtgaataagtaagcatgcgcttactaatcctcctcctaatcccgcctttgcacatgaggaaggagaagtgcagaggttgaaagatttccccagagttgccaggtttagcaaataacaatataggatgccctgttaaatttcaatttcaggctgggcgtggtggctcgtgcctgtaatccaagcactttgggcggctgaagcgggtggatcacttgagcccaggagttcaagaccagcccggccaacatggcgaaaccccgtctcttctaaaaatataaaaattagccggatgtggtagtggatgcctgtaatcccagctactgaggaggctgaggtgggaggattgttggaacccaggaggtggaggctgcagtgaactgagattgtgccactgtgctccagcctggacaacagagtgagaccttgtctccacaacaacaacaaaaccaaagtgaatttcagatagataaacaagaagcaatttctagtataagtgtgtcccaatacagtggacgtgcttatactaaaaacaaaaagttccttgtttttctgaaatttagattttactgggtgtcctactgtaacctgagcccaaagtcacatagctgtgaggagcagtgcagagcagtgcagccagggagctgcacccagagccccttcccttgctagctgctgccatcggtgctggcgcggtgctgaatgaatggcacacaatcaaatgcctggaagccactaagaaggggaaagaaaaaactgcaattgacatggctccaagttccattctagaagtcggcagtccctgccacctttgcaggaccagttcagaaaggctcagtgaacaggcagaattttccaggtgcctgagggcatttagatggccttagatccccttttccagccttttgcatgctcttggccccatccctgacatccccttcttcattctctggcccctgggctgccccaggcttcaaccgccttcctattggctctgtgtttacagcttcctccattggtcgattccggaaccaatcacagtcccctgggcagcatcctctgtctccactctccttgaggtcccctccctgatcaaggctcagttctcagtgttctgggaatgttattcatcgatgcgttttggcagcaaaataggcttctgggtatgtaggtggttctggctagcccagaagcttcctaaaactgcagggctgagaagaggcagtggaggctcccggaagttggggttcagggaaggaggccgagacatgggctgtgagggaggagctcccctctgcggctggagatctctttgctctgccctggcaccccttccactaggacccgctcccccacttcccctggttatcctccttcctcgttcccctctgctctgtcgaaacccaccgtgaacatcttccttctcaccaaggatcctcctccagcctccagccagggtgttccccaaaatgaaatctcttaaatttcttgagagcagaggacctgctcattcatcttatagcttgtcggttcagcaatgcatctgtgggaatccttgtaggactggacgggagctcctgacggctgggttttcctgcccttgcgtatacgggttctgtctgctctcccttattaattccttacatgtgttgagttcctcctgcatgccaagtgttgtgattctcctatctttcccccagtgacagggaactcatcacctcacaaggcagccctgttcctctgtctcaggagtctcaccattaggaattctaccttagcacggcgtaaggctctggacgggatggcagggaggcactaggctggtgctctgaggaggtggcatctgggcagagatctgagtgaaatgagacggaaagccatgtgaggatgtggatggagggcgtcgctggagggcagggtgcagagtccctgaggggacaggagcctggcagcctgggaatcaaggtgcccagaccaggtgcattattattattgttatattctgggatagggtttctctggtgtccaagcaggagtgcagcggcataaacacggctgactgcagcctcaacttcccaggccccagtgatcctcctgccttagccttctgagtagttgggacc

SEQ ID NO: 7060 - DNA, 6000 bp, Homo sapiens
aaatacacacactttccaggaggctgtttgcaatctgaagagggacggatgggtgaagacagtgttttattaagagatggctcctgggtagaagcatttagcccgatgtgggtttcagggaaggcttctggaggaaactctccagggtcttttcattgccttagtagagtctacaccctgcctggttagagctggtcttgcctgcctttccgatcttattactgactgttgtactcaaaacccaaaaactaccatcagaaccacccatccccacttgctcactgccccagccccctggccttactccattcctcccgtagagccccgagttgtgggtggtcgctcctgtctaatcattcaccctcgatacaaatgtgcttttagaacggcctctcctgaccatcctttctcaggaagctccctgtcacctcaccttgctgtgcttttccttataacactggatgcctcatgaatgcatgtctatttgagtattgctgtctcagcctcttagagtgtaagccttttgaggccagggagcctgcctgtcttactcattgccgtatctccagcacataggaggcagatgaagacgaactgcaggctcttagacaagtcttctctgttaagttataacttacgtaagtcatacatgaataatacatgaatgtgttctcaacataagatattaaagcagtctggaataccatcagccgtcactgaagtcagttgggatatttgtgtggtgatgcacctgagtaaggggtgcccagatataccagatctccccagcagaggctcaacagaaatccgtccatgttgaagcggtgacaaacattccttacaatctggagtctttgtttttctctctctctaaaagaaatgtttggtatattaaccattgattttcccttaattgctgggggaccaggcctgaagctctgaagaacccctgaaaccatgaattggccattcttattctggaagatgcaattttgaggtttgcatgcgccaaggttttgagggtttacgtcgttataatagctttttccccccagtctccctgtcatggcatttacaacagctttacaagatgtaattcatataacagtcacccatttaaagtgtatgctccagtggtttttagtatattcattgagttttgtcattagcaccacagtcagttctagaacattctcatcacccatatttacatttatttttaataactctcatgtgtaagctgagtgttttaaactttagagacttctggggggtgctgaacttgataaaaatattcagtatacaagtgttctttatagttcactcatcattttcatagaattagggttttaaaattagaaagtaatttaggccatttccatctcctgtccctcaaatcccagctcagttttgggatgaggtgtcaagtataagtttgtaagtatgccagtcatttgcacggctaagagaaacatctagagaagtctatatacgacttgcttaaagctgaatgttgatttactgttcacatgatttgggtgattttagtcactgggactgagctaatggagttgaagcattgttgcgggcattgtacctccagaccagtgtgtaatacaaagagttcttgcagacataggacagaattggagaaacagcttctaacagtgggaagactctcagtacaaccaagctattccttacctttctgatttctgaacttttttccatgtgatacctgctgctttgaaggcactaaaataacagaagcagatagagcagaaatcctcactcagatcttcctccttcctacctgtataacagtttgtggcttgccttgtctgttttgtgcgtttcgttacgcgtatgtgagtatgtgcacgtgatttccagaaaggagaagcgcacgatactgcccgtgctctgtgactcctgagtgcacgcttcctctgcatttgggctcctaggtcggcctcgtcctgtggacgttgccccttgtttcgtgccatccacacattcctgatgccccgctgctctactctttctccagagtactttttccaaacatgtgatttgcacatttgttatgtttattgtttgttttccacttctagaagtgtgccactaggcaggaatgtttgatttgttcactgatgatcccagatctctagaaccctgccttgcctgtagagggtgcttggtaaatgtgctctgaatgaatggctccatgatcctcgtttctaagagctagcacgatttctcactcagtcctggttggacacaggttccctggaacagtgctgttgtggttatcttctcacgtgtctttgtttctgaacttgaaacgctttgagttttttattgtttttgttcttcctcattagtttgagtcccttgcagataggctttcattttgtccagtcacctgttcagggagccctgagggccttggcccacgtctgcaggtaactggtttttttatttttatttttttattttgagacgaagtctcgctctgtcaccaggctggagtgcagcggtgcgatctcagctcactgcaacctccgcctcctgcgttcaagcgattctcctgcctcagccttccgagtagctgggactataggcacgtgccgccacgcccggctaattttttgtatttttagtagagacggggtttcaccatgttagccaggatggtctcgatctcctgacatcgtgatccgcctgcctgggcctcccaaagtgctgggattacaggtgtgagccaccgcgcccagccctgcaggtaactgttaatgtaggaagtgctgcctctgggcaccttggccccagggttcattagcagttgcccctggtgggtttttgttggctgtgatgagaagtgcttctgttccccctccaccacactcctgcaactgtttaaacagtggctgtgaccccctgagatgatccagggtttcaaggcgtgcacatgtctgtgtttcggttttcagaagtatcaccttggggtgactctcaacttacatggattttcaaagatttattcaatatgtttttcagaaagtgttgtgaagagcgaagacttttcgctcccagcttatatggatcggcgtgaccaccccttgccggaggtggcccatgtcaagcacctgtctgccagccagaaggcattgaaggagaaggagaaggcctcctggagcagcctctccatggatgagaaagtcgagtgtgggtattgaagggacccacaggcgcgcccagcagctctcggaagcgtgtgtgtgacagagcctctgctcacttctgggcctactgtctagaggcagtcttgcacaggagggttgctctgctgggtttcggggtcactgtgccagggccccagtttatgtgctcaccagtcacttagctctgccagctgacaggatcttttgctaggcccccttctctgtgctgagtggaggtagcctctcagcatatctgctgggtaagacatagttaactgtaaattattgaaagaaactcagcaaaatgcatagtgtttggtatgaaaggggcagaaaaataacaagattaaatagaccctaatactgtaattcaagtaagaaataattttgcagttttaatttgcacctgaagcgaactgtatgcattttcttctttccttgccctgtcacatgcctgcgtgggcacgtgtgtgcacgtacgtgcgtgaacatgatgtggcctgggttggtgtatccttcagctctgtgtttcctccttcacaagtgtggttttggggagaagtggttgaatgttgcagaggagggagctgctgacctttgtgcctgtaaatggctgtcctctctgcccccagtgtatcgcattaagttcaaggagagctttgctgagatgaacaggggctcgaacgagtggaagacggttgtgggcggtgccatgttcttcatcggtttcaccgcgctcgttatcatgtggcagaagcactatggtgagtagagagggaggaaggcatgggcgcctggactggggctccagcctgcagtgcccattggtgggctgtcggggacctccataccttgaggctatgagatagggactgcattccagagttcatctcaggattgtttccaggccttggtgacctggagaactgaagtcgtgggaggttagtttataagccagcatctgattattcatagccatgcttgttgggtggtgaaataccttaactactttgtacagcacaccacgttttcagtagcaatttatgtgctcaccagtcacttagcgaaagatgacttcgtgaaggttcgagcaaggataaggggactcattcattgaatgactgtctggactgttgtgaggactgcatctcaacagccagcatctgggggtcccgacctgatagtttgtgtgtgggcattgccgggttgctcgctcgtggtaatgactcttccccgaggttctttctgtccaggcagaacaggcatttttgcattctgaataggtatattctcgtacttttggtttgaatgtggatgtgggttaataacagacccgaatctatttgatcttccaggtcaccttgggctctgtttgtcagatcctgttatccatagcctttagagaggaccttctgcttttagcttattttgttgctaactttttacaaacaaagggctaattttaaaatgtcagtgttgtcagtggtcagaaaccgtgtgtttgagcgggtgttgagtggcaggtggctctgctgacctggtggctggtgtgtcgggaggatttaacctgtgtgagggattggcctagaaacaacctgttgagatagtcttgccccataacctgtctcacaccgtagtgtacggccccctcccgcaaagctttgacaaagagtgggtggccaagcagaccaagaggatgctggacatgaaggtgaaccccatccagggcttagcctccaagtgggactacgaaaagaacgagtggaagaagtgagagatgctggcctgcgcctgcacctgcgcctggctctgtcaccgccatgcaactccatgcctatttactggaaacctgttatgccaaacagttgtaccactgctaataaatgaccagtttacctgaaaccctttgtgatcagttctttaatgatacctaaatgaaagctaattaaaacaataggtttctcccaagggtctggagtaaatatattttgggtgcaaatgaaatggcaaaaatctagtatcttaaattgtataaggggacattatataaaaactgaaaatatagaattccttgatgtaggaaatttgaggtttttggcaagagatctttatataagtaaaatcccattatcgtaggcacaccggcaggagttaccacaaccctttttttttgttttgggagacggagtcttgctcttgtcacccaggctggagtgcagccgcacaatcttgggtcactgccacctccacttctcgggttcaagggattctcctgcctcagcctcccaaggagctgggattacaggtgcctaccaccacgaccagctaatttttgtattttttagtagagacggggtatcaccatgttgtccaggctggtcttgaactcctgacctcaggtgatctgcccgccttggcctcccaaagtgctgggataacaggtgtgagccagtgtgcccggcctatgaaccacttttcttctgggactgtccctccctccctgcagttttcttttttttttttttttttttttttactgatcattcttgggtgtttctcgcagagggggatttggcagggtcataggacaatagtggagggaaggtcagcagataagtgaacaaaggtctctggttttcctaggcagaggaccctgtggccttccgcagtgtttgtgtccctgggtacttgagattagggagtggtgatgactcttaacgagcatgctgccttcaagcatctgtttaacaaagcacatcttgcaccacccttaatc

SEQ ID NO: 7061 - DNA, 6000 bp, Homo sapiens
tttataatggattccatttccaacttaaagtgtggaaaattaacaaaaattgaagttaatattataggtggtagtggtctttggaggaaggactgggtctcatgcagtgggtctgccttgtatgtctgaccacaaactttgggctcccaattccttgaaactagttgtcccatattcctggtctttgtcctatcacctgatagagccatgtatgttatgttgctcttggccttagatacaaacctttatcaggtttgaagtgttcgtgttttgtttctttaagtcctaggaaagatgtcttcagtgttctgctgtgccacagctagcagctgaacttggatggagaaccagcagcagtgctgggaagaagctgcctggcccttagtaatgcttctgtctcttcatttcattgcagaacaaagagtagaagatgtccgacttattcgagagcagcatccaaccaaaatcccggtaggtagtctcaggcctcggtttcagtcatgaatgtacgcagaggagagcaccgcataagtgcatccacttgacgggtttttacaggaatcaccagacagccaaaccctgggtgtcagtttcacaacctagagagaggtatcctttttttaagagacagggtctcactctctttcccaggctggagtgcagtggtgcgatcgtagctcagtgcagtctcagccaccttgtgctcaagcagtcctccctcctcagcctcctgagtagctctgactagaggcacacaccactacacctggctaattttttaagttttttgtagagacagggtcttgctatgtttaacaacccaggctgatctcaaactcctgggctcaaatgatcctccaccttgacctctcaaagtgttgggattataggcatgagccactggctggcctcaggtgccaagatttctgtactgcctctaatttctgctaccacttaaactcaggcaggtggagcctacacactgatatttccttgtggatatcacacttcagaacgtgtccgctagataaagctctcaaacttaccaaggaaagtgatgacagcttgactcggccttacacagaaccctatgtaggtctcacacaatagaacaatgtacaaataagcatttttctttcccaaagaagcatgtaaagatttcccattcctgccactcaacttctctttgttgtgacagggtggaagaattactgtatatagaaaagatgtccgcagcgttcagtaaacacagacactaatgagactcagaggctcatctgtggtcaggtattataacagcttaaaactaaaaaaaaacaaaatattttgctccatggaaaggaagcatagtgaggagccaatggattatttatttatttatttatttattttgagacggagtcttgctgtgtcgcccaggctggagtgtagtggcgcgatctcggctcactgcaacctccgcctcccaggttcaagtgattctcctgcctcagcctcctgaatagctgggactacaggcacgtgccactacgcccagctaatttttgtatttttagtagagacagggtttcaccatgttggccaggatggtcttgatctcttgacctcatgatccgcccacctcggcctcccaaagtgctgggattacaggcgtgagtcaccacgccggcctgatggctttatttaaattcataatatgaaactatatgtgttccctgtgtagttcaaatacgtgtgtgtgtgtgtgtgtgtgtgtgtgtgtgtgtgtgtgtgtataaaattttttttttttttttgagatgcagtctcgctctgtcacccaggctggagtgcagtggcgtgatctcggctcactgcaagctccacctcccgggttcacgccattctcctgcctcagcctcctgagtagctgggactgcaggcgcccaccaccatgcgcggctaattttttttgtatttttagtagagacggggtttcaccatgttagccaggatggtctcagtctcctgacctcatgatctgcctgccttggcctcccaaaatgctgggattacaggcgtgagccaccgcacctggcctcaaatatttgtatttttaacctcatttaaagaaatatgttatcagaatgaaagtaccaggtcattatgcacaaaactttgtctctagaaccagctaataatggactctacttgccttgtcaaatataattttttcatgtcaactagacagtctctagtgtggaaaaacattgagcatattactataattaggaacttacacatttattaaaacacaggcatttactttttttttttttttaatggatgaaaggtttttatgtttcccaggtgggcctggaacgcatagcctcacctccttatgcaccagaacaaccagcctgagtcaccgtggctcccaaaacacatgcatttactttcattagaacttcagctggccggacgcggtggctcacgcctgtatcccagcactttggaaggccgaggcgggtggatcacgaagtcaggggttcgagaccagcctgaccaacatggtgaaaccccatctctactaaaaatacaaaaattagctgggcgtggtggcgggtgcctgtaatcccagctactcaggaggctgaggcaggagaattgcttgaacccgggagtcggaggttgcagtgagccaagatcgtgccactgcattccagcctgggcgacagagcaagactctgtctcaaaaaaaaaaaaaaaaaaaaaaaacttcagccatgtctcaggatatggtagttttggaattgagagtttcagatgttttgtgcttgaagctggttcccagcctctctgcctcggtaaggcttgaggtctttttctgactaggtatgtatttttcatggttccaaaactgaaacagaatgaaaggatacatagccaagtatcttcccccacttcctacctgacggcagacatattgtctctcttgtactatattttgtaaggggtagatgtctaagctagcaaatgatcactcttcacaggagagctatgaggaaactagtgaatgtgctgtttcaaagcccattttggcatgtgccagttagactgtaggaggcattttgtatatttttaattgttgatgactattttatttatttattggagacagtctagctctatgccctaggctggagtgcagtggcgcaacctcagctcactgcaacctccgcctcctaggttcaagcttgtctcagcctcccgagtagctggaaggcattacaggcacctgccaccacacctggataatttttgtatttttagtagagtcggggttttgccatgttgaccaggctggtctcgaactcctgacctcaggtgatctgctggcctcaccctcccaaagtgctgggattacaggcatgtgccaccatgcccagcctgatgacttttttttttttttgagatggagtctcgctctgtcacccaggctggagtgcggtggcgcgatctcggctcactgcaagctccacctcccgggttcacgccattctcctgcctcagcctcctgagtagctgggactacaggcgcccgccaccatgcccggctaatttttttttgtatttttagtagagatggggtttcaccatgttagccagggtggtctcagtctcctgacctcgtgatgtgcccgcctcggcctcccaaaatgctggggttacaggtgtgagccaccgcgcctggccctgatgactattttaaaatcacttctggcttcttttccaggtgataatagaacgatacaagggtgagaagcagcttcctgttctggataaaacaaagttccttgtacctgaccatgtcaacatgagtgagctcatcaagataattaggtattcagtcacctttgtttcataatatatttcctttgagtaacttcttattctttatgaaacttacagttaaatctttagttctggttaaaatctttaaaaaatatttttcagctgaattcagttctgattcagttatgattaaaacaatttcaacttaaactataaaatgtttctttttttgaggttttatattacttgctagactgcagagcccgtttctttcatcataacatcgtttagatgtttcctgtttaaaatcagtgttacaagttattaaggtattgtacagcaaagctagttaaagagaatgtagactctgtgagtggcagtaaatggcacaggcttagatcttagaatagttcagaaactgtatttgaactgctttcttatattagacagtttaacagctgttcagacagtatactagtttaaaatcagcctaatatgtaatctttcagtgattatagctcatgtcaatataatcaaaggaagtgtcctgtgctttatgagaagtattggattcaagagcatttagaacatttttatattttaccgatcagagtgggtgatattttaacacatgcttcatccttcttgtattgttgtcaatatttcttcacgttgttttctttcaatagaaggcgcttacagctcaatgctaatcaggccttcttcctgttggtgaacggacacagcatggtcagcgtctccacaccaatctcagaggtgtatgagagtgagaaagatgaagatggattcctgtacatggtctatgcctcccaggagacgttcgggatgaaattgtcagtgtaaaaccagaaaaaatgcagctcttctagaattgtttaaacccttaccaaggaaaaaaaagggatgttaccaactgagatcgatcagttcatccaatcacagatcatgaaacagtagtgttcccacctaggagtgttaggaagttgtgtttgtgtttcaagcagaaaaactgagctccaagtgagcacattcagctttggaaactatattatttaatgtaggctagcttgttttcaaattttaaaagtttaaaaataaaatactttgcattctaagttgccaataaaatagaccttcaagttattttaatgctcttttctcactaataggaacttgtaattccagcagtaatttaaaggctttcagagagaccctgagtcttctcttcaggttcacaaaacccgccgcctttttgggtagaagttttctactcagctagagagatctccctaagaggatctttaggcctgagttgtgaagcgcaacccccgcaaaacgcatttgccatcacagttggcacaaacgcagggtaaacgggctgtgtgagaaaacggccctgactgtaaactgctgaaggtccctgactcctaagagaaccacacccaaagtcctcactcttgcaggggtagacatttctggtttggtttgttctctagatagttacacacataaagacaccactcaaaaggaaacttgaataatttataattttgatcgagtttcttaaaagaccctggagaaagagtggcatttcttctgtttcaggttttgtctgagttcaaactagtgcctgtgttgttacggaaagcagcagtgtaccagtgtcactctggagtacagcgggagaaacacaaaatagtataactgaaaacattaacattcagacacactcccttctgccttccggcttaaagctgtggatgatccacgtttttgtttttttaatgttaaatgtgtaactcagtattactgaaaaggtacccacattttgaatagtagttatcactcttaggtcagacagccatcagaattctcccacaccaagtgcatgtcagttgtggagaaaacatagcaaaaagagccgtacgctctttacagatactaatgtcaagagttaaacctcctcaggttcaacctgtgataaaagactagtgcttcccagtacttgcatggggttcactatttatagttttcttgggagtatcacaggaaaatcacaattacaccactttagaccctatgtgtagcaggtcacaacttacccttgtgtgtttagatgtgtatgaaatacctgtatacgttagt

SEQ ID NO: 7062 - DNA, 6000 bp, Homo sapiens
gcagggaagggaagtgggttttcctggaaaacggggcgggaggtgtggagctcggagagactgaggtcctgcactgctaaggggactggccccggccctgggctgggagagggggagctgggactcagcccagggtggagtcaccatgggttctaaggcacaggatggataccctcctcggccatgtgacatcattgtttgggatgcgcccagtgttcggagccttcgaggctctccaggtgcctggagggcttgtagaaatggtggtcaggccccacgccccagactttgtctcatcatgtctaggtgggggccccagcacctgcatgctgacctggtccccaggacgcagatgctgctggcctgagcgtccccggctgtctcctgtctggtgtgggtgctgccgccgggaggccttggccccacggggagatgaggcatcacacacgcagccacaacacgggtcggaggcagagtccagcccagcaagggtgtggcagtggagacgagggaggggtgaagctggtggttccaggaggttccgtctgggtgagaccctctgctgcagagaggggcgggagccagtggccccgcggagctgaggtcatgtgagaaggggctgcagtctcttctgtgtcattctcctgtggggtcagcctcaccccagtgggaactcccactagtgaaagtctgagatggccccatcctgccgtgtcgcctagcagtgcaccacagggcattcggcccctcctgccttcacacactcaagacgttttcatgactcatctcctgccaggagggcacacacagggcacctttgcacggcgctgcctgtcctgaatgcctcgctgtccccgggtggacataggaattcatcacagtcctcctcgaagcccgggttgctctagaagatgaaactcaattgctgtccttgatctgctgctcactagaggccctgggttgggaatcggaatgtaaatgtgtcacccatcctagagaagaaagtcctgcagtgtgacatggcttcattttcaacagctgagaccctctgccacaacaactctcacagccccctcatccccacccgccgtggaaaccaaataaaagcagaaagctctggtggaagccgagctgggggcgatggggcagattgtagcccgtttctccttcccgtccccctccccactttggcccctgggacctgctcagaaccccagggtgaaggagacatctcaagtgtgacccattggctgcttctgctgcgggagagggagagacggggtggcccatgtgaaagctatgcctcctgcagccccgcaaagcctgcaaaagctcagccaggatttgatgggattgtttctgctgggaccccctctctgctgcgtctcgtgcaaacgttgctgtgaagggatgccaaggggttttgcaaagcagaaacccaagctgagaggaggagaagggattgttctgggggcaggcccaccttgattcagggggtttcgcttcattgtgctttgcagacgctgtgtttttacacattggaggtttgtggcacccgtgcatggggcaagcctcttggtgccgttttcccaacagcacgtgctcacatcgtgtgtccgtgccacactttggtaattctcacggtatttcaagctttttcatgattatatctgttcatggtgatctgtgatcagtggtctttgaggttactagtgtggttattttgggatgccacacatcgcacccatataagacagtgaacttaataaatgctctgtgttctgaccaatcctccaaccagccgctcccccatccctctctctcctctggtctccctattccctgagacacaacagtattaaaattaggccagttaataacactccaatggtctctaagtgttcatgtgaaagaagagtctcacatctctcactttaaatcaaaagctggaaatgataaagcgtagagaggaaggtgtgtcaaaagccgagacaggcctcatgcaccaggcagcctagttttgaatgtaaaggaaaagtaattgaagaaaattaaagtgttactccagtgaatacatgaatgataagggagtgaaacaatgttattgctgatatggagaaaattttagggtctgaagagaagatcaaactaaccacaagcctgatccagagcaaggctcaactctaatgctgtgaaggctgagagaggtgaggaagctgcagaagagctggaaacgagcagaggctggttcatcaggtttaaggaaagaagccgcttccagaacataaagtgcaaggtgagggagcaggttacccagaagatctggctaagattgttgatgaaggtggctacactaaacagattttcagtgtcgatggaacagctttctattggaaggagattccatctaggactttcatgctaggaagaagctaatggctggatttgaaggacaggctgactctcttgttaggggccagcacagctggaaatgttaacttgaagccagtgttcattgaacattccaaaaatcctagggcccataagaattgtgtaaaatccactctgtgctctagaaatggaacaacaaagacctggatggctgcacggcttacagcatggtttccagaatagttttaagcccagtgttgtgatctactgctcagaaaaagattccttttaaaatattactactcaccccggagcgcccatggagatgtacaggaagatgaatgttgtttgcgtgcctgctaacataacatccagcatgcagctgtggatcaaggactaattttgactttgaggtcttattatttaagaaatacatttagtaaggctgccatagatagtgatttctctgatggatctgggcaaagtccattgaaaaccttctggaaaggattcaccattctagatcccattaagaacattcgtgattcaaggttggaggtcaaaacatccacattaacaagaatttagaagaagttgattccagccctcatggacggctttaggggctcaagacttcagtggaggaaggactgcagatgtggtggaaatagcaagagaactggaattagaagcggagcctgccgatgggactgcattgctgcaagctcacgaccacactcgaaagactgaggagttgctgcttaggggtgaaacgagaaaatggtttcttgcgatggaatctactcctggcgaagatgctgcagacattgttgaagtgacagcaaagatttagaatgttccttcaatttagttgataaaacagcagcagagtttgaggggattgactccagtttccaatgaagctctaccgtgagtcaaatgctatcaaatagcatcacatgctacagagaaatcttttgtgaaaggaagagttcattgatgcagccaacattgttgtcgttttttttttgttttgttttgagatggagtctcgctctgttgcccaggctggagtgcagtggcacgatcttggctcactgcaagctccgcctcccaggttcacgccattctcctgcctcagcctcccaagtagctgggactacaggcgcccaccaccgtgcccagctaatttttttgtatttttagtagagatggggtttcaccgtattagctaggatggtctcgatctcctgacctcgagatccgcccacctcggcctcccaaaatgctgggattacaggcgtgagccaccgcgcccagcctgttagaagttgccgcctcagccttcggcactcaccacgctgatcacccacagccaagccaagatcctccattgaaggctcagattattgttcacattttttagcaacaaagtattttaaaattaagatttgcaattttttaagatataatgctatagcacgcttaatagactacaatatagtagaaacataacttttttctttttcgtgacagggtcttactctgccgtccaggccggagcgcagtggtgccatcacgactcactgcaaccttcacgtcccgggctcaagtgatcctcctgcttccgccttccgagtagcgtgtggggagggtgcacgcagctgggctaggatggcctggctggggtcagcccccgtctgtcctggaggccaggcaggtgcggagcttacggaggtggccacctagatgatggtgcctactctcgtgagttgaggcccttggatctctggcagtcagcaggactgtggtggcagccggtgtgctggttgtcagctgatgtccctgtctgtgatttttccgtgtgaatgcagccttgactgggcatgtagatcagaggtgacaagtcctgggcacctctgccactcttcttcctgccctgcacccactacagacacagctaattggtggctgcgttgagaatcttgtcaccaggcaggctcttctgtcggctcaggactgtcctgcgggcatagcaggaagtgaactgcagggggaagttggggcctggttgctgaggagggcagtgcgtggtctccaagccagtcagtgcctgcgggggggactagaattctcacccaggcctctgctctcagtcctgttcctcctctcacattcttcacacccaggctgggctcagggatccttgttgatgatggccttgaaatgtcctctgaacagtgtggctctgggggtgtgtaaaacccagggtgatgcctgctctgaaaggggcttccagatccctttgtgtctccagcacctgccgtgtgcctgccccaagctggggtctgtgagctgtgccttggggcccctgcctgtccccgctctgctctctgctgtggcttgctggctgcagggttctccagtgagtgagggatccctgctggccatgcctggagctgagggtggagggaggcccagcaggaagccccacaggtaggccccagtgagggtgcattatctacaggaaagttgcctgggacactctagtgggccgtctaggaaatgcagcctttaaggacctgaaatggagggggatatttttagtttttaaaatttatttctcattaaaattataacacagcctcgtaaaaatattaaaacagcgagacagatgtgtcaggggttatgtatatgaaggaggtagcacagttctcatcacgggtgtgcttagtgtccccctaaagttcatgccagttaatgtgatcgtgactgtaattggaaatagggtcgttgcagatataattaagatgaggtccttctggagtcgagtgggactggtgtccttagaggagaagagacacggacacacagaatgccacgtgggacagaggcctgctgtctacacctgtgcagaggagacaacaaggagagtggggcatgacccctgcccacgacactcgcctccaggaaggcagccagctgcccatctttggtgcggtcatctctgcaggcaacagaatggcagagtggcagtctgatcactctactccattgtgtgagagtctccaggatgaagaccaggctccccagcaggacgtgcggccctcatggagttctggccttgttttcggctgttgcctggctgatattctgcacatctgcccaccgtcctctgggcggtccacgaatacattgtgccttcctctttgcatatgctggtccctctgctggcaatgcccttccttcttggtgagctccaatgcatccctcaagactcagttcagatgcgcctctctggactcatccccaactcccagacggggttggctgctcccttttttcagatcctgaaacacttacttgtccccctttatgtgggcatttatctgatagtagagtttttctgtactgttggaatggtgagttccctgaagctaggtcagcttccttctcagcattcagcaggcggtgggggaggagggaaggagaggaacttcctaataaagatgaacacctctttgtggttaggtcagaccagcctgtgcctgtgcgacctggtgcagaccttcacctctcagagcctcggtttcctcatctgagcctcag

SEQ ID NO: 7063 - DNA, 6000 bp, Homo sapiens
agagagaatgcacataaagggcttagcggtgctcacagtattcattgctcttgtggtcctggggtggtcagggagtgctggacacagtgagtaagggaagccactcctttcccagcccccactgaaggggcttcctgagtcccctcattcccacaggcctcccagctccagctggctccaatttcagcccctggcagctgaccaggcgcctggccagccagaccctccagcagctgcccctgagggcaccacggctcctgccacccccgactcccccatctggagacagtggtggggggagacagtggctcagcatgcgtgctcaccccccggccctccacccctcagccctctgccggggagcgcaggctggggggctccatgcctccagggcccttccccacctgctctggggacagggtttcttccctggcaccccaacccagggcatggtggtggggaggctggcgcctgtgaaaacattcctccagacctcttcctttggatttgggagtgtctgcctttcaaaaggccccagggggctctgtggcaggtggggaggcaggcaggacctctccctcctcagaagccttccctctcactgtcccttcttttctcgcccagggctgggggacaataaccccctcccccgacagctggaggctgggggaggtggtggaggtgggggccagatggcaaggggactatcgccaaggctcaaattcactccactgtgaggcaaaatatgtcagtgtcaggaccctgcctgcccctcccccagcagctcagctttcaggactgtgagctctcctgggcagccttggggtcctgggccgcctcctggtgagcccccaggcaggcagcgtgggcccatcagggccttctacaagtgaggggttgctcccctgctcgggccacctctgattgctgagctcactcagccccacccggagggtgtcttcagaactggcccctctcagccctgctgcacctacaccatccctagttgctggttctacacctgggaccccaccccagctgggaggcggctgaggtctggggcagcacacttgactcacagagaaccccagcctgctgggaaggtccccacttctgcatctgggttttgggagccccttggtctctgggagacagtcagcagcaccctgggggccaggcaggggctcttagctcgggtgactgtgaccaaggccaagaagggaagtggctcccaggccactgttcttcccacagtggaaggacagccccagacaccgtgctttggaggggacagctgcctccatgcctcttcttccacatcccttctctgaagcccgcagcagctagagagggtggggcccagggaagatgctccagccgctctgggccaggccaacagctggggccattcctggcatgcctggccatccaggaacggggtggccccagattccagcctgggggaggggttgaagcctgagaagcttgaggggccttcgcactctcttcccaggcaaacccacccacacgccaccaagcgtgttcctagaatctcgtagcacccttccttggaaaaccgggggagcaggagtgcaaggtcggccccagaaccgctcctcgttcccgtctcgcagtggtgttcgtaaaccccattcccacctcgcagtggtgtttgtagactgcagcaagcgcccagtgtgtgcagagctttcttacacagcagccccttggggttgagtgtcaggctaggagcagacctcaagagaggcgttaagtcccaggagcttggctgcagggcggtggccccagacgtctcaagggcttcgaggtggttccctccaggctcttggctaagggtccagtcgaggatgagcttgggggtgtcattggggaccccctgtggggaagcaggtcactaatgtccatgggtcttgcctggcttgggtgggggacagagaggagtggacgagtgtccacaaaatccacctcccagggtgcttgcgtcccctaccccaggtgcagggctgtgggctggctgcgttgatgtggctttgtcctgggcaccggatgtcccgatctccccaggacggctcccaggccctccctccactggccacgtcttctgggacggggatggggtgggaggacaaagagccagctttgagaacgcccccgagagccggaagtgggccgtggccagcctgctcacccacacccacattggccgtgatctgggcaagtgagccctgccaaggctctgtggctgctgtgacctggtgaactcaggctgtggacaggcctgggcccaggactcccagcctctggcttgaccacacccggcccagcgtgactggagggtctccggtggaggcagctggaggttgggtgaacagggctggcccaggtttggtggcagctgggcagggaggggatggaaacgtctgcccgggtgggggtggcccctccacctcagccgtgtggggttcctagagcctggggtctccctgccccatgcccatgcctagcccaaggccggtgtggctctgtggctggatttccttcagagcatgcggttcagagcctaatctgggtctcagaccccacgtgactcctggctctgtctgtgtggctttgagcaaatgcctcaggctctctgaacctcactgcccagagctgggaggtgaagggaccaccacaggctcccggggggttgggaggaccaaaggggagggggagagggaggtgcaaagctgcccagccacggccggaaacagaccctgtgcccaccgaggctgatgaaggccccatgctgggcaggcaggtttccacttggcaggagctgccctgccctggaagtggcttgtgctctgtgggtgctggcaggctccgaggccagggccgccatctgtcagctggcagagagcttccccggcagggtcccctgcctgggagcctgaggaacccccaccccatcctctccctgcttcctgccaaagcgtttgctactctctggactcccaggaggccatggaggaggggactcaggtcctgctggccgaggaccaagaaccccagggaaggtggccatggtttggaggctgctgccgctgcctgtggggacctctgtgtgctgggccagccctgggcacaggacacagtcagagcgagaggccccagtgccccatctcagggtgggcagatgggcagcctgggccttgctcgtccacacagggtaagcggccggtggtggaggacagaggccaagcctaatgggggttcggcctgacaggcttcctggccatgccaacatctccttcccggcccccgcccactcagacttaccagcccccaaccgctgcctcctctcaaggccacatgcccccacgtcccggcccctgcctagactgaagtctcggcaaagccagcaggagcaggcggcactggagggtgaggcattggcacggggctgaggagagcgggcagcctcggagccagcaggggcgtggtggtcagagtagctgtcgacacctgtggttttgcagggggaggggcggcccagctggcccagctctgaccccccggttctcggtgctccatttcatggggccccaccctgcctggagcgggtgcccccttccagcggggagctgggtgaggcctcccacgcagggtcccgctcaccagggccgactcggtgctccctccgctcgcacaatgtggggagctgttctaggtgttggtgtggcgtggccggcacacctctgtagtaggcacaggacttggtgccggctggggagtcccgtgagcctccctagaccccagcccacctgctgtccagatgaaggagctcaggagcaggccgcgaagacggtgatgtggagatggggaaggagctcaggagcaggccgcgaagatggtgatattaagatgggggccctgtctgaaaggggagctgaggagtttgtgtgtggtgggtgatgtttggggcctgctctgctcccagactccccatcgcctgcctgggacccccagcacctcccacccgtccccctgcccgacatggcagcccagcagcctgagggcttgtcctgggtgggggtgccccagagagcatggcccggggtagggggtctctgtcccctcccagccgggtggtgcaggaggctgccccgtctctgcgttagggtctgttccttggggagctgctgccacccccaccacaaccctggccacagggtcctggaagcctcccaccctgcccaccccaactcagcatcttcctctgtagcccctgtcactgggacgatgcagacgccacaccctcactacacgtggtaccggtggggggcgggaagggcctcgggtctctcacccccacagccctgcagtggggggctgggaaggtcggggtaccctcgccaaggctgattggggctgtgagcgctgggcatgtggggctgggtgctggccacacatggggccttaaccacaatgaggtgaaaggggaacacagctcctcacttttgccaggcacatttcaagggctcagcagccccatgtggcctgtgggtcttggatggtgaatatctagaacattctggcagctaggagagcgctgttgggtgggagggggcctccagggaggagggtcacccgagagaaaggccgggagcctggcgacccccaggactagggaggcacagacagctcctagccaggcccggggcacaggggacggggagagggcacaggggatgggagagggcagccctgtttcctcctccctcatctccctctcccctgcctctcccccagccctggcccctgctgccctcaccaagttcaggcagactctgtgccccaacgagctgcaccaggcatcagcctgaccggggagctcgagggtgacccccatgtccgtgccgagccgagtggggtcagcccagagccatgtcctgtcagctgcggcagcttccaccaggctgtgctttagggtcaggggtctttcaggaagagccatgcagcccacccagaaacactgactccccaggctcgggggtcccaagcacaggtgtcctggggatcccaggacaggcaggacccgccgtctctaagcttccctttgaccaaggtggggccgggcaccccaggagggaggcccaaggcccaggctaggagctgggtacggtgaccgcatttttaaaaccagaaaattcaggatgtgcttttggggtcactacgagtgcccctctccacctggctcttggacttgggtcccttctctaggcctcagtttccccatctgaggggtgggtgtggggctatctgtggtcacaaaagttgctgaccgtcaggacctcgggagaatttgggggcagccacctccactttggggtctttaccggcctgagggtcgtcccggccctggagtagggtggggtgcacagcatctccctctgcaccccacactctgcccaggccccatccccgagcaccagggcttcccgtgtgcattacaaacagtgcgtcccagcccctgatgtgggagaggaggagatgggcacaccagggtcccagcagctgaagtattggggtgaagagatgaagattttaccgaggtaccctgttctgggagaagaagagtgaggctgggggtggggctgcccctctgtccccagccatgtccctcttggctgtgcagccacaacaagccccaccccacccagccccaccgaggcagccctggcccctgcccagtcagtctcaggaacccgcaccaccagcgttggctgcccagccctgacgtgttgggacctgacagaccagcagcagctgcaggccggttcagccacacagcacagtccagttgggggccgctgtatgaattacggatacatctccagctgctcttgatggactggagctgaactctcgcatcccggggttcagttcccacaaagcagcctggagaggtggagggggacgggcactttcctgcag

SEQ ID NO: 7064 - DNA, 6000 bp, Homo sapiens
ctcagtacagacgcagaaggcttgcctctgccatcctagaaccatcatttttatataatttttaaatgtgtgtgttccaagtggtgaatccagcaacagcctcatgtggagcaaagcgatgtgaaggttgtagcatggggcacacagggtcttctctattcgtccctcactaacacccgggtgctgccttgtgtgtgttcccagccacaccttgttaggcgacaccgcggacacaaaatgcctcattccctacagtgctgcctgcagccaacatcctgaagacttgctcgtcagtgtatagggagctgcctcgttgttgttttttttgtgtggcggggacagagtctcgctctgtcactgaggctggagtgcaatgacgcgatctcagctcactgcaacctccacctcccaggttcaagccgttctcctgcctcaacctcccgagtagctgggactacaggcgcccaccaccatgcccagctactttttatatttttagtagagaaggggtttctccacattggccaggctggtctcgaactcctaaactcatgtaatcaacccatgtaatccgcctcggcctcccaaagtgctggattacaggcgtgagccacctgcccagccatgtttattttattagtttataaatttatttaaaacagagatgcagccgggcgcagtgactcatgcctgtaatcccagcactttgggaggccgaggcgggcggatcacttgaggtcaagagtttaagaccggcctggctggccgggcgcagtggctcactcctgtagtcccagctactcgggaggctgaggcgagagaatggtgtgaacccggcaggcggagcttgcagtgagctgagatggcgccactgcactccagcctgggcgacagagtgagactccgtcttaaaaaaacaaaaaaacaaaaaaaaccacagcctggccaatatggtgaaaccccgtgtctactaaaaatacaaaaattagccaggtttggtggctcatgcctattatcccagctactcgggaggctcaggcagagaacggcttgaacccaggaggtggaggttgcagtgagccgacatcacaccactgcactccaggctgggtgacagggcgagactctgtttaaaaagcaaaacaaaacaaaacacaaatgggaacgtgctgggcttacagacgtgagccactgtgtccaacccatggttttttttaaccattatcctccagatgggccctggaggttcacactctttccctcttatacatgtgttggtttattgtcttatgttatcacctttatttacctttgaaatctttattgtcactttggttaaacagataacgaaatattgtttcacgatgacatatgatcctattttatttaagttttcagatcttttgacatctttgccaacttcccaaaatcagaatcaaattctaaattaaatcttcttgacctcaaacggactttgaagttttctagaaggtccctggaaaatctcaaaactcaaatcctttgaaactgtcaaatctttgaaactgacagtttcaaaggatttgttctaccaccttgttaaaagggagatgttaaactaattcagtttatttgatatattcaattacatgggaagcattgtcaaaagacacttaactttccatacattatatttatatagttaaaatgttgctatttcagaaattatataaatgtcctaaaaatttgtcaatgcccttgttatccgatctgttcgcctctgttactgttcatgatttcagttgttatttaatacgtcgtgtgtcacaaaaacaaccagaattcattgtgtgttgtttttataatgaactctcatcagatctttcattattttcaggttctttttttttttttttttttgagatggagactcgctctgtcgcccaggctggagtgcagaggcacgatctcggctcactgcaaccttcacctcctgggttcaagcgattctcctgcctcagcctcccgagtagctgggactacaggcgcccgtcaccacgcccggctattttttgtatttttagtagagacagggtttcaccatgttggccaggctggtcttgaactgctgaccttaggtgatccacccgcctcggcctcccaaagtgctggtattacaggcgtgagccaccgtgcctggcccataattttttttatttttatgtatttgtttattttgagacagagactcactctgttgccaaggctggagggcagtggcacgatctcagctcactgcaacctacacctcctgggttcaaacacttctcctgcctcagcttcctaagtagatgggactgcaggcgcatgtcaccacgtctggctaaattttgcatttttagtagagatggggtttcaccacgttgcccaggctggtttcaaactcccgacttcaagtgatccgcccacctcggcctcccaaagtgctgggatcacaggcatgagccaccgtgcctggataactgtacttatatttttatagaagctttattgagacaattcacacaccataaaatccatccctttagtgtgcacaattgaatgtttttagaatattcagagtcgcacagccatcactactatttaattccagatttttaatttaaaaattttcattgccctcgcagggcacaggggctcacgcctgtaatcccagcactttggtgttgtaaccaagcgagttatagagaaacaccacactttgagacaaattaaggagtcctttattagcctgcgaccgagaggccgctaatgctcaaaattctctcggccctgaggaaggggctagctttgtttgtataccgtggtctaaatggggggggggagtttaactgaagcaatttttatagaagcagaactggcaaaaagttaaaaaattaattggttacaaatgcagttacaaaaaataaacagctccaggtgcaggggcttaaactatcacaaagagataaatgcaggggcttcgggtgccatccaccgagcgcgtcccgaggagctgctggtgcagcttgcctcagtatcttatcagtaggtgcattcccagacgtgctttgagtcagtcacactagttaagccttaagggagggaggtgaagggggctgcaggtgaagaaactaaaatggagtctgtccggcgctctctctgctacgagaaggtcacttaggttaaaacaaggttgggtatcacactgggaggccgaggcgggcggatcacgaggtcaggagatcgagaccatcctggctaacacggtgaaaccccgtctctactaaaaaagaaatacaaaaaattagccgggcgtggtggcgggcgcctgtagtcccagctactcgggaggctgaggcaggagaatggcgtgaagccaggaggtggaggttgcagcgagctgagatcgcgccactgcactccagcctgggcgacagagcaagactctgtctcaaaaaaaaaaaaaaaaaagtcattgccccaaatagaaacccattcccattagcacccactccccactttccttcacagcctcaacaaccatgaatccaccttctgtgtctatggagtcacttattctggacatttcatataagtggaatcacacgacatgtggtcttttgagtctagcttctttctttcttttctgagacaggctcccactctgcggcccaggctgaagtgcaatggcgtgatcgcagctcactgtaacctcagtctcccaggctcaggcgctcctcctgcctcagcctcacagcagagaccacaggtgcgcaccaccacacccgactatctggcttctgccacttagcgaaatgtttctgaggttcttcatgttatagcacgtgtcagcacgtcactcttcttcatggctgagtaatactccactgcgtgaagagacacatttatctgtccccgtgttgggcatctgcactcttcccacattttggctatactaaattgtcctgctacgaacacctgtgtagtttctgtgtaaaggtacagtacctatatgttggggtgatcagacccaaccccaggtcgtgggggtgacaaagtccggcggagtcaaaggattcagaaaaacacagagagagaaaggtggcacaccagggggccatcgctattgtggaggctgcaaaagcccgagctctgggagcccacggtatttattggtaatgcaacaaagaaacagatggtgagaatatggaggtcaaaagaccacgttgcattaagcacatgattacagctgtgccggtttagcatttatatggagcatgttctgctacttgagataatgggaataggggcctaggagggctagaaggaaggagccagcaagtctagacacattccaaaggacatcatgcaagccctgcctcagtttccctcccaacacctatatgtcttgttggtatacatgttgtattttcacaacgaaaatgcatgagaaaaaggacacagatggcttatgtgtactgatgtgtagcattctctaagatctgacatcacagagctggacagcacagctgtgcacgcacccccctggctgggaggtggcacatccacacatgagggaaaaacactgccaggacatctcagggcactctcaggaaatgaggaagctgctggagaagtttctagccttgggggaggtcaggacgcagagccatctcctggagcaaagttccctcctcctctctccctcctcctctctccctcctgcagcccttccttccgacccctggccctttctctccaaccttcccctcccctcctccatttccctcctctttctactttcagagaacacagggttcctgcaggaaatggggcagtttcaccttcctgaggaggggcctgggaggggcagcaggtggccgggtagggccagcccagctgtgagcctggcgtgggagctgcctaggccgggccctgccagggagcaagtctgcatcgcagaggccagggtgagtgggctggggagtcggtgcgccagggtactggggtgcccacctggggtggtgcaggcccggggaccccagggcaccactgtgggtggaagctgggaccaggcgtgcggggcaggggacgcggcggcttcctgggattctaggaggctgaggccaggtgtgtgcggcaggggacggggcggcttcctgggattctaggaggctgggaccaggtgtgtggggcaggggacgaggcagcttcctgggattctaggaggctggcaccaggtgtgtggggcaggggacgcggctgcttcctgggattctaggaaactggggccaggtgtgtggggcaggggacgcggctgcttcctgggattctaggaaactggggccaggtgtgtggggcaggggacgcggcggcttcctgggactcaaggaggtgggagagctgctctcagacccgccgctgtcctcccactggccctccccgtggtccctaggatgaggtctggacccgccaggccctccagaggccccacaaccccgcttgtccactgtgccggctgttccttccttgtggcgcccagtgcggtcctaggcacccttgggactcagctcacgtaccccttcctccaggaagagttctcagaggctgtgtgaggagcgccgagtccccggacttactctctgttctggaattctctgcgcagtcatctgccttcccgcccagctaagagcagggcctgttgtccggccccacaatttccttccaggtggaaaggatttgctgaatgaaaatcaaagctgtggccgggcgcggtggctcacgcctgtaatccccacactgtgggaggccgaggtgggcagatcatgaggtcaggagatcgagaccatcctggctaacacggtgaaaccccgtctctaataaaaaatacaaaaaattagccgggcgtggtggcgggcgcctgtagtcccagctactcgggaggctgaagcaggagaatggcgtgaacccgggaggcgg

SEQ ID NO: 7065 - DNA, 6000 bp, Homo sapiens
atcatgggggcggggagttggtgctgcggcctcgttcctctctgcagtgagtgaacgatgtttgtggtcagcaggagcctgtggggagcacaggctggtcctcctggtgtcccacccacccctttttccatgggggatctgcactcatctccagggaagatggttgggagataaccccagtctgctctaggtccccaccctccacagccagggtggtccgtggtgagcttcagccatcgagatgcgggagtctgctagagtcttcagggtcttttctctgaaaatgacaggctagcaaggagacctgggtcccctgcctcttccattccagatgccttgagtccacccaaataggggatgtgatgtttggagctgcagcagccgccctacggttgggagtcagagaagagccggtgttccagggacaatgcagcagaggctgagcccaggcctgctgtcctgagaggtggctggatcactgacactttggcagtggtgctggggtttatgtcatgacctgcagctgagcctacttccaatgaccgtgagatctgaaagactgttttgagggcgtagcctctgccatgattgtggggaatgctgtcctgtttcctcccttggccctgctcagcccagcgagaggctgaggcgcacgtggctccccgggtgcccacaggcagcgtggctcaccagccgggcccttttccactgagccagaaccccccaaagccttcaatgcaggcaccacggtgagcccacgagaaaccctgcttgccacctcccacacccccacccccaagttcaaaggaaatggtccctgaaccaagggctgagatcagctgtgggtccagctgtcctggggagctgtactggagcccaccacggtgggactgttggtccggcggtgacccccacctccatgtctgtggccgcagctggacaggccactccctgggccacagagatgttttacctctcgcagccctcgggcacacattgagcagatgtgtgtgtgtgtgcgtgtgtgggtgggtgcgcatttgtgtgtgcctgtgtgtgtgcgcatgtggtgtgggtgcacgtgtgtgcacgtgtgtgggtaaacattgtgtgtgcgcatacgtgtgtgggtaaacatttgtatgtgcacgcgtgtgtgggtaaacgtgtgtgcgcacgtatgtatgtgtgtacatttgtatgtgtgtacatttgtatgcatgtgtgcctgtgtgtgtgtgcctgtgtgtgtgggtgcacatttgtgtgtgtgtgtgtgcctgtgtgtgtgtgtgcacgtatgtatgtgtgcacacttgtatgcatgtgtgcctgtgtgtgtgggtgcacatttgtgtgtgtgtgcctgtgtgtgtgggtgcacatttgtgtgtgtgggtgcacatttgtgtgtgtgtgcgcctgtgtgggtgcacatttgtgtgtgtgtgtgcctgtgtgtgtgcctgtgtgtgtgggtgcctgtgtgtgtggggcacatttgtgtgtgtgtgtgcctgtgtgtgggtgcacatttgtgtgtgtgcctctgtgtgtgtgcctgtgtgtgggggtgcacatttgtgtgtgcgcctgtgtgtgggggtgcacatttgtgtgtgcgcctgtgtgtgtgggtgcacatttgtgtgtgtgtgcgcctgtgtgtgtgggtgcctgtgtgtgtgtggggcacatttgtgtgtgtgtgtgtgcctgtgtgtgggtgcacatttgtgtgtgtgcctgtgtgtgtgtgcctgtgtgtgggggtgcacatttgtgtgtgtgtgtgcctgtgtgtgggggtgcacatttgtgtgtgtgtgtgcctgtgtgtgtgggtgcacatttgtgtgtgtgtgtgcctgtgtgtgtgggtgcacatttgtgtgtgtgtgcctgtgtgtgtgggtgcacatttgtgtgtgtgtgtgcctgtgtgtgtgggtgcacatttgtgtgtgtgcctgtgtgtgggtgcacatttgtgtgtgtgtgcctgtgtgtgtgtgcctgtgtgtgtgggtgcacatttgtgtgtgtgtgtgcctgtgtgtgtgggtgcacatttgtgtgtgtgtgtgtgcctgtgtgtgtgttgcaggccctggatgccagacactgaataaacgcaggaagacgtctgtcttcattctcctcgtgggtcgctggtccagaaacacctggatggaaagtgctctgcaggaacggtgcctctgcctgtggcggggaccctggtgagcggatgggccagccccacgtgtcttccggccactcagcatgcagtgtttccaggggcactaagagaccaaaatcgagatatgattagctgtaggatgtcatctaatcacagatcatcccgaggctaatttatctcccccatgaccataacacatcaaaaagttgactttttgcagctcggctgtgcctcatcttcccacgaagccccgacaggcacatccagtgaggaaccacagtgggagtcctgtggcagggtcaccccacttccgatgccctccagctgcatcttggcacgaaaaaggctgcccagttctcatgccctttcaagtcccgggctggggggtagcagtggaggctggggttaaccgccgtccgtctcaaaggcctcattgtggagctgcaaacacgaacgtccttgaaatgtgaggggacagtgctctggggcaggggctgctcactggttcatggccagaggtgagcgggctctgggtctgggtctgtgaggtgctgtggacgtcgggggtgctcctggggcagggacacagccacggccctcacaccagtggagccgtcttccttcccgaggcagaggcttggccttctcacaccttgggacccttctctcccctgtgctcatgctggaagcacagcgtgagggggcaaaggtcatgggaggcaaaaggctgggctgaggccgaggctctgtggctgtggccggataccaggtcctgtggtggtgtgggcagggcgcgctctctcctctgagcagcctggggctgcgtgtgtgaacagaaacaggcctgccgatttgaagatggtttgaccaagtctcccaaagctgaagagaggtccctgcccatgtcccccgggtggcaatccacagacgcacctgtgtccatcagacggtatcgttgatagggagtctgaagccacccagacgtggtctgttcacgccgtggacaccacggtctgaggcagacggttacagccaccggcataggcgaatctcagccagagagagtgaactgggacaccattcacgtgatgggccagatgggctggcagcggctcgctggagccgtccgggtgggaacgctgtgtctgttggtctggtgctgcttatgtggctggttcaggtctgtcatccgtcaacctgcatatttatcactggtgcattttcatgtatgttgtacctcaattaaaacattttagggccgggcgcggtggctcacgcctgtaatcccagcactgtgggaggcggaggcgggaggatcatgaggtcaggagatcaagaccgtcctggccaacatggtgaaaccccatctctactaaaaaaaatacaaaaatttgccgggtgtggcggcacgcgcctgtagttccagctactcaggaggctgaggtatgagaattacttgaacccagtaggcagaggctaccgtgagccaagatcatgccactgcactccagcctgggtgacagtgagacttcgtctcaaaaaaaaaaaaaaaaaaattaaagcagatggggtgtgggggctcatccctgtaatctcagcattttgggaggctgaggcggaccgatcacctgaggtcaggagttcaagaccagcctggtcaacatggtgaaacctcatctctacaaaaaatacaaaaaatagccaggtgtggtagtgggtgccgtagtcccagctagttgggaggctgaggcataagtattgcttgaatccagaaggtggaggttgcagtgagccaagaatgcaccactacactccagcctgcgcgacagagtgaaactgtctcaaaataaataaatacataaaaattatatgtatatatatatatatatatatttttttttttttgagactgtatctctgtttcccaggctggagtgcagtggtgtgatctcggctcactgcaacctccgcctcctgggttcaagcaattctgcctcagcctcccaagtagctgggattataggcgtgcgccaccacgcctggctgatttttgtatttttagtagagatggagtttcaccatattacccaagctggtcttgaactcctgacctcatgatccgcctgcctcagcctcccaaagtgctgagattataggggtgagccactgtgcccggcaataataattttttttttttttgagacagagttttgctcttgttgcccaggctggagtgcaatggtgcaatctcggctcacggcaacctccgcctctcatgttcaagctattatcctgactcagctgggattacaggcacccaccaccacacctggctgattttggtatttttagtagagacggggtttctccatgtcggccaggctggtctcgaactcctgacctcaggtgatccacccgccttgggctcccaaagtgctgggattacagccctgagccaccatggctgacaataataaaaaattttaaagcaaaactaaagatttataaattgtaaaatgcggttgtaacaagtatttactgtaccagtaaatatgaaaaatattaatgtcctcacacacatggaggtggcttgtgagtggtgtgagcatttcatggtcagagtttggcagttgggcgagagacaggatggattttaactcgaacatcgcagacacaaaactgaaaaccctgatgcggtgcctgcaccgttgcctcctttcctgcagctgtaaatgggacgagtaattccatccccctcccgcttccacccttcagcacagacgcagtcttcagcaaggaagtgctgggaacgccctggagtgaacccaggaagatgcctgcagtgggtgccagggcccctctccaccgtccctgctgggcttcggggccacgcccgactgctgtgaacggcctgcggagcaccacgtgcgacggctggaggcgagaggtctgcctttgatgtggctgttggtgcagggcctgtggtgccttccgcagcggaaatggcgcgccgcccggggagggcgggagcagcgtcccgggtgcccctgtgaggatgagcgacgagatgactggagggtccctgaagacctcactagggtgcccccagccggtccgctcccaggaagcgacacccccacagccccagggctgcagctgagggggtcgccactctggctgggcgaggctgggcccttgggggcaggcgccagagtggcctcaggctctacaagatgcctgaaaacaccaacctctccagggctcactagcattggacgctttcacgctctgccctggccggaagccccctcaccccgcgcgatgtgcaaactcctgcagggctcactcagtttccagaactttaattattggaaagttctccctggtccagcccccaaatctgccgtgaacgttgacagctgagttgctgctccatgcgtgctttggctgagagcagaggggacccctgtcctccctgagctgctgacgaggggaggggtgaagggtggggcctctggagagggcaggtcccggggaagctccggactcctagaggggcggccaggtgggggccctggtgaccaggacagactgtggtgttttttaacgtaaaggagatccgcggtgtgagggaccccctgggtcctgcacgccgcctggtggcaggccgggccatggtgggtgctcacgcccccggcatgtggccgccctcagtgggaggggctctgagaacgactttttaaaacgcagagaaaagctccattcttcccaggacctcagcgcagccctggcccaggaag

SEQ ID NO: 7066 - DNA, 6000 bp, Homo sapiens
ctggtttctgccattgcttccagctgtgtctggaggatgacagcagagacctccacagggaccccagctgtccttgcagttctgtggtatggttgtgggtgactgttctgaagacccagaaagcacaagagcccatgcttctttctctgtttttcattaggtcccccttacattaaaggcaggtcctccatctttaaggtccacctgcgcccactgaagctggacaagagcctcaataaggacaccctggcgaggaagctggcagtgctcaccccaggcttccctggtgagtgctgcgggctgtgctgttccccgtggtgggagccatgtgtgctctgctccttgtcatggggggtggtgactggccgttctcattcagttctggcagtgctcacccttgtctgcaggacttttcgcctgttgagagtgttcagaggcctcagagatcagtttcttagccccaaaactaatttgtacccacttgaatttctgtcttaattaaagtcagacttagtgagtcttactgcagagctgacagtaatgtcccagggggagaatctggcaacctgatgcttcccgcagcgtttctgcctggggcttgccctccctgctgaggaagctcgtttgcttttctctcttcttttcaatgaaatcctggtctatgctaggaaacctacttccctgcctaggcgggatcaccctcaggaatgagtggggacttttccagggagatgcctgttcttttcacccatgctccgcagctctttgctgcgtcagtacctcatggttatgtggccattggccacggcttctgacctatgcccgccggctcctgccacccctggaacattctgctgtggcatcttatcacctccagctgccttggcgcccccagtggtacccgtcccctggctccccacagtgtcctgcctagtgtcaggtcacgtgtattcacacaggattgtacgtttgcctgctgcaggatggtgagtgaggtcttggctggcaggtatctgaaaggtgtcatctgtcttagacacaaaatgtgcttcctcccttttgttctctcctctggctgacttcagatgtctgtttacataccaaagttaaaaagctggaatgttaccaagactgctttcttctgcccatagacggggatgactcagcactacccctcaacagagatgactttgatgactctgcccctcagcagggcttactaagcactaccccttaacagggatgactccgcactgcccctcaacagggatgactcagcagagatgactcagcactgtcccttagcagggatgacacagcaaggatgactcagcactgcccctcagcaaggatgactcagcactgccgctcaacagacatgactcagggatggcttagtactgcccctcagcagggatgactcagcaccgcctctcaacagggatgactcagcagggatgactcagcaccgcccctcaacaggcatgactctgcagagatgactcagcactgtcccttagcagggatgacacagcaaggatgactcagcactgcccctcagcaaggatgactcagcactgccgctcaacagggatgactcagggatggcttagtactgcccctcaacagggatgactcagcagggatgactcagcaccgcccctcaacaggcatgactctgcagagatgacttagtactgcccctcagcagggatgactcagtactgcccctcagcagggatgactcagcactgcccctcaacagggatgactcagcagggatgactcagcactgtcccttagcagtgatgacacagcaaggatgactcagcactgcccctcagcaaggatgactcagcactgccgctcaacagacatgactcagggatggcttagtactgcccctcagcagggatgactcagcaccgcccctcaacagggatgactcagcactgcccctcaacagggatgactcagcagggatgactcagcagtgtcccttagcagcgatgacacagcaaggatgactcagcactgcccctcaccaaggatgactcagcactgccgctcaacagacatgactcagggatggcttagtactgcccctcagcagggatgactcagcagggatgactcagcaccacccctcaacagggatgactcagcagggatgactcagcactgcccctcaacagggatgactgcagggatgactcagcactgcccctcagcagggatgactcagcactgcccctcagcagggatgactcagcagggatgactcagcaccgcccctcaacaggcatgactctgcagagatgactcagcactgcccctcagcagggatggctcagcagggatgactcagcattgcccctcaacagggatgactcagcagactcagcagggatgactcagcactgcccctcaacagacatgactcagcagggatgactcagcaccgcccctcagcaaggatgactcagcagggatgattcagcagagataactcggggatgactctgattgtccttcagcagggatgagtctgttttgctccgatggaagcatctgtagtgtccatcagcaggtgaatggccaaagtggtatatactgtagtcacattcagctataaaaaggaataaagtatcgatgcatgccacaacatgggtgaacctagaaaatactgatctaaatgcaagaagccaggcacaaaaggccacatagtatatgttcccatttatgtgaaatgtgcagaataataataaaaatgtatagaatagcaaatctgtagggacagacatgaggtgagtggttgccagaagtggaaatgggagttaactataaattgcacagggtaccttacagagatgatggaaatgtcctaaaactagattatggcaatagttgcactacgtgatcagtttattaaaaatcgttgatgtgtgtgtgtaaaatgggtggattttatggtttataaattataccttaataaaggttaacaaaaaatgtggctaaatagtggtgactgatggacacctcccattacctttaagttctctactgaagttcagccttggcctctctgctggagattttccttaacaactgatctgggtcaagctccagcggccaggagcagcactgactgttggctattccttcctgggtctggtgctgatatttcgaatgtttgcaatgaagcagccctgattgctgcctggcatctgagttcttctgttcaggagaaacactttcagcaggccattgagagggtcatcggaggtgagcctgggagcccttagggagggaggggtgtttgcagctctgggcctggcaggctcaccccctggccccagtttcaattctgcatgcaggccgggcgcagtggctcacacctgtaatcctggcactttgggaggccgaggcgggtggatcacttgagttcaggagtttgagaccagcctggccaccatggcgaaaccctatcttgatttttaaatacaaaaattagccgggcatggtggcacacacctgtagtcccagctactcaggaggctgaggcaggagaacctcatggacccgggaggcagaggttgcagtgagccaggatcgtgccactgcactccaatctgggcgacagagcaagactccgtctcaaaaaaaaaaaaaatcaattctgcctgcaggaaccaattttctaaaccaacatatgggacttgggattttccaatagctttcatgccccttctgggagcaacatttagaaattgaaagagatgggccttccaggccgtcagaggcccaaggaggcatattagaaccaggtttgaatgcctcctgtggagggcaaaggagccttcttccctgaaggtaatggatgagatttcctgggaaaagcctcctggaagctgtagggaccttcccgggcctcctcaggacagtactgttgtgaaaggagtgaacaaagtgaatttccttttttcctttttttttttttgagacggagtttcgctcttgttgcccaggctggagtacagcagcgtgatctcggctcactgcaacctctgcctcctgggttcaagcgattctcctgcctcctcatcctgagtagctgggattacggtcacgtagcaccacacctggctaatttttgtattgttagtagagatggggtttcgccattttggtcaggctggtctcgaactcctgacctcaggtgatctgcccacctcggcctcccaaagtgttgggattacaggtgcgagccactgtgcccagccttacagtgcatttgctttagcttggtggggagcagtatccgtctctgtcttcagctcagcagactgtagagtgggctggatcacacagcctcctgcagcttagggaactggagtcagctgtgaggaagggtctcctggggctgccagaccaggcaatgccaacacggtcttgcttggcctggctctccctggtgctgttctgagggtggagaatagggaggtggccagtagccatccttcatggtccaccctaagctgtgagagctgacgttggtcaggtggaagagcattctagctgctgctgctttatttaaccatttatcgaagtataatgtatacataaagtacttatgatatcgagtatcccaaagcaaacaccaaaggtgcttttttttttttttttttgtctgaaatgaagtgatggagtctcgctctgtctcccatgctggagtgcagtggtgcagtcttggctcactgcaagctccgcctcctgggttcaagcgattctcttgcctcagcctcccaagtagctgggactacaggtgtgcaccaccacgtccagctagttttttgtatttttagtagagatggggtttcaccatgttagccaggatggtctcgaactcctgacctcgtgatctgcctgccttggcctcccaaagtgttgggattgcaggtgtgagccactgctcccagcccaaagctacttatttttatttaacttgaaaaaattttaaaaaattttatagaggtggggtcttgctatgtagcccaggctggtctcaatctcctgagttcaagtgattctcctaccttggcctccaaagttctaggattccaggtgtggtcactgtgtcctgccaccagagcctcctgagggctgtcctggtgtgattagagggctctgagcagggccagctgtgccatctgtgcttttcctttgtcctgttacctacccttgcactgggccgttagggcactgagatcatccctctccatcctgtcatgctgtgctgtcatctttagtcaagccagaggatatggtgcttcgctgtgtttcacacacagctgttcccattggcttcaaatgggcctgtttagttaaggctttgtgtgaagtatgtgggaagtgggtttcactttcaagaaggcagcatggagctggggcttggcctctgctgtctggtatagaggagcctggggatcaggtgtagctgcagatacagctgggcgcagagggagtggcctcatttcccagccacctactcctgccgtgcctcactcgccggggaatgtgatgtgtaggtcttgagaagaaggcccaggtcctgcagcccggtgaaaagacaactgtggcctaccacgaggccggacacgtggtggtaggctggttcttggagcacgtggaccccctgctgaaggttggtcctcccaccctgagtgagtccacctggcaggcttgggcctggtatctctgggccaacctgtggtcatgtgggcatggtacattcaaggattggccctttagctttttaaggaataaactgctctagaatttgtcaaaagatcccttcggggtgggaaagcagggcagtgggttccaaatggggccttggccatgcgactccagggagcagcctcagtgttaaacccgcctgactcctgagctctggattcgaccgttggcctctccagagactctgcagggtgggcagag

SEQ ID NO: 7067 - DNA, 6000 bp, Homo sapiens
taagcaagggagggttccattatcttctcagctttagaggctctaaggaacttttatttatttatttatttttttttttttttgagacggagtcttgctctgtcacccaggctggagtgcagtggcacgatctcggctcacggcaaggtccgcctcccaggttcacaccattctcctgcctcagcctccttggtagctgggagtacaggtgcccgccaccatacctggctaatttttttgtatttttactagagatggggtttcatcgtgttagccaggatggtctcaatctcctgacctcgtgatccacccgcctcggcctcccaaagtgctgagattacaggcgtgagccaccgcgcccggcctctaaggaacttttaaacttttgatttggaaaaatttcaagcctaaaaaaagttgcagatgaatacattgcacatcatatatatttattctagactcttcaagtgttatctttattattattttatttatttatttatttattagacagagtctcactctgtcacccaagctggagtgcagtggcgtgatcttggctcaccacaagctccaactcccgtgttcacaccattctcccgcctcagcctcccaagtacctgggactacaggcgcctgccactgcgcccagctaatttttttttttttttttgtatttttggtagagacggggtttcaccgtggtctccatctcctgatctcgtgatccgctcacctcggcctcccaaagtgctgggattataggcgtgagccaccgcacccggccggctttatttattatttttaaactttattttaggttcaggggtacatgtacaggttttttatataggtaaactcatgtcatgcgggtttgttgtacacataatttcctcactcaagtactaagcctggtactggacagttatttttatttgtttttgagatggagtttcgctctgtcgcccaggccggagtgcagccgcaccatctcccctcactgcaacctccgcctcctgggctcaagtgattcttgtgcctcagcctcccaagtagctgggattacaggtgtgtgccaccacacctagctaatttttgtatcttcagtacagacagggtttcaccatgttggccaggctggtcttaaactcctgacctcaagtgatccacccacctcggcctcccaaagtgctgggattacaggtgtgagccaccacgcccagcccaatattttgttatttttttcggctcctctccctcctcccgtcctccacccttcaataggcctcagtgtctgtttttttccctttgtgtccatgtgttctcatcgtttagctccaacttatgtgagaacatgcggtatttgcttttctgttcctgggtcagtttactaagggtaatggcctccagctctatccatgtgcctgcaaaggacacgatctcattcttttttatggctgcatagtatttcatggtatacatgtaccacattttctttatccagtccaccactgatgggcatttaggttgattccatgtctttgctattgtgaatagtgctgcaatcaacacacgcgtgcgtgtgtttttggttttgctttttttctgagacagagtctcgctctgtcactcaggctggagtgaggtggtgcaatctcagttcactgcaacttccatctcctggattcaagcgattctcctgccttagcctcccaagtagctcaggttataggcgcctgccaccacacctggctaatttttgtatttttagtagacatggggtttcactatgttggccaggctggtctcaaactcctgacctcaagtgatctacctacctcagtctcccaaagtgttgggattacaggtgtgagccactgcgcctggcctgcatgtgttttaatgatagaacaatttatattcctttgggcatacacccagtaaggggattgctgggtcaaatgttagtttggttatcaacattcaaagcctgaattttaaacaggttgttgggctgggggctcatatccgtcagctcattcacatttagcactggtctcatccccagtagcttttccaggacagcgaccttcaccacaaagcttgagttttcccaatgcaagcctgggcttcccaagcatttttacttttctaaggaagacatcctggagaggatacctggatagactggggaaccttctctgtgtctctcccagtgctgtctagcatcaattcatgggccacttctttcgagtaatttgtctgcacctcttgggccatgatttccaccatcttttctggatttgacgggcctgccagtgctgcctgtgagaggtcttcccaatctgcttgctgcactgttttagtaaaagcagcacagaacagatgaggcaaatgatcatctgtagttttgacaaccatatgagcttcaatcatggtctttttttttttccatgaaagctggtcaggctgtttttgcactgaacatcctcagtgattagcttgaattttccagatgcaacttcaccattctgcagatgagcagtactgacttcaaaaacacggcccttgaggccatcgggtgtgattttggttcctgacgtccctgtgcctggtgttttccatactccttatgccaagcacagctggtgctttcgcctcatgccagtctctctcagacagtggaccaacctctttcttcttggctcccttcctgccacttcggttaaggtgctcgttcttgcctgctgcatggtggtgcagacagccaagggccagatgttaacattgccattttccctccctctcagaaggctgctactcattatgattattgtcaggttttgaattgtccgagtgtaagctgcagacatagcaacacaaggtcccaagtatttcagtatgtatctcctaagatcggggagctttcctgacgtaaccacaatataatgatcacgcgtgggagatttactactgctccaacaccgttagctcatacagtgtatgtccaatctttgccaattgtctcaaccatgccagacccacgtgaggttgtctcctcagcctctctttgtctctttcacaatactgacattgtggaagaagatggcctagatgttcagcaggctgtccctcaaagtgggattatctggtgtttcccctttatgagtggactcaaggtgagcatgttttgcaggaatgctccggaagggacgttgtgtccttcctggtgcatcacatcaggaggcacacgatgccaccttatcccatcaccagcaatgctgaactgggttgcttggttcaggtggcgcctgctaggtttcttttttcccttcaccgttaagaaatgctgaccctgggccgggcacggtgcctcattcctgtaatccccgcactttgggaggccaaggtgggtggatcacctgaggtcaggagttcaagacatgcctggccaacgtggagaaatcccatctttactaaaaatacaaaaattaggcctggcgccatgactcatgcctgtaatcccagcactttgggaggccaaggcaggcggatcacaaggtcaggagattgagaccatcctggctaacacggtgaaaccccgggtctactaaaaatacaaaaaattagccgggcgtggtggcgggcgcctgtagtcccagctacttgggaggctgaggcaggagaatggcgtgaacccgggaggcggagcttgcagtgagccaagatcacgccattgcactccagcctgggcaacagagcgacactctgtctcaaaaaaaaccaaaaggaaacaaaaaaaagaaaaattagccaggtgtggtggcgggtgcctgtaatctcagctactcgggaggctgaggcagaagaatcatttgaacccaggaggcggaggttgcagtgatccaagatagcgccattgcactacagcttgggtgacaagagtgaaactccgtctcaaaaaaaaaaaaaaaaaagaaggaaaaagaaaaaagaaatgccaaccatggccgggcatggtggctcatacgaagagtcctagcaactcaggaggctgaggaaggaggatcccttgaacccaagaggtcaaggctgcagtgagctatgatcttgtcattgtacttcagcctgggtgacaaagtgagactgtgtctcaaaaataaaaaaataataataataatttaaaaaaaggccgggcaccgtgactcacgcctgtaatctcagcactttgggaggccgaggcgggtggatcacgaggtcaggagatcgagaccatcctggctaacacagtgaaaccccatctgtactaaaaatacaaaaaattagccggccatggtgacgggcgcctgtagtcccggctactcgggaggctgaggcatgaacccgggaggcagtgagccgagattgggccactgcactccaacctgggcgacagagtgagactccgtctcaataataaaaatatcgaccttttaaaaggaagaggatgaggcacaaaatataaagagtttactctagaggctaacgtggaaggatcacttgaggtcagaagtttgagaacagcctgggcaacacactgtgagctccacagcaaaaattagccgggtgtggtggtgcaggcctgtggtccctgttactccagaggctgaggcgggaggatggcttgagtccaggaggtcaaggctgcactgagctgtgaccgcaccaccgcactccagcctgggcgacagaaggagaccctgtctcaaaataaataaataaatgacccagaaggtggggacagggtgggggctgatgtaaagctgtcaagaattctctttggtttatggaaataccattgattagtgatgggctgtgccctggtgcgggtacagggtccgggcggctatttggctaattcacagctatctgcgtagtagccggcagtttccagaggcgaccctcctgtactgtctctggggcctgatcgttgaagaggactcgccttctgttcttttctcattaggcgggaggaccctctggggctgcctggaggaagcctccactccgaccctcgcccgagtgcctactgcgagggcggatgcatgcttcgggacttctaatttcatccttcacgtctttagccgccgcctatggcaaggaaaggcctgccctcgcccctgcctccctcctcccttccccaccgcggctccgtcacgatcggcgcgggcgaccgggcctgggggagcccctccagccggctcctgccctcaggccccgggcgcttccctcgccccgactcccgggcccgaggtcccgggggcggccattcgcctcccaagcactcggcgctcagcccaacggggccgcctttgcagtcgcgtgggcagaacggggtcctcagggccgcggcgattctctagggcgggcggcgccacgacccgccgggagcgcggctcccaggagcccccgcgcgaccgggcctcggtggttgccgttgcaggtcacatggtcgccgtcgctcatcacgtggccccgtcgcgcgtcacgtggccgccggcgcgggtcacgagaacaaacacgggggcagccggcgcttcccggccggtgtcgctccgcggcgggccatggccaacgtctctaagaaggtgtcctggtccggccgggaccgggacgacgaggaggcggcgccgctgctgcggaggacggcgcggcccggcggggggacgccgctgctgaacggggctgggcctggggctgcgcgccaggtgaggccgggcagggcgcaggcggggaaactgagccctcgtgcgccccgcagcccgcgccctcgtgagccttctggcggcgccgcgtgtctcggtcctggaggcgaccgaggcgcggtggactcgggaacgcgccccggggctcctcggcggggccgggctggcgggggcgcctggggtctggagtcttcggaggccgcgccgggctcggtggccgggagggctgcgtgggcgaggcggagctcgccagacc

SEQ ID NO: 7068 - DNA, 6000 bp, Homo sapiens
ggtatctctggttctggaagggggcacgtggtgggtgagctgtcccttggcggccccttcagcacaggacttcagggaggggccctatgagtaaggaggacaaggcactcgtcatctcaactcccagggggacgcccacccacctctggggtacaccacacacgcccagggtcaggcggggacgggccaggggatagcatggctggggtgggacccaggcatctggtgaccacatcagcccctggcgagaacatctcactgattctggggcaggcggtgtgcctgctgagtaggggacaggcttggacagacagatagacagtctgaggccagtacgcccctcctgtgccgtatgcttcagcgtgggtgcaggacaggcgctgcaggtctgaccctgagactccgggcccccgctcctcatgctggcccgccaaggctctgtgtggccggtcaggcctggcagcagcccagccccgggagtctgccaacccctccaggcaggcgggactgtgccggcggccaggacggctggctccagtttcgctgacgtgtccgaggaggctcagggcccggctgggtccgccccgtctccccttccttgggacacagcagtcccaagggcagggcagagaggtcaggggtcgtgggccctcacagaaggggcagagagggctgggcctcgagttcctcagggactgcggcaggtagaccctccctataggcgcggggacccctggctggtgattgagcgggggtccccatgggtgtcagcctctttcttactccatccaccaccccaagctggcgctcttcattccacagataatgccacagccaggagctcagtcaggcactcacacgctttgtgacctcatccaagcaagctcccctctctgggcttccgtctcccacctgtgacgccagggctttgcccgccgggctgcacatcagaatcatccaggaagctttctaaaaaaaacctccatgctggggccccacccccaggccaattaaacaagaaattctgccgggcatggtggctcacgcctgtaatcccagtactttgggaggccgaggtaggacgatcacgaggtcaggagatcgagaccatcctggctaacatggtgaaaccccgtctctactaaaaatacaaaaaaattagccaggcctggtggcaggcgcctgtagtcccagctacttgggaggctgaggcaggagaatggtgtgaacctgggaggcggagcttgcagtgagccaatattgcgccactgcactccagcctgggtgacagagcaatactccatctcaaaaacaaaaagaatgtctaggagtgagacccaggcagagctgtattttggagaagctccttgagcgagtcctccgcacagccagggttcagaacaccaggacagagggttgcaaaggggacagtcaggatgtcagctcgtcttcctgtgcagggaggaggctctgtatcctggagcaggtgtggaccagctggcagggctgggagaggggcaggcacagggtcttccctcctccctccacccaggaggctggcccggccccaggtgggtgccttcagtagcaccgtgggtgacttggcagctgccagacctgttagcccagggcagggagaccagtgactaaggccaggccccagctcaagtgagcccctggggcggtgggacgtgccatcgtagtcacaagaggtgcaacctgtcagggaggacacctgtggccctgggagctgtgcagtggctgcagcccaactagaaatgggccagtccagatgccactttcggcacgcggcaggtgtgatgccaccagggctgggccctcacacggggcctcctcactgccctgtccccacccaggggcaagcacccatctagtaaggccctaacctgcaattaaccctgaacttgccagaagaacaccttagtcaccaaggaaggccgccagccctaagcttcctgggcctgggggtctgagaaggaagtggccctggaaggggtcttgcccttctcaagctccccatgccgaaccccccacaatcacccagggttcttggccaacccgtggcagaaatggcgcccctggggtctgtgagctgatcaatgggcaggcgggatggattcagggaggcagaacaggacctggccactgaaccacaaccctgcccccgcactgctctcaatgcccagccgggctcggggcccagggccagcaggggccccagcggccgccccagccccttcccggtgtaggccggctccctcctccctccttaattaaatctctcaggcagcccctgaggaatgtcagaaccttattgcattccccacgaagagtctggtgggggccgtcccgaaccctgaagaataactggcccctcgcctgcccccaccccctgcccaaaaccgaggtggcctgagggagcctcctccagcctcctcacacccagggaggctggaatgaggaaaagcgggggaggccggcggcccagcgcggagggaaagcgatccggctgactctggaatgtggaaaccgataaaaggaaggaggctgaggccctgcccctcctggtgcaagcaggctcccccaaacacccccacccacccccaaatacacagccctgctccagtcacgcgcacacagacacgcccacgccagacacacgcccactgggcagtgctcctgcagacacacacacacacacacacgtgcaccctcccccttctccaagaactcacgcaaattccacagcagtgaggggagctggttttcttggcagcacagagccttgggctccccagcccagggaggggactctaagggcagctgatggggggtccaggagaggtcactaacagagttaggtggccttgctgccctcccatgagctcagggctggccagtggtcagggatagccatccctgtgggcagcctcccctctacacacctctgctcactggcaggactggctgtctggcctgctgaggtgggagctccctcctgggctcagcagggccctgctttcttgttcccagaggctgcccagtgttgtgttgggacccacttataagcccaggcaaggacttaattttctgtacttgggacttgtcccagctcccccggggctgtcagtgggggtgacagtaatgggagctaggagccgcggacccatctcctgcccggggcatctcccttgccatctccctggcccctgggctgcgtgccagaggggccttcctcgggtaagcacaggtctgggcagtgtctgagaggctccttatgctgaatcccattctcccattcccagaatatggagagagaggtgccatctggacaaatgccctgggaccccagcccccagccccatccccatctgaccctccggacccacaggtagcaggacagctgttccaacgtgcaggagacaggggcggggtggggacaggcagtgcccggcccccaggctggcatgtgtgtgcgcatcctccctccccaggcccaggggaggctagataatggtctggaggggatccagctgggctgctcatcaccagagcctcttcctgcctctgacactctgtttacagaagctccaggccaactcccctgggagaagagagtaaactcaggggactgctccccatcccccacccgcctgccccagctctgttgggtttttgtcaatagctgggcccatcctggactttgctgccccctggactggccctaatggaccctgcttggaaggtcccagcccggccacccctctatgccctcaacacccaaagtacagtctagtgtgaagggaccttggagattttatccaatccccagccctggaggctctcagcctggggaagggggctctaggtcccgctgcctctctccagagcctcacctgtccttggtgcaaaaggcaggcatggggacacctagacccccaggacctcttccttccaccctgcacactccacccctgggccacagcaggggaggcggtcagtgaccctggtgtggcaatcgttaacgaatgggggagaggcagaatggttggcaccaatcggctggcctgccagtgaccacaggggacctcagcagtcctcaggccccagcactgccagcccagggacacaaaggactaggctggctccaggccactgggtttgcagcccaagcaaagccccttccctggcagaggcagagacccggcaccctgcctgatacccgaagctctaagggccctggccagtacaggtccatcccccacctggagggatgggcatcggacgcccaccagccactccccgcccctccctagggctgcatatctgtagcccccagctgtgctttgagtgacaagggtccagaggaccccgggcagcccttctgcacagcagcacctactgccggaccccaggagggaaaagtgacccaagcctgtggcttggctatccccctcaaaggggtttgattcataaaactggtcatgccggaggcccagccgtgggaggaggaagcatgggacggggtgtttattttgtctgcttgcagcctcgcgggctcaccgcacactcaggcgcgcaccctggccggccgcggggctgtcggcgccccaggacggcgggggagggagcgtacagggcctgcccgccgggcggcccaggtgaccgtgtggggctggggccgcggtcccgcccgagagtgcgtgtgtgcgcgcggcggcggtccccgcgcgtgtgcacagcctggccgtggcgcccccttccccgcccgcagccccccagccccacagaaactcaccgggaggcggcggcggcgcagggagccgggcggggcaggccgcggcctcagtctttcctggcgggtcgggcccgagggggtcctgggtcccgaagcaactgcgttcgagtccgcgtccacccgccccgggctcgggctccggagtcggctcgctggaggcaggtcgcgccttaagagtcccggggggcgggcccgccgcggcaggggcggggcctctccccattggccggggcggagccgcgtggagacacgccccttccccaccgaggggctcgtgggccgggttgccctggccctcaccctgcggccacctgacctgcgcggggagaccttgcccgtcgtgggtttgccggatgacactgggcaggtttctgctttttgtgtaaaaagcgagagactatttaggaatcctaagcgtcacagcccagatgcctatgaggcaccaggcaggtgacaaatgccagaagtccaccccagggcctctgcggccctggagaggcaggatggcgggagtggggctggtaagggctgagtcctcatgaccagcccgggccagctagagctttggatttttgaagagaaactggaaatccagatttttaggtgaaatctctcaatgtgttattgttggtagctaatcccaatttcaaaaaactcctggcagcccacacaaagccctttcaagagcctcctaagtataaactccaatgccaaatctgagctcagggtcctcttagccacgacagccttaagagttgtgagcagccctggactctcttccccaccatattatgagatgaaggggctgtgtcagggagggcagtggtggtctgcccacggccccacagttactggcagcttcaagcctgagctgtggaggcataggggtggtcaccgtcggtgggtggggcctgggctgcagttgacagtggcccttgattgggcaggaggggcgggtgccaggggccggactagtccagaaaaatcccctgccttggaggattccaggaaaacactctgccctcctccccctccgcgtttgtggtcagtcatgcctcagagcctttgggggcccagctcagctcctgacttccggagagccttgggacacccacaccccctccagcccggcctgtagccaaggcccttggctgggctagctctagtctttggggggcctg

SEQ ID NO: 7069 - DNA, 6000 bp, Homo sapiens
tctcgctctgcttctctctcccacctcaatctccccctttcctccccacccccgcttttcgctcgctctctctccccgcttcctcctagctcccctgggcagcggttcctaccctgcctggacctgcagtcccgggaacccgcagcctgtcttcctccgcggcagcttctttctctccggcctcactgctctctccttgccctcgctcctcactagccccgaccctgcggtcctgcctggctctcgctccctctctcctactcgctccttcctgggctcccactcaccctgacgtcactccttcccggagccctctcagctcagccacccccgaaccctcccagtggcacagcaaatcagccgggtgccgggggaggggggagagttgtcgctggaggtgcctccccaccccccccgcccggaaagggcgccacgtggggcgcaggggccacggtgccagcctccagccgtcccgcaatgcgaaagaaggggcgggtcgtatcgggcggggcctgaggggcggggcctgaggggcggggcgagcgcggactgacggctgggcaggcgcccgggactgcgggcaaggatgctgaggccagtccgtcgggcggctggtccgtcggtcggtcggcctgtgactcccgctggccctaggcagcccgggagcccgcgagcctggcaaacaccgaaagcggcctcagccaatcgcgggcggcgtcgggccgggcccgccccggcggggcgaggggagctgtccgcgcgccgctggtgctgaaaagggcgctccggagggaaaatcagagccgaggccgcctgttagctggccggggtcagggtttatggaagaggaggggtctgtctctcctccccaaaccccggcccgtcacccacgagacttgtcacaatcgtggaagctctctattcccctggaggagggagagcccattccacccgagctactgtaaaaggggaagggaagccccttgggaggtctgaatgtgaacagggggcataattgggggcctagcaggcgcgaaccaagctatgcagcccctcggcaccctgggaagaggagattcagattccagatgtgctggaatggcaggcggagggggctaattactgctgggaccagagagtttcctttgcctcccctaggggccgcgggagtgaggattacggccctggctcgtatgatccctccctcctccatctgcacttcctcctcctccctccccgtcaaataaatcccaggcccctccctccgcccgtccccaggatctgacgtgggctcgatacctttctcagcttctccctcccgcagctccagtgcccgagcttcggctctcccagttccccaacccaccccttcccctccccgacaagccccgctagagcccagtggagaccccctcgatcctcgaccccaccctaaacccccagaagctgtctttctcctccccagtcccctagcttggggtccagacagcccagtggacccaggcgcctgagcaggagggtaacccaggccacccggccccttcggccctctcggccccaccccctgcagccggagccgcgccccctccaccacagagccgcgagaagaggacagaggagactgagcaaaggggggtgggctccaggcgacccctagcccaattctgcccctccatcccaaggggcagagaaattgtctttctttgctgactcctacgaggaaaaaaaaaaaaaaaaaaaaaacaattaaagggaaagataaacggagacggaggaaaggtggcagccagattacttagagaggcacagaggagagagatcggggtgagtcgccatggggactcccagggcccagcacccgccgcctccccagctgctgttcctaattctgctgagctgtccctggatccagggtaaggacatgagactgtgggggtgggccccaggaaggcgtccagcggggtcctccaccctcctttctcttaatatcctgggtcttccgagcacatgggggaggggagaggcacagctgatggggaaggggcaagccagagctttcaggcttgaacccgaagccccttaaccctcaatattgagaaggcagagaaatgaatgagagaagcttttagcagtgtctcaggggctagatccaagaaggagggctgggaaagttggggggatgtctgcggaggcggcagaagcatggagggacctgggtgggagatggaggtgctgagagagatgccaggcgctgtacacacaactgttcttggatgaatggacaaagacagatgagcagaggcagggctcaaagaccagattttcagtcccccactctgacccccagccagactccagggaaggaggcagagactgcagaggaccagagagagagagggtgggggggagagagagagagagagagagagaaaagacagccacactgcagagacagaaacccagagagaaagccaggcactgcggaagcaagggctgggaggtgcggccagatcctctgcagagccccagggttggggggagatcaccactgaggtgaaagggaaggcagcaccggcgacccctctgccttgctggcgctgtccagggtccataagagctaaggtgttcaatgaaggcccacacagcccagggagaagggagaggggaggggagagaagaggtgtgggagtgggagtatgagggcagctgggagcccctcctccgatcttggccctcagtcgagcctgggaccatctgagcccctgcaggcccagctgatggaggagggaggaagagttctagaaaatatctctctggagaaggaaggggtgtggggaagtggagaagctcacacaacttcacctcctaggtctgcccctgaaggaggaggagatattgccagagcctggaagtgagacccccacggtggcctctgaggccctggctgaactgcttcatggggccctgctgaggaggggcccagagatgggctacctgccaggtgaggcccccagagtggcaggagtggcctagaggcagagggagggatatgggctcagggagatggggagccaggctagagaagagcaggcagagagagactgcagaggaaagagcctgcattcctgtgagattcagggaacacagaacgagactgtcagagaaagtcaaacctgggcacagacagaaccagagagacagagacagaatgattaggtgacagtcagacagaaaaacagacacatagaaacagagatggaaattcagagaaccagactcagagaaatggtggaagacagagacagagagaatgaaacacaaaaactagtggatctcgaatcatgaaatcagagtgcaatcagaatactaaacagggaaatggggaaataaagagttcgagagagaatgagacagaggagagaggagataaccagagagagaacgtgatctgagtgaggaggcagagagagaggctcagggagaggagtatcagggtggaaggggctgggtggagagaagggaccagaagagaaagaggggggactcaggctgtggaagccttgggaggaggtaggggctggggtggggaagggaaaggtggggggtgctgtaccttgtgcgggaggcttttgtggtatggcaggggaacccctagcttccctcagccctgctccccacccaaggtcctccatgtgctcctcctgtgctctgatattccctgcactgtcccaggatctgatcgggaccccacgctagccacccctccggccggccagactctcgcagtgccctccctgccacgggccactgagccggggacagggcctctgacaacagccgtcacccctaacggggtcaggggggcaggccccactgcgccagaactgctgaccccgcccccaggaaccacagccccacccccacccagccctgcctccccagggcctccccttgggcctgagggaggagaggaggagacgacgaccaccatcatcaccacgacaactgttaccactacggtgaccagcccaggtgaggcgacagcaaggggatgggggtgggaggaccggagaggtacacgctggggatggatgggagagaggctgctgggaactgtggaaggagtcctgggtacagatgggagaataataataacaaaggtagcatttctgtacccttactatgtaccaggcagtgttccaattgtttcagctatataacagttgggaaagggagttctggctcaggtgggagagggagcattgcttaaagatagtgatggacatggtggctctagcctgtaatcccagcactttgggaggccaggcgggcagatcacctgaggtcgggagttcgagaccagcctgagcaacatggagaaaccctgtctctactaaaaatacaaaattagccaggcgtggtggcgcatgcctgtaatcccagctactcagaaggctgaggcaggagaattgcttgaacccgggaggtggaggttgtggtgagctgagatccagccattgcactctagcctaggcaacaagagcaaaactccatcttaaaaaaataaaaataaaaaaataaaagatggtgaggggggcacagcagcgcacagctgtaatcccagtgatttgggaggccaaggcaggaggatcgcttgaggccaggagtttgagtccagcctgggaaatgtggcaagaccccatttctacaaaaagttttaaaaattgtctcaccatggtgatgtgcacctgtgggcccagctactcgggaggctgaggagggaggatcacttgagcccaggaatttgagactgcagtgagccatgattgcaccactgcactccagcctgggtgacagagcgagaccctgtctcaaacaaaacaaaaagatgatgagaagtgctaaggagaagggagatgaaggccagagttgcttggctgggagggcaaaagcacaggcattccttccatcccagccatttgtatctcctcagttctgtgtaataacaacatctccgagggcgaagggtatgtggagtctccagatctggggagccccgtcagccgcaccctggggctcctggactgcacttacagcatccatgtctaccctggctacggcattgagatccaggtaactggaccaaagcatgtgactgtgcagcttccaagccttttcctctgggctgtgggtgtgcacgggtttggcctgggagccaaagaacctgtctgatgactcaggtgacctcaaaaactcttctagatttctacaacttgggcagcagcgtggtgccttttgggctgctacacacagggcaaaggcacaggacaggggctttggaagtcaaacacctggctgacttgccctggcgggtctgtgtctggcttctctaggtgcagacgctgaacctgtcacaggaagaggagctcctggtgctggctggtgggggatccccaggcctggccccccgactcctggccaactcatccatgcttggagaaggacaagtccttcggagcccaaccaaccggctgcttctgcacttccagagcccacgggtcccaaggggcggtggcttcaggatccactatcagggtgaggagtttgagggtgctgctggaagggcaggggccatactgcatacactggacatctttttttttttttttttttttgagacagagtcttgctctgtcgcccagactggaggtcagtggcgtgatctcagctcactgcaagctctgcctcccaggttcacgccattctcctgcctcagcctctcaagtagctgggactacagacgcccgccaccatgcccagctaattttttgtatttttagtagagatgggatttcaccgcgttagccaggatggtctcgatctcctgactttgtgatccacctgcctcagcctcccaaagtgctgggattacaggcaagagccactgtgcccggcctatagaggggacatctttaagaaccatcgaagcacagggtgccg

SEQ ID NO: 7070 - DNA, 6000 bp, Homo sapiens
atctctcacctaatgaaccccaaattgagacctgttaggccaggttcgggggctcatgcctgtaatccgagaaatttgggaagccgaggtgggaggatcactggaggccaggagttcaaggttgaagtgagccatgatcgtgctgctacactccaagctgggtgacagagaatcccatctgtaaaagataagaataaaaagatctgttggttcaattttctttctttctttttttttttttttgagacagcatctcactctgttgcccaggctggagtgcagtggtgcaatcatagctcactgcagcatcgacctcccaggctcaagcaatcctctctcctcagcctcccaagtagctgggactgcatcatcaagtcatcatgcccagctaagttttttttttttttttttttttttttggtagaaataggatttcactatgttgcccaggctggtcttgaactccggggctcaagggatcctcctgccttggcctcccaaagtgctgggattacagcgcccagcctcaattttcttttctttcttttttttttttttttccggagacagagtcccactctgttgcccaggctggagtgcagtggcacgatctcagctcattgcaacctccacctcccaggttcaagtgattcttgtgcctcagcctcctgagtagctgggattacagacgcatgccaccaagcccacttaattatttttgtatttttagtagagatggggtttcgccatgttggccaggctggtctcaaactcctggcctcaagcaatccgcccaccttggcctcccaaagtgctgggattacaggcatgagccaccgcacccggcaataggtagtttttcgactctttccctccctccccttttttggagtccccagtgtctgttattctcatctttatgtccataggtacccaatgtttagctcccacttacgagaacatgtggtatttgattttctgtttccgcattaattcagttaggataatggcctccagctgcatccatgttgctgcaagggatataatttcattcttttttatggctgcatagtattccatggcatatacatatcacattttctttatccagtccactgttggtgggcacctagattgattctgtgtctttcctattgtgaacagtgctgcaataaacacacaagtgcaggtgtctttttggtggaatgatttctttctttctttttctctttttttttttttttgagacagggtctcactctgtcactcaggctggagtacagtggcttgatcttggctcactgcagcctcaaactcctgggctcaagcgatcatcctgcctcagcctcccgagtagctgggactacaagtgcacaccaccactcctggctaatttttttttttagacagggtttcgtcatgttgaccaggctggtagaatgatttcttttctgaatatgccgtactctggactgcctcccagctttggcacacacctctgcctagaatacacttgcccccaagcttgacctgggtaactcctcctcatctttcaggtctcagttgagacaactccttttctgggaagtgaggtgttaatctttgttccctcctacctcataggaccctgagttcccatggcttctgaccatcccctgtccccacgtcagtttccctggatggggattgtctgtgtatttgtctgtcttccctatgaggctgtgaagtcacagctcattgaccttgggcctggttgtatccccacaatctatagtcgatattcagtcaatatttactgaatgactgggtgactggtgcaaaagcctcccgtctctggacaaagcagggctcagcactgtccatcattttcctctgaaattggcttgaactccagcctcatccttacctgtcttcaacaagttcttctggaggcaggcagggctggggttgagcaagcaccgtgggaagagagcacaggagagaggactcgacaggttccttgaccagagtgtccccctcccctcactgcaggccccctgcgcccaggtcatggacaccctcttgctaaactcaccggctttcacactgcactgtgtctcccttcgtcctgcttcctttcttattctggagagccacgaaggaaacctaacggttgcctttactttagaaatattggccgggtgcagtggctcatgcctgtaatcccagcactttgggaggccaaggcaggcagatcacttgaggtcaggagttcgagaccagcctggccaacatggtgaaaccctatctccactaaaaatacaacaattagccaggcatggtggtgtgcacctgtaatcccagctacttgggaggctgaggcttgaacctgggaggtggaggttgcagtgagccaagatcgtgccactgcattccagcctgggcaacagagcgagactctgtctaaaaaaaaaaaaaaaaaaaaaaatatatatatatatatatatatatatatatatatattattgtgctgggcatggtctttggctcacacctgtaatcccagcactttgggaggccaaggtaggaggatggcttgaggccaggagtttgaaaccagcctgggcaccatagtaagacccatctctacaaaacaaacaaacaaacaaaaacagattagccaggcatggtggtgcatacctatagtcccagctacatgggaggctaaagtgggaggatcgcctgagcccaagagttcgaggatgtcgtgagctatgatcttgccactgcactccagcctaggcaacacagtgagaccctgtctcaaaaaaaaaaaaaaaaagaaaaaggaaggaaagaaggaaggaagaaaggaaggaaggaaggaaggaaagaagaaaagaaagaaaaagacaagaccaaaatttggccaggcacagtggctcatgcctgtaatctcagcactttgggaggccgaggcaggcggatcacctgaggtcaggagttcaagatcagcctggccaacatggtgaaaacccatctctacaaaaatacaaaaaaattagccgagcatgatggcgggtgcctgtaatcccagctactcaggagtgtgacgcgggagaatcacttgaacccgagaggcggaggttgcggtgagccgcgatcgagcaattgcactctagcctgggtgacagagcgagactccatctcaaaaacaaacaaacaaacaaacaaacaaagaaataccaaaatttattattttaatgtattctttggaacaggtaacctatgcatgtggcacaaaattcaaaaaatacaaaaggatgtacgttgaaaagtaagtctttcctcttcctgccctgtctccccagaggtcaccatagttatattttcttctgtgtatttattatttttttattattatttttattttttcactctctcagcttgtcaagagacacagttaccattcttgtgcaggcctccagaaacaacatatgaacaactaagcaaacacggctaagctctttccctctcaaatggcagtattccaagcatgcttctctgcacttgcttttcttttttgatttttttttcttttttctttttcttctgagatggagtcttgttctgttgcccaggctggagtgcagtggcatgatctcggctcactgcaacctccgcctcccaggttcaagcaattctcctgcctcagcctcccaagattacaggtgcccgccaacatgcccagctaatttttgtaattttaatagagacagcgtttcagcatgttggctaggctgatcttgaactcctgacctcgtgatcctcccgcctcggcctcccaaattgcggggattacaggtgtaagccaccatgcccagcctgcactttgctttttttttctttgagatggagtctcgttctgtcgcccaggctggagtgcagtggcgcaatctcggctcactgcaagctctacctcctgggttcatgccattctcctgcctcagcctcccaagcagctgggactacagttgcccgcctccacgcccagctaattttttgtatttttagtagagatggggtttcaccgtgttagacaagatggtctcgatctcctgacctcgtgatccacccgccttggcctcccaaaatgctgggattacaggcgtgagccatggcgcctggcctgcacttggcttttctaagttaaaatgaaactgtgaaatgattctagggccaggcacagtggcgcacgcctgtaatcccaggactttgggaggccgaagcgggaggattgcttgagtccaggaatttgagaccagcttgggcaaagtagtgagaccttgtatatttaaaaaaaaaaaaaaagatgattctaaacaagagcaaaacagcctcttgtggctgcaccctatttcactgcatggaattacatcatgactgatttaactggtcccctgcttctgggtatctcagttgtttccagtcttttggaacgtgctacatttaagaattttgaacttcatggccaggcgcggtggctcacagctgtaatcccagcactttgggagaccgaagcaggcggatcatgaggtcaggagttcaagaccagcggggctaagatggtgaaacaccgtctctactaaaaatacaaaaacttagccaagtgtggggcgtgcgcccctgtaatcccagctacttgggaggctgaggcaggagaattgcttgaacccaggaggcagaggttgcggtgagccaagatcgcaccattgcactccagcctgggcaacaagagtgaaagtctgtctcaaaaaaaaaaaaagaaaaaaagaatttgaacttctattatttggcttatgggttggcatatctgtaagataaaatcctaaaagtggaatttctgggtctaaggattttttttttttttttttttttttgagacagggtctcactctgttacccaggctggagtgcagtggagtgattatagcttactgcagccttgaccttctgggctcaagagatcctcccaccatcacgaggtcaggagatcgagaccatcttggctaagaaggtgaaaccccatctctattaaaaatacaaaaaaattagtcaggcgtggaggcgggcacctgtagtcccagctacccgggaggctgaggcaggagaatggcatgaacctgggaggtggagcttgcagtgagccgagatcacgccactgcactccagcctgggcgacagagcgagactccatctcaaaaaaaaaaaaaagaaaagaaaaaaaaagaagagagatcctcccacctcagcctcttgagtagctgggaccacaggcacacaccactatgcctggattttttttttttttttttttttttttttgtagagacagggcctcaccatgttgcccaggctggtcttgaacttctgagctcaagggatcagtccgtctcagcttccccccagcccagacactttggctttgcccattttatgggtaataagtgatatctcagggttttttgtttgtttgtttgtttgtttgttttgagactgagttttgctcttacagcccaggctggagtgcagtggcacgatctcagctcactgcaacctccgcctcccgggttcaagcgatcctcctgcctcagcctcccaagacacataccaccacgcccggcatttttagcagagatggggtttcaccatgttggccaggctagtctcaaactcctgacctcaggtgatccacccacctcggcctcccaaagcgctgggattacaggcgtgagccactgcgccccgccccctcagtgttgttgactttacatttctcttacttttttttttttttttttttaagagactgtgtctcactgtgttgcccaggctggcttcactcaagcgatcctctcgccgcagtccctggagtagctaggattacaggcacccgccaccactctcggccccatttctcttatttaaaaaaaaaaaaattgccgtgaaatacgcatatcg

SEQ ID NO: 7071 - DNA, 6000 bp, Homo sapiens
gagatcatgccactgcactccagcctgggcaacagagcgagactccatctcaaaaaaaaaaaaaaaaaaaaaaaaaaaaagaaatttataaattggactaatgaaaaagcttttctctgtgaaagacactgttgagtgagaaaaaaaaaaaaaagccactgactgggagaaaaaaaatcacctatgaaaagatttctttcatccagaactcaaaactcaacaataagaacaaaacccaattatgaaacagatttcaacagatacttcaccacagaagatttaatcattacaaaaatgcaaattaaaaccacaatgagatggcactattctccattagaataactgtaatttagaaaaatcactaagtgctgggaactatgtagagcagctgaaactctgatacagtcctggtaggagtgcaaaatgatagagccgctctgggaaacaggttggtggtttcctataaagtaactgtgtgactcagccgtctcttctggatgggtacccgggagaaatgaaagcttatgtttatggaaaaaaacctataagtaaatgttcataacaactttatctgtaataaccaaaaactagaaatgtttcaagtgttctttagcttttaaaagaataggccaggtgcgatggttcacgcctataatcccagcactttgggaggctgaggtggggggatcacttgaggtcaggagttcaagagtagcttgaccaacatggtgaaaccctgtctctactgaaaatacaaaaaattagccgggcctggtggcaggtgcctgtaatcccagctacttgggaggctgaggcaggagaattgcttgaatccttgaggcggaggttgcagtgagccaagattgcactactgcactccagcctgggcgacaagagcaaaaactccatctcaaaaaaaaaaaaaaaaaaaaaagaataaactgtggtacatccatatagtaacatctattcaacaataaaaagggataaactacagctacatgcagtaaccccaaatgcatcatgctaaataaaatgagctagactcaaaggatacatgctgtgtgatttcatttatatgaaattctggaaaaagtgaactgtaggacaaagaacagatcattgcttaccagggatgaagactggagatggattttgactgcacagtgacagcacaagagaagttgagtgggttgtggaactgttcttgaagtgtcagcaaggactgagtagtggattgagtagagcaagcagactcaaagaatttgctttagaagtataaattgtctcgttagaattcaactgtaaagagaaaaatgtatataaattggtacaaccactttggagagctatttcggatgtgctctggtaaagctgaaaatggtcacatgctactacacaagtatacttctagatgtatacccaaatgaaatcgtcatacctgtgcataaagagaagacaacaatgtttacagcagtattagctaattataaaagtagaagcaagctaaatgcccaataggagaatggatacatagtgatttatttctataattggtatgaggttttaaaatatatggaacaatacaacatatttttatagatatgtaagtatgaaaatattaagtgtgctttaagtgaaattaaacaatatttattagatctcattcttcattgaaatattccttgaaaagataattccatattcacaaatttttaggagcgttacctggaatattgactatagaagaatgttgtattgcttttaataaaagtaaatcagttaaacttaaaaaaattattacagttgacatgggaattggatcaaattttaaaatttgaatgtttaaatgtgtaaataggccaggcgcagtggctcacgcttgtaaacccagcactttgggagtctgaggcaggcggatcacttgaggtcaagagttcgagaccagcctgggcaacatagtgaaaccccatctctactaaaaatacaaaaaattagccaggtgtggtggtgcacaccggtagtcccaactactcaggaggctgaggcacaagaatctcttgaattgggggtggaggctgcagtgagagccgcgatcacgcgactgaactccaacctaggagacagagtgagattctgtctaaaaaaagaaaacaaacaaacaaaaaagtgtaaatagatggttttatttaagaaatctaaattaaatgttaaaagtcaccattacccttgaatactaaatgtgagaaactagttcatgggtgatgtttaagaaaaatatccatttataaatataaaaagaagccagtcacggtggcccatgcctgcagtcccagcactttgggaggctgaggcggaaggatcacttgagcctggcagttcaagaccagcctagacaacatggcaagaccctgtctctatttttaaaattaaaaatatattttaaaaataaatatacaaaagaaggcatcgatgtttaagagtatacaaatagtgttttagtccacttttatcagtggccttttcatgatagtagctttctggggatttcatttctgttggggtcttcaggggctccaataaatagcatcccttttccctggtggagtgctgaaccaattgagaaataaaagtgtcagtgtgtagggagttggaaaagcctctttaccacagtgaaggctaggatagagagagcaacgcagagagatgatctaattagtgttggcaactccttgcccaccagttctacgtctcacctaagtctagaacagcccattccactccagggaaagttcgcatctgcagagcagaccggcctacccagtcccacttcctatgaggggagggaaaaagaaaccaaactcccaccatccaggtaacttgccctgcctccctgggtaggatatagggatagggtaagaggtcacttacttgatgaaagttgtaagtaaaagatcccttctcatgcaatctggagtaaaagaaaagtagtttatgcccttctcccaacattgcaatttgtcagattcacgttatgaatatttcccaaaaatttgttgaactaaacaattcaatatttagctgtatttacagtagaaaagtgctgtgatcttgttattatttatctttaactcgatgtttttttaaaaatatgtctttgaagagcatttactatagccttatataataccatatttatttggattaaaagaaaagcagagagtaaatataaatacttcagacagcttgattattctactgatacttctaccaagtcatagttttacaagcctagtcactttctcattgtctgccatgagcaagaattatactggatgaaactgagccagtgaccttccattggaagacatcacagtctagtggaagagggaagtcattacagcattagagctcgctaccagagtgtgagcggagggtttgggttatataagtgatggaaaactaatgagaactgttgatatatttaagaaaacatattgcttctttgttaaaatacacgcatgaagactttgtaaagttttgaactggaaatcctatttcattaccaattttccaccattctcacggaagtggtgaaccagtcatttcaaataaaccaaaattatttagtcaaaatgtaattctttaagctatattttgtaagttgttctctcttagttttatgccatcaaggtatttggtggggtggggggggaatatatgacatgacatttttgttttattaatctcttcgaattaaagggtagatgtggcatactgctccctcagaaataatagctaggaagtgaatactcattagatgtcttgaatggcaattcaaaggtaatctttattcactcactcaaattttattttaatgatagagtcacatatgagaaactagagcccaaacagggaacactgtgtgagtatgtaaagcgcttcatggaatgagaaggacgcacatttagagtcagaccaacctgggtttaatccttgccaccgaataacagattcatctctgcccacaaaaaaacatgatacctacttcattaggctcttctggagattaatgcttaaaatctaaattcacaatgtaagagaaatcgccaaacaagaatgggtcaagagtgtttaggaaataacttagaaccatttagctataaaatttgaatgggggatgctaatagagcttcctttgatagtacagttgacgtctgcctgtctgaaaatgcaggtattgttaagaggtgaaataaagcaaccatgtagaacagtaggatattgtgtaaataaataataggacatccgggaataggtatggctaagagtatagataaaaacatttttatatgttacagctaaagtaggatgtgtatatcttacaattaaacacaggtttttttaatgtgcagaaagagtgaaaagaaactcaccaattaatcacatgcattgttggaataatagaaatatgagtgattattttattttctcccctgtccagtaccatgagattgcttttataatgagaaaaatgtgagatagttatgccttgtgagcaaaaagtttctactctttatagacaaaacacaaagtaagttccttaatgcttggttccattataaagacaaccaaagaaacagatcattaatcttagttcctctcactatttaggcatcagccatttatcgattatggttttctgtcagctgtcattcggtgtcccatgttgtctgtggaaaatagaaatagaaaaattcaaattaatatatctttttaaaagcagtgtttttgtgttaatattacagatttatttgaggttcctagattatcaaatggagcactcaaatgaatgcaagagaaacttcgttgcagtctatgatggaagcagttctattgaaaacctgaaggccaagttttgcagcactgtggccaatgatgtaatgcttaaaacaggaattggagtgattcgaatgtgggcagatgaaggtagtcggcttagcaggtttcgaatgctctttacttcctttgtggagcgtaagtaaataattcctatagtattgagatcttttacatatttttcactcattcacagtacactcagcatttacttttttaaaatatttattttaggatgtttttttttgttttactacagctctttttaatgcaagaatattatttaaatttaaaatattttaaattttatttaatttttagaggtggggtgttgatttgttgcacaggctggccttaaactcctgggctcaagcgatcctctgcttcagcctcccaagtagctgagactgcaggcacacggcactataccaggcagcatttacttttgacaaaaatgtgcaagtcacaaggtaggagcaactatatcttggtccctgttctcttggaatggactggtatgggtgaaaaaaccatgttaacatatcaattggaacactcattataaaggtgtaaacaaatggtagagattgcagacagggaagacttatactttctctcaagattttctaacttagtagtagtattaatttagcttggtgaatagttatgaatccatgaaactatggtcatcaaagatttagatatgccatagatctttttctttttaaataactttaaacttacagaacattgtaaaaatgatagattccctatgtgccgttcactcagattccactaatgccaacatctctcaaagccagagtaaaactgaaaattaacacagatacgatattattaactaagctatagaccggtccggtatctctagttttgctatgaaggtccttttatgatccagtttcccacattgcttttagttgtcaagtatccttagccttctccatctgtgacagttactctgtctgcatctttccttggcacattgtcaagagtactagctagccagtttagtagaatgtccatcagtttgggtttgtctaatgtttcttagggattccattgaggctgtgtatttctgtc

SEQ ID NO: 7072 - DNA, 6000 bp, Homo sapiens
tacatcccttttaaagaaaaacatctatgaaattatagatggctagaaacagagtacctggtgagacactgtgggtgaaaagcatagtgaaaaagaatctattgtatattgggccccaggttttatatatacaaacaggtaaataaacaaaatactcaactaatattttccttctatgatatacaaaaggttgtatatcaagtcagtcatttttctaaaaattctggctcttctattgtatgtgcattattaggcatgctcaaaaggcagcattttaattttgcaacagatccaaacttatacatcccaatgactggtgtccttccctttagctagtagctctgtaaatctacatcctaattatgatattgttcaaagaagttttgaaactcctaactcgaatctaccctcagaggttttaagataatgttttaatccaaatcctaactcgaatctaccctcagagtttgtaaaatattgttttcattcaagtgaggtctgactacaatggttacaatttgtgtaatttggaaactgacctaaataatataagagttccaaacatatttaagaaccatcaactgcagtagtgggaaaatctaaaagcagcactactggaaaaagttttccaagatgaggatattatgtaaatatctaattccagcctatatgcccagcacttgctttttttttttttttttttcctatagacagaatcttgctctgtcacccaggctggagtgcagtggtacgattatagctcactgcagcttcgatcacctgggctcaagtaatcctccgcctcagcatcatgagtagatgggagtacaggcacgtgccaccaggcccagccacttttaaaaaatttttttactcaaagcccttaatttttcttggaatctttaatcttccaagaccttcctgcaatgatgttagttcagttcagcccgtgttggaataatatggggcctccccactcctctctttaatccccttttgtgaaaatctacatttaaaactacccatttggatataggtttagaatgctttgcagtttcaaaaggctttcatatgtatacttcattttatacctcccttcaccccatgaagaaggtagtattatttccttattacaagtgagtaaatgagattcaaaaaggtagaacatggcatggtggctcacacctataatcccagcactttgggaggccgaggcaagtggatcacttgggctcaggagttcgaaaccagtttgcgcaacatggcaaaaccccgtctccaccaaaaaaaaaaaaaaaaaatagctaggcattgtggcacatgcctgtaatcccagacactcaggaggctgaggtgagaggatcacttgaacctgggaggcaaaggttgcagtgagctgagatggcaccactgcaccagcatgggtgacagagtgagaccctgtctcaaaaaaattaaagtagaacaacttaggtgtacatggttacaagaaaatgtaatagaaataaatttaagaaataaatttaaatttaaaatttaaaggataaatttaaatttaataaattgagttccttaattatattttaagacaaattttacttttttctcattacaatggacaataggtaccacttctacctacaagaattataaacataggccaggcatggtggctcacgcctgtaatcctaacactttgggagacagaggcaggaggatcacttgagctcacaagtttgacaccagcctggtgagggagactgagaagtcggcactatgaggaaatgaagccatgtaccctgaaaagtgtaaatttggaagaaagctggatgaccatcttgaaatgcttgaaaggatattgtacaggtagtactaaattatgaccccttttcactaagaaaacaatgggtcactcaggaagcactaaaaatgcagttctactaagcagaaaaatgcagggtgccctgggtcagcatgccagccaagttctatactgcaggacaagtccaaagctcctcctttaaaaaggctcctgcaggcaacatgcctgcacactaacgtgcagaaagggactgtactactcaaaaccaccaaggaagtggcagaggtaagtcaacatctaatcctgccactctgtgtggcaaagaacgctgggagcaaattacttctgctgctctttgaaggctgtgccagcgtcacctggatagcgcaaaggaaacaagagaaaggaacagagcccctcttctggcctctgggctaccatacagaaaagcaggtaactggggaaggacagacttgtgcgtggaaacaggctaatgctatggattactcagtattggtattgttaaagcctttttttttttttttttttaagtagagtgttttaaaggccctattagagaaaaaaagacattggaaactattaccaaggaatatggtacaatctttccacataggctttttaagtagcaaacaatacttctaggataactagatggtctgatgagttcttataatgccggacttctatgaagacttttcaatatatgttttctaatttaaatgattaaattttaacattgctactcagttaaaggcaataatatgaacatcaaggatcagatcacacagtacctgattattagtgattactttcaagcaggagaattgaggattgttgctttggagggattttcataaaataaattaaaaacctgaagggtatggtggcgcttgcctatagtcccagctactccagaggccaaagcaggggatagcttgagtccaggagtttgagaccagcctaagcaacatagtgagaccccatttctacaaaaaatttaaaaattagctgggtgtagtggtgcacgcctatagtcccagccactccagaagctgaggcaggacgatcacttgagcccaggagttcaatcaaggttgcggtgggctacgatcacgccactgcacttcagcggaggagacagaatgagactctgtctcaaaaaatacacaaatgaataaataataaaaaccttccaaaatcttgccagaataataccaacaaatagtgaaacttaaaatgtgactaaatcgacttttcaagttcacaatgtgcccatggctaatcaatacatatgcacagtagaaagaaaatgaagtctaataatgaccactcttgcctagacagggaactaagtgtgcctgggcacagaaggcaaaataatttgggaaaagtaagcagaaggagcagagtcgtatgttgggaaactagaatccaatacaatttatcaaagagtactgaaacttggaatgtgaccaattccactcaggcaataaccaaagcaggtcagatgggagccaaaatattttccatgcttgagaaaatcaaggcttttacaatataaatgaatactgggctgctgtggaaggtttgttggtctttgttgctttgttttgctttcttttaacgggggtggggggaggtaccagtctcctttgagaatctgaagaaagcaaaggattctcctaaaaaaatgtacatagtcacaagattttgaggaaaaataagacatgtccaaccctccggaaatccattcagagtcaggaacccctaatttaaaaataagggataactgccaggaaaggagaagctctaaactgaaaacacaacacctccagtagagttaggaataggaggcgggtgcttggcaggtgagtttgaagatacttgttgagagcatacgatataccagcattgtccaataaaaatataatgtggaccacatataaaattttagtggccacattataaagtaaaaacagcagaaatcttaacattttattaaccccaagtactcaaaatattacctttccaacatttaatccatataaaatgtattaatcaaaaagttttttcaaaatctggcgtgtattgtacacttacagcacatttagggtgaccaacctcctggtttccctgggacggaggggctaaaacataggactttcaatgctaaaacagacaatcgcagcaaaccaggacaactggcaattctatcatctcaatttgacgagccacatgcactacacagtactggacagcaaagtcatccatcatgcatggtgcaaagtggaatatacacattattcaatttattcttcataacttgcctaagagatggatgctgtcagtttccaaattgcagaataaaagaaatagaggttaaagctctcacccaaagtcacaccaatagggcgagggtactgggcaatatagtagtaagcctggggcctaagaaatgttatgagtgaaggagcagaggtgagaagctaggaaagttccagaaagggggaccagcgaaaatgtgagcagtaaaggccctttacaaagggaaacagaaggattagggggagaaggagaagggtggcagggagtatagaagaaaggcacccacaaatagtgcagtttaggaatgaaacaggaaaagttaaaactcacggagcagagaatgcctcagcggacaaaaatgatgggtgacagaaaaggggaggcggataggagtaaagggcagtggggagaaaggtgaaaagcgaaggcaagtgaaggcagagatcaccggggagaaagaaagggcctggaaagttaaaagcactggcctaggaggctgaagaccgagggcgaggaattgcggagagggggaagaggattcaaattaaattatccagaacggtagggaactgcgtagtttcaccaggtgtcaggcactacttcatgaacgatctcattcatggtcatggggcaggtatctgacatccccattttgcaagtgatagcaccagagaggcggaaccgagccgcgaaggccgccccgaactgagcctcgcgctcaaggcaggccgtggcctgggcccaggtccccggaggaggccgcgccgcccgccgccgccgcgggggcagccaggcctacctgtgcagcggcggcaggtcctgcgcgtcgctggcggggtcaggcgtgttggggatgacgcccaggatggtgctttgcagcgacgtgcccttcagaaggcggctccgcaccagctgcaggttgcgggccgagtccacgctggtgcgcatggtggagccgggcagcaggacgccctcgtgggtgagcagcagcgggaggcgactggggatctggatggggctcactgatgacatgctggcagcctttcgcactgggggctgtcaaaaagagccagacagacagctgcccccggcctgccccgcagtcaccaaacctcagacccgcctccacgcctccgcttccggctacgcgctacggtccgtccccgggcccaaaagccatggcttcgcgctgctctctaggagagcctcccggtaagacttgagcgtcctacctatgcggaaagacgtgcactcaagcgtgcagcgaccttcgcctcacttacagagtatatttggaaggatgatcttatttgaattgtatatacttgaagtgtttttaacgttttcttcgattttttacatatacttgaagtgtttttaacttttgattcgaactaattatttatttatttatttatttatttattctgagacagattctcgctctgtcgcggaggctggagtgcaatggcgcgatacccacggcttgcagcctctgcctcccgggttcaagcgattctcctgcctcagcctcccgagtagctgggattacagatgcccgccaccacacccagctaattgttgtatttttagtagggaggggatttcaccatgttggccaggctggtctttaactcctgacctcaagcgatccgtccacctcggcctcccaaagtgctgggattacaggcgtgagccaacgtgcccggcccgaattgattttagatgtacaaaactacagcagagttcctatatacctttcacccagtttcgtctgttatcatcttacataatcatagttcaatgatcaaaaccaggaaattaacattatt

SEQ ID NO: 7073 - DNA, 6000 bp, Homo sapiens
ggaggcatgatgagccttgttctgggagtgcagaaaaaaagaaatgaaaccagtcaccactgccagggtgaagaaccactgtggatgccacaaacagggacaaccagcaaacaggaaggagcaggacgcctctcctaccggcttcaaggttccctctagtgcatgcttcctccaagctcagaggtcctggccccatctgggccgcggtcccttcttgaagtctgaggctcagctcttcgaggcctcttccctgaacctctaagttctatcagtcccacccgcttccccttcttctctagtcctaggtgtgggaaatgttccctgcagctactatctctgtgttgctgggatatcccctttttacgtcttcagtcctctaatacctatgggactatttattccctatgttaaattccctctggccaggtgcggtggctcatgcctgtaatcccagcactttgggaggctgaggcgggcagatcacccaaggtcaggagtttgagaatagcctggccaacacggtgaaaccccatctctactaaaaatgcaaaaatcagctgggcgtagtggcgcacacctgtaatcccagctagtcaggaagctgaggcaggagaatcactcgaacctgggaggtggaggttgcggtgagtggcgattgtgccactgcactccagcctgggcaacagagtaagacttcgtctcaaaaaaaaaacaaaaaaattccctctgactctgctcagtacatgcgtgtggatttcatgtgtatctctaaagggttatcctcctttaaccatgagaaatcttttcagttagagttcttatgagctattatagaagagccctgaatcaggagtcagcaaaccaagatccttgtcccacaaggtcctagtcccaattctgtcactgggtttcataacctcaccctcaatttatctatccatatacagggcatgagagtacccacatctctcctgggatatgcagaggaatcacgtgggacaatgaatggatataaaaattgttccaaagcctgtatatacgttgtagatataaggtggtggtgtgatatgtgaattctcttggctaagtaccagttggaggttagatagcgacctagaatttgtgttaaagaagtagtagcctttgaatgcctgcctttgttagctattgcacatatgttaaacttactttcaactaaatggaattaaataattgatttattcagtggtccaagtgataacagaggagcacagccaaacttcgccagccccaggagggtgagagtccagcttggtgacaggtcatttgtgggagacacatcctttccatcgaaacttctctcccccctctctccaccctgctctccttctcacccactctgccagatgcattgatcccacgggtacccagagcacatgtacctgattagcctggatccctcctctctgagatgttcctgcaccccatcacttcacttccttcaggactccaacaagttgggtcatcctgaatatttaaaaatttctgttaaattctttttgggtttttttgttgtttgtttgagatagagtcttgctctgtcaccaggctggagtgcagaggcacgatctcggctcactgcaacctccaccttctgggttcaagcgattctcctgcctcagcctccctagtagctgggattacaggtgcacgccaccatgcctagctaatttttgtatttttaatagaggcagggtatcgccatgttgcccaggctgctctcgaactcctgagcccaagcaatccacccacctgggcctcccaaagtgctgggattataggcataagccaccacgcctggccaatttctgttaaattttaccttcattattctctaattttagcctgcttcatttctgtcagcggcacttgtcactgttttctacattgtccatcgggaatgtatgccccattaggatggggactttgtctattttgtttaccattatagtctcattatttgaaatagtgcctggcgtgtttccaaaaagtacgtaacagatcaatgagtgaatttaacaagtagacactattgatggtgttgtgccaaatctgtcccccgcgaacttggaatggaaggatgtgcacaggcaagtatacagacgtagatgcctggtgctgctgtttttcaggaagatttgtccaacctgctgtcttcatttggaatttttaaaataattttagacattttggtcctaaaaagaggaccagatttgaagtcacctgatctcaaatcctgtcttcaccattacttgctgtacctctgataaatgccctaatctcactcatccttgattttgtcatctgtgtaatgggaaaatacctgttctgcctgcctggggctttacatttattgtaaagatcaaaggaaatgagcttttccccctcccacagtgtgttggagtctggattcttctggcagttgtctcctggccactatcctctgttgcaagttgagaaatgtgctcttttcttcctgtccaaccctaaagatctagaaggtgtggatccatcacagagagttacataagattttctacccagatcccaattgaagaaaatccacaggagacaaggcaggctcttttatttattttttattttatttttttgagatggagtctcgctctgtcaccaggctggagtgcagtggcaagatcttggctcactgcaacctccaactccctggttcaagcgattctcctgcctcagcctcctgagtagctgggattacaggcacgtgccaccactcccagctaatttttgtatttttagtagagacggggtttcaccatgttggccaggatggtctcgatcttctgacctcatgatccgcaaggcaggctcttttcatcctacctataatgactagtccatcattgcctcagtaacttgatcatcagccctggtagcagatatccctccccgaagctgatgaaacagggcagagaggaagtatccaagagaaaagggagggaggtttctctaaaacaagacctaagagaaggaacattattgtctagaaagaaagaaataattgaaagtttctgaaaattgagatttcttcatttcaaatgaccttattattagcctgaaaaagcacacacacaaaaaatctcttccttacgtaatagtaatggtgggaatcaaaatgaatccatagatggtggatccagatgggaatgctgctacacgatagtagaattgttctgggaatccacagtgggaaaggatcagttgtagcaaaaagatccagagttgtgcagagggaccatgtcagcagtgatcacttttcagtaaccgtgctttcctgatcatcattttagcatcactgtttggcaagactgtggatggtaggagtggataccagttttttttcactgcctacatatgcttcataagctgtattttgtcttttttcctctacagacctctgtcttctttcctttcatgcccgtaatttatcaaatagatatggttttaatactttgctgatttgacatagcttcctttttcatttcattgattgctactaaaagatgcacaaggctttcaggtcctcacacgaatgatgagataagatccaacatcaagaatctgaagcaaagacactcgtggtttcagaatctataaacagagtttggtaaggccgggtgcggtggctcacgcctataatcctagcactttgggagcctgaggtgggcggatcacccgaggtcaggagttcaagatcagcctggccaacatggtgagacccagtctctactaaaaataaaaaaattagctgggcatggtggtgggcacttgtaatcccagctcctcaggaggctgaggcaggacaattccttgaccctgggaggcggaggttgtagtgagccgtgattgcgtcactgcactccagcctgggcgatagagttagaccccggctcaaaaaaaaacaaaaaaaaatagagcttggtgattttctgttgagtttgagtttgttggaggaatgcataatgattaggattaggtgtttttctattttaacaagttgacttctagagacatagaagactattctgacatgctacttaaaatttccatacaaattcaggcatatttgtaaaaaagaaaaaaatatcagtgcaaaataagcaagatcacatgagacaactgaaaggcacaaatactatccagatgttttttgttattgcccatttattttggccagtgaacatttgaaaggcccagatatgaagttcagggaccatgcactttgtgtctctccccagtattaatgcacttacatctatctgcttttctcttttagtggaggagataatgcctgttgtgtacagcaagacagtgggtcattgtgtatttacagaagtgatgtggattcctcccagactcattagtgaccagggctgctgggcctgtttgggtttcctagactagagaagaagacaggaaccaggatgggaagacggacatgttacattttaagctggagcttcccctgcagtccacggagcacgttctcggtgtgcagctcatcctgactttctcctatcgattacacgtgagtcagtccgctgggaggctgtcctctcccttgtgtctttttagtagaccagagtccttcttctgatttctagaagacccgcactctagcgggccctcttccccatgtagtttgggatttaacttaggccaatggaatggttttcactagtcatattaactgacatgggctattaatagctcagaaggttctaggcagtgtttcctgcatggctacgctaggtatgtgagggcctcttaggtttcagccaagacaggtgactcttagcacccagagcccttcagatctgatggcggttggtattgttggtccttctaatgatttcagaggatggcgaccctcgtgatgcagagcatggcgtttctccagtcctcctttcctgtcccgggatcccagttatacgtgaacggagacctgaggctgcagcagaagcagccgctgagctgtggtggcctagatgcccgatacaacgtaagagcgcttctcattgtccagctcctttgtttctctgtgttactgttcattaagttctttaaagaggggaatgaaaagtagaaatgtcaggccaggcgcagtggctcatacctgtaatcccagcactttgggaggcggagatgtgcggatggatcacttgaggtccggagtttgaaaccagtctggccaacctggtgaaaccctgtctctactaaaaatacaaaaaattagccaggcgtgtggtgcgtgcctgtaatcctagctacttgggagactgaggcaggagaattgcttgaacccaggaggtggaggttacagtgagctgagatctcgccactgcactccagcctgggcaacagagcaagactctgtctcaaaaaaaaaaaaaaaaaaaaaaaagaaaaagaaaagaaaagtagaaatatcatttctttgtgggtggcaccaaagagggtctctgtagaattcttgccatgaattttttcaaactacagagaaggtacacgcatagttacacctagaagggaagagaaacaaaatctgtgtttgtcgaagaactaaattgcttattgcttttaggtccacgtgggtgcacacacacacattgtgtcttccatacacacgcttggtcacacgcaggatgtactccgaaggacactgtaaaatgatgatgtaaaatgttcatgtaaagtatttcagaaatattactagccatagtttactgaactcataacatatgccacccctgagtgcaggcgtttacctatatcatctcctttaatcatcatggcaacctctgagctgcctgcattgtcctttccccgcactccagccacttgtcccatcactgcccccgcttgctcccttccagcccccctggcctttttgctgttcctcaaacccaagaagcagctgccacc

SEQ ID NO: 7074 - DNA, 6000 bp, Homo sapiens
ctgggggtacagccgggcacctgggcccctgcacatgccaggtaatccacttccctgggggctgagtgggtgcctgcctgccccagcctggggccgtctggaaagggcattctgaacaatcttggaaggatgtccacccagaccttgccaggcagaaacaatgcaggattcctgcacacattcagggaggccgggtttgaacaggtctgtttgctggaaggcactcagggccctttgtaccgcatgctacagtcacaacggtgttcctgtgggctgtttcccatctgtgcacttcactcttggaccggctcctcaacttctcaggcttagtttcctgatctttaaaatgggaatgatgacgcctatctcttgattcaaacttaaaacaaaatgcattttttaagataaccagtgaactttgaatacagacaggttactaggtgacatttaaaaattactgttaatttagctgtgtgaaaacagcatcgtaattcagtaagaaaattgcctttttttttttttttgagacagagtcttgctctgtcacccaggatggaatgcaatggcgtgatctcggctcactgcaacctctgcctcctgggttcaagtgagtctcctgcctcagcctccccgaatagctgagattacaggtgcccaccaccacgcccagctaaattttgtatttgtggtagagatgggctttcaccacgttggccaggctggtctcgaactcctgacctcaagtgatccacctgcctcagcctcccaaagtgctgggattacaggcgtgagccaccacgcctggcaaaaatggccacttttgagatgcattctgaagtgactaggaattattttgtattatgtctggaatttatgttgaaattttccagccaaaaacaaaaacaaaacagggctgaggggcagatgaaataagtgtgacaaggggtgatagtggttgccagctaataaacacctgggtattcactgtgctcactaatttttgtatgatgagaattttctttcttttttttgagacagagtcttgctcttgttgcccaggctggagcgcaatggcacgatctcggctcactgcaacctccacctcccgggttcaaccaattctcctgcctcagcctcccgagtagctgggattacaggtgcccgccaccacgcccggctaatttttgtatttttagtaaagacggggtttcgccatgttggccaggctggtctcgaaatcctgaccttgtggtccgccctccttggcctcccaaagtactgggattacaagcatgaaccactgcacccggggggagaaaacttaaaacaagattctatggtatctgccttctaggcttgccctgagcaataacagagcaaatctgtgtgtagcatttagtgcggggacttgcccctactaagcactgagtaaatgtaactgcttttactccacagactatggcatagacctttgagataggtatagattacagagaaggaaacagaggatctgagaggtccaggagcttggccaaggtcatgctgatcagagtagagtggggtttgaccttgagattgcctgggggtgtggccaccctaactatgtctgtccacctcctttgcagcgctcttcaggtgagcaaaccccctcaaggcctgccctggtggtgcatcctggtgggctggctcctggtagcggccaccagtggcgtggcggccttcttcaccatgctctacggcctgcactacgggagggccagctccctcaggtggctcatctccatggctgtctccttcgtggagagcatgttcgtcacccagcccctgaaggtcaggaccctgcctcaggcacccgccctcctcccctccacccatcccttccctactgccagcagtctagtccctgggcttttattcctttatttatatattcaacaaatgaacctggagcaccccctctgggcaggcccaaggcaggaaaaatagccctatcatattacccgaggttacccttgccctagggtatacatatatatgtataaataataccctatttcctcaatgttaacatccatttgatcttgagacaagacaacaatttatgtagctagttattcattttttttttttttctgagtctgcttgcaagggaaaagacagcaatttaaaggaattttccctttggaaaaaacaccaagtcattatatgtgtgcctgagttagaagctacactcctatttctgagatgtaaaattacgcaaaagaacttgttagagttgaagaaattctggctcggcatggtggctcaatgccagtaatcctagtattttgggaggttgaggtggtaggatcgcttgagtccaggagtttgaggctgcagtgagttgtgattgcgccactgaactccagcctgggcgacagagcaagaccctgcctcaaaaaaaaaaaaaaaaaaaaaatccttggtcaggcagctcccatgagaccagctcctggtgatctgttagcctgggatggtggaaagaaaaaaagaaagaaagaaagaaatcctaaatccaggtgtagagcagaggaggcaaggggcacagtttcccttggaaggagtcgggcagtgggcaatccctggggaacccctaaggggaagagatactggattggggtgtaggggaagccaccgaaaggaggagatatttaaagcaaatcttggttgggcgcggtggctcacgcctgtaatcccagtactttgggaggctgaggtatgtggatcacttgaggtcaggagttcaagaccagcctaaccaacatggagaaaccctgtctctactaaaaatacaaagttagccaggtgtggtggtgcatgcctgtaatcgcagctaatcccagctactcaggaggctgacgcaggagaatcacttgaacccgggaggcagaggttgcagtgagccgagattgcgccattgcactccagcctgggcaataagagcaaaactccatctcaaaaaaaaaaaaaaagagaaaaagattacaaaattagtcgagcgtggtggtgggtgcccataatcccagctactagggaggctaaggcaggagaatcacttaaacccagaaggcggaggttgcagtgagcctagatcatgccattgcattccagctggggcaatagagcaagactccatctcaaaaaaaacaaagctcatctttacacctatgggactttgccaaatcccctctcgtcccccattcttccctgaacagcctttaccataagactcaaaaagcatccgacacctcccttcaacactaggctcgcaggatactaagaacagggctgcgtcttgagcctttctgttccccaagtgaaccacaggatcctcctgtgtttgtgtggagcaggcgcagagatcacgtggctgaggccttgcagctgagaccctgcacctgagcgcattacttaatactggaggaaagggaaggagcagggtggggcaggatccctgtgctgaaagccctgggggagagcaattctccttgcggagagatcagagacccctcagacaggtgagcggtagtaggtgggaaggctcaggggagttctaggactggccagtcccccatctggtctgcgagccaaggccttgcggtccagcttcatgaccacctcccatctctgcagaagggagctgcattcccccaaaacacagggccctccccaacatacaaacgtggccccaagccccacgtgctcgcagatgaggggttgagagttaccagagtgggttcgaggacctccctgggtatttttcaggtgctgggattcgctgctttctttgcactggtcttgaagagagtggacgatgaggaggatactgtggccccgctgccaggacatctgttgggcccaggtaatgtgcctcggtggctggaggcagggtctggccagctgcggccctgatgaggctcagtgagccctgcagagtgcagcctgttgggggtcctgggccttgggccagctccccagacctttgttcctcatcagcttttcacccccagtttgtgagccatccccaaaagagccaggaaaaaagtgactccattgtctcctgagtatctgtgtttgttcgttccctggcatttctccatgacacccaagtatgacctgccagctagaagagttgcctcagggacgaagctgtccacatgggcggtccttctctgtgtaattccaagcaagcagctttcttctccgagactcagggccctgggctttagaacagaaactaaaacaagaatcggtttacaggaggctgcaaaaagtggccgcaaattagaattttaggacaaagctctgcaaactacagctggggggccacatgtctcctgctgcctgtttttgtaaatagaggtttgttgaaatacggccacactcacccctgctctaggaggccactggccagtccccatcctcccagcctgacttctcacttcccaaccaaaattcccaagggtggtgacagtaatgacaaaacaaacatgcaaataaaactgaatcaacgtggaatcattgaggcaatggtcttgcctttcagggaaaataaaatagaaacaaacaaaccaaatgccatgcacgtgcctcacagtgcaatgtggctacctcttcagggcctgtattcttccattccaggacagcgttttagatttgcagatctgagaggtccattaaaatcttctcaattctccacagagatgctaggctccagaccattaaatattcattcagtcacccctttggcaagtcctcagggagcactggctgcgggccaggccttgtgatggcttgggaatataatttacataaaattcacccattgtaagtgcacaatttgttgatttcagtaaatgtatagggttatgtaaccatcactgcaattcacatttagaagagcttcgtcagcccaaaaggttctttgttgcccatgtaaagtcaatccccacttccaaccccagtccctgccaacacagcacaggttgctgcctttggaatgaacagcccatttggggagatggcatcaaccaggtaaatgcacaagtagacatataagtgtgaattatggtaagaaatagggttggggaagatcaagagagggcaggcctctctgctgcggtggtgcctaacctctctgctgagaacgggggaagggaaggactgcacactcagcacctgcaaaggccgcgaggtgggacagtggtgtcgttttattgcagccattttatagcaaccattgacagtgtgtctggagcatgttgagttgggggtgggggagaatggttagagataagggtagagggggtgggcagcaggttgtcagggtcttataggagctggggcaaggctgggatgtggaagggctttacatatgagaatgatgatctgttttatgatttgtgtgtgtgtgtgtgtgtgtgtaagagagagatggagtcttgctctgttgctcaggctggagtgcagtgacgtgatctcggctcactacaacctccacttcccaggttcaagcgattttcctgcctcagcctcccaagtagctgggattacaggcacccaccaccacgcccggctattttttgtatttttagtaaagacggggttttgccatgttggccaggctggtctcgaacttctcacctcaagtgatccgcccgccttggcctcctaaagtgctaagattacaggcgtgagccaccgtgcccagactgttttgaaagaacaggaggcaaggcccagtggctcatgcctgtagtcccagcactttgggagactgaggtgggcagattacttgaattcaggagtttgagactagcctgggcaacatggggaaatcccttctctaccgaaaatacaaaaaaatagccgggcatggtggtgcatgcatgcaaacccagctactcgagaggctgatgtgggaggactgcctgagcccgaggaggtcaaggcttcagtgag

SEQ ID NO: 7075 - DNA, 6000 bp, Homo sapiens
gtagtctttaattaagctagatacatgcttcatgtcattattttctttggtactccattgctggatgtatcaagcataaagaaactaagaagtaggggcttactcctgagcaaacttctgtcaaacctgttagggtggctttaggtgccctctgcttttctgatctttctgtttggctctttgtttttgctcttgcagttggcattgttattgttgttcttgtcgaggtggatgtaactgctttaaactttgactcatttctgatgagttccacgccccttagttgccagtgccagtgccagagatgggcttgtttttcaggatcagttgttagtacagcagtgaaagtccctctttagtaaaagtaaaaacgttttttggatattttaacccctcacggtactttatcaatgtttttctactcgtagaagcacatattgatatttccagaaaccaaaaactcagaagcaccagtttctgccagaagaatgagttttacagcttgaagtaccttttgtaatagatgacttaactccttgtccttaatgttttctttttaaaaacaagtagtgggcggacatggcggctcttgtctgtaatctcaacactttgggaggccaaggtggctggatcacctgagtttgagaccagcctggacaaaatgccgagactgcttctctatattaaaatccaaaaattagctgggtgtggtgatgcatgcctatagtcccagctactcgggaggctgaggctggaggattgcttgagcccaggaagttgaggctgcagtgaactgtgcagagattgcgccacccactccagcctgggtgtcagagtgagacccttcctcaaaaaaaaaaaaaaaataataataataataaaatcctaagtagcactggaaggcctctcttgcttcatttacccatcccctaccctgctggattatttacgccccgggtatggtctgtgcaactgtttttctggttatgctacagccagcattgttctttactatcgctctgttttcattgtgaagaatggcagtttttcttacaattcagatgttttggaagatatctgtgcgcatgcttaatttaatattcaggtgacatttttctttagcagtagtttccctcacaaactgtcttctcatgtcactccagtaaagagataatctggttttataacacatttagcaggttacatttctttaagtgtgaggtttcaggtaaaataaatttcaggacagtaaacccttttatgctcttttcatagaattggtagaaaatatttcaaactatgtaatattaaagcatagtgtttcttaaagaaggtgttaaatatcactgatagggaaattactttgctgttaggtattaatgttacagcagaaagtaaggctttataccaagcttttgcctgaaaaattgatgaaatttgtgggaagtaaaagtgccaactggggaaatgctctggggattgagttgcaaatgataggaaatacagaatctgaaacagaacaaaggatcatcctgatgccttcttctctttggctgctagaatgctcaggtccagtgtgcttaatatttttggtgttattttgttgtccttacttttttccatttttctcattgattttattgttttatttttgaagatgcctaaaaaaaattttcccgtgaaagcagtgagtaataagtaaataaaaatgaaataatatgtttcatggttgtatggcacattaatttgtcttaaaaccaggatatctcttttaccctcttatttattttattattttattattttagacatagggtctcactttgttgctcaggctggactcagactcctgggctcaagtgatcttcccacctcagcctcccaagcagctgatctacaggcacctgccaccttgcctggctgacccacttgcttaaattataaatacaactaaatcatacctggctatgtcagtttgctactaatgtctgtgtgcactgttttttgtttcatagattggctcacagtggttgattgatcaaccccattggacgttggttctgtggtacaaatggagtacaggactcagtcgtcacggcctgagtgagagaagccttatttccaagatggagaagaagcggagaaagaaatgaaagcctctcttcaggctgaaccacaaaaggccatgggatttaacttttatttatgttgggcaagactgtaagatggctgattagtaatgttgcagcttttagctgaaacaaaaattcacttttaatcaagaagaaaaaagtgtgatttgaatatatgcaattttatgatcatattcgcttgtgaccatgaagcttgtcaacatctggctgcttctgctcgtggttttgctctgtgggaagaaacatctgggcgacagactggaaaagaaatcttttgaaaaggccccatgccctggctgttcccacctgactttgaaggtggaattctcatcaacagttgtggaatatggtaatgatgttgtcttaagtattaggaactcccatcctatttttttaaagcttacttaatataaaattagctattgctgaataacatgttcctcttttctacagtaaatttctttcttttttttttttttgagacagagtctcactctgtcacccaggctggagtgcagtggcatgatctcggctcactgtaacctccacctcctggattcaagcaattctcatgcctcagcctcccaagtagctgggattataggtgactgccaccgtccctggctaattttttgttttgatttgttctgttttgttttgttttgtttttgagatggagtctcactctgttgctgaggctggagtgcaatggcacgatctcggttcactgcaacttccacctcccaggttcaagcagttctcctgcctcagcctcctgagcagctgggactacaggcacccgccacaactcccagttaattttttctatttttagtagagatggggtttcaccacattggccaggctggtctcgagctcctgacctcgtgatccgcctgccttggcctcccagagtgttgggactacaggcatgaactatcgtgccaggcctttttttttttttttttttgtatttttagtagagacggggtttcagcatgttagccaggctggtcttgaactcctgacctcaagtgatcaccctccttggcctcccaaagtgctgggattacaggcatgagccaccgtgcctggccttctgtagtaaatttccaatgggttgagtgcacagcacatgaatgttaactttgcttaagtttgttttcccagtagagtaagcttatatgataaaaggaaattgacatgaattatttacctacaccttcttttctttttcttttggagacagagttttgctcttgtcgcccaggctggagtgcagtggtgccatctcagctcattgcagccttggcctcccaggcacaagtggtctcccacttcagcctcctgagtagctgggactacaggcacctgccaccgtgcccagctaatttttttatttttgttttttcttttttcttttttgagatggagattcactcttgttgcccaggctggagtgcaatggcaccatctcagctcaccgcaacctccacctcccaggttcaagcgattctcctgcctcagcctcccgagtagctgggattacaggcatgtgccaccatgcccggctaattttgtctttttagtagagactgcgtttctccatgttggtcaggctggtcttgcactcttgacctcaggtgatcctcctgcattggcctcccaaagtgttgggattacaggcatgagccactgtgcccggcctgcccagctaatttttttattttttgtttcaccatgttgcccaggctggtcttaaactcctgagctcaagcaatccatccacttcgacctcccagaatgctgggattataggcatgagccactgtgcccagcctacaccttgattctttggaacaggtgccattgtaattggtgaaggtggggagctgggaggtgcagaatgtttatgttctaaagtttgagtgaccagatgtgaagaactgagcaaatagtctcacataatccactctggaattttgttactgttttcgttttaagaaacactaactgagcattcagttctctgaatttctttttcctacttgataaaaattatatacatttctttgttgtgtattcaaacttctgtaggtatttgctttttaaaaaaatatcacgggtatctggtttcgaatgatgtattctttgtggttaggtgattcatagagatctttttttttttttttttgagacggaggcttgctctgtcaccaggcaggagtgcagtggtgcaatctctgcttactgcaatctccgcctcccaggttcaagtgattctcctgccttagcctcccaggattataggcgcccaccaccacacccagctaattttttgtatttttagtagagatggggtttcactatgttggccaggctggtctcaaactcctcacctcgtaatctgcccacgtcagcctcccaaagtgctgggattacaggcgtgagccaccgcgcccagccccatatagatcatttttcctcaaagctctgcagacagctgtctaggtacttaaactagtctttgtgttttctctcgtctgctgtgggctttaagataatttttcttttgccagattttagattagatacaatatagtatatgttataatgtatgtgcgtaaatcttatttttgtttgtggtgattggtttcagaatatattgtggctttcaatggatactttacagccaaagctagaaattcatttatttcaagtgccctgaagagcagtgaagtagacaattggagaattatacctcgaaacaatccatccagtgactaccctagtgattttgaggtgattcagataaaagaaaaacagaaagcggggctgctaacacttgaagatcatccaaacatcaaacgggtcacgccccaacgaaaagtctttcgttccctcaagtatgctgaatgtgagtattgtgactgtaggcaaatttctctctgctgtttactttgaaaatctcaaactgcagagtagttgaaaaatagtacagtgagtatccgcatccttccatctagtttgctaattgtgaacattttcctggtaggaattttttagtttagttttgtttagtgcgcagggtcggtgttgggggggcagaattattttttaaaaagagacttcgtactgttctggtagaagaaaatctgagggtttgcagtagtagatggtagtgatctttgtttctgttggaagcgattttcgccagcttcatctcaaagccttcagacttcaaggctgcggccgccttctcgtgctgaaagacgcgtccttgtgtctgcttcttccttgcatttcgcttctctcagtgtgtgttttattttttcttttcctttttatttatttatttttttgagacggagtttcgctcttgttgcccaggctggagtgcagtggcgcgatcttggctcacctcaacctccacccaggttcaagtgattctcctgccttagcctcccaagtagctgggattacaggcatgcgccaccatgcctggctaattttgtatttttagtagagacagggtttctccatattggtcaggctggtcttgaactcctgacctcaggtgatctgcctgcctcagcctcccaaagtgctgggattacaggcgtgagtcactgcacccagcccgatttttaaaggcactcttgcaaaacatgttttcctggggtttcgttttgtttttgtcaaagcctcctgaccaggaatggtcatgcatcagctgggttcgttgaagtcatcagctgtgcaggtgtgagcatggaagcaacttggcttttccttttcttctccagggcttagtctttcctacttcattacaattgggcttgtcaaa

SEQ ID NO: 7076 - DNA, 6000 bp, Homo sapiens
ggccgtcggggctgtgctggcaggaggaatgcagggaacccggcccgaggagcgcctgggcccagctggactctcctggactctccccgtccccagcggctcattcagaggggtagctgttatccgtgggctgccttctccaaaaacggggccgtccagcagaggccatgctcttgcctggggcccagcaagtcccgccgccctggccctgacacagaacaagaggccagagcccctggtggctgctagccagcagcttttgtcactcagctggcctatggctgtcacagtagcccctgcttccctgcccggaccatctctccctctgtgttcccgaagcctgggggccccgggggtgcctgtgaatgctgttgaacgggctttaggctgggcgcggtggctcacgcctgtaatcccagcactttgggaggccgaggcgggcagatcacaaagtcaggagatagagaccatcctggctaacacggtgaaaccccgtctctactaaaaatacaaaaaaattagctgggcgtggtggcgggcgcctatagttgcagctactcgggaggtggaggcaggagaatggcatgaacctgggaggccgaggtcgcgccactgtactccagcctggacgacagagtgagactccgtctcaaacaaacaaaaaaaacaggggctttaaaatacagtcagcacaagaacccagatgctgccccaagagaaggctgcagagggcagggaggagccgccctacatgggcaccagcttgtgcctgctgtgccagcctggggcagtgcctagggcacagggcagtcactgcgcacagcgggggctcagcccccatggggacctgggcatggggtaggctctacccactgttgtgagcctgggcacgggttggcgtctgttccctggggacagggcagtcatgcagcccacactgatgggctgggacctgtggtcagccctgcatctcccagggtgccctgtccaagtatggattcaggacagctgagtcaatcccccagccatgccgagccgcaggttgcggcctgcaggctccttgcagccctgcctggcttctgtgccgggtggagctcatctgctgaaggtgacagtttaggctgcagcttcagggatgggcttttgctcagcgctgtccacagcggcgtctccaagagggtggtctcctggcttattagtgggtggccactgtctcctggaagcatcaggcccctgtgcgtcctggcggctcagggtttccaggcctgtgatgtgggaatggagccgtgaccttccctgcccgtgggaggcctcgggagacgaagctgtctccttccatccctcatcataagccgcctgagcccctggcaacatgcccagcactgtatgcagagtcgagggcgggacagcccggtgtgtgaggcagatggagtgcagatcgcatcttggtgacctggaagtcagcagccgtgggtgtggagggcccaggagggctgaggaacctcggggcatgggggagggaggctggacaggagagggctcacccaggccctgtcctctgccccaggtgaacctggccctgcctgtgttcttcatcctggcctgcctcttcctgatcgccgtctccttctggaagacacccgtggagtgtggcatcggcttcaccatcatcctcagcgggctgcccgtctacttcttcggggtctggtggaaaaacaagcccaagtggctcctccagggcatctgtgagtatctcgctggcccacagcccgtggtaccctctgccctgggcagcgaagggagttgagaggcgtcggccgtctccacccacatggggcgaagcgtgttgggtggcaggagggttcaggtcactgcagtgtccgccagtgacacgcagcccacatggttcagggataagacacacagcgcagcaccagctaatctctcaggacgagggattccggaaaaccaggctactgctgccaagtaacaaaatcctgctggctgccaccagcggacacagcagacttacccagaaaggcagaaagaggcagaggcaggcggatcacttgaggtcaggagttcaagaccagcctggccaacatggtgaaactctgtctctactaaaaatacacagatcagctgggtgtagtggcacacacctgtaatcccagctactcaggaggctgaggcaggagaatcacttgaacccgggagacggaggttgcagtgagccgagatcgcaccattgcactccagcctgggcgacagagcgagactcttctcaaaaaaaaaaaaaaaggcagaaggagaaacccgccccccggccctgtgtgcagcggcagccccaggggtgctttgtcaccaagctcaggaccccgtcctcagcgcctgcaaatgtggccaggctcgtagaaaaaggccggggtgcttgcgggcctacatgctgatccccatgtcactgggtggcttggagaattcccgggatggcagcaacacaggcagggagaccccccacccctaccccacactctgatcaccgccagggtcatggtagaacatttgcctcaagctttgcagtgggatctgcattaactgtcattcaggacaccaagagcttaaagcaaacccccgtctctatcctgaaagcagtccccctccacagagtgatgtctctgtagacagtcccaggcgcgacaggtcttccgaggacccgttagcagattggcccctccggccctgcctgctgtgaacagtccaggcatgtgtccaggtggtggcccgggtgtggacctgcaggaaggcctgtcatccccccgttgcactttgctgagacaccagggcctggttcgtgtgccccaggggccgcactctgcctccccagggttctgaagcaggcgaggggtgggccgagtgggatgtggcacttccgcatttcagttgaagacagcgcctcgggcacccggcacccacatgcgcaagtacacaagggaaggttccttaaaatcccagcgctgggcagcggcgctgggtttggtgacagcagggctgggggagccccagctcacgcccccgtgtcccacgggtgcctacccagcccccaggctaacacagctgtcttctctcctgacagtctccacgaccgtcctgtgtcagaagctcatgcaggtggtcccccaggagacatagccaggaggccgagtggctgccggaggagcatgcgcagaggccagttaaagtagatcacctcctcgaacccactccggttccccgcaacccacagctcagctgcccatcccagtccctcgccgtccctcccaggtcgggcagtggaggctgctgtgaaaactctggtacgaatctcatccctcaactgagggccagggacccaggtgtgcctgtgctcctgcccaggagcagcttttggtctccttgggccctttttcccttccctcctttgtttacttatatatatattttttttaaacttaaattttgggtcaacttgacaccactaagatgattttttaaggagctgggggaaggcaggagccttcctttctcctgccccaagggcccagaccctgggcaaacagagctactgagacttggaacctcattgctaccacagacttgcactgaagccggacagctgcccagacacatgggcttgtgacattcgtgaaaaccaaccctgtgggcttatgtctctgccttagggtttgcagagtggaaactcagccgtagggtggcactgggagggggtgggggatctgggcaaggtgggtgattcctcccaggaggtgcttgaggccccgatggactcctgaccataatcctagccccgagacaccatcctgagccagggaacagccccagggttggggggtgccggcatctcccctagctcaccaggcctggcctctgggcagtgtggcctcttggctatttctgtgtccagttttggaggctgagttctggttcatgcagacaaagccctgtccttcagtcttctagaaacagagacaagaaaggcagacacaccgcggccaggcacccatgtgggcgcccaccctgggctccacacagcagtgtcccctgccccagaggtcgcagctaccctcagcctccaatgcattggcctctgtaccgcccggcagccccttctggccggtgctgggttcccactcccggcctaggcacctccccgctctccctgtcacgctcatgtcctgtcctggtcctgatgcccgttgtctaggagacagagccaagcactgctcacgtctctgccgcctgcgtttggaggcccctgggctctcacccagtccccacccgcctgcagagagggaactagggcaccccttgtttctgttgttcccgtgaatttttttcgctatgggaggcagccgaggcctggccaatgcggcccactttcctgagctgtcgctgcctccatggcagcagccagggacccccagaacaagaagaccccgcaggatccctcctgagctcggggggctctgccttctcaggccccgggcttcccttctccccagccagaggtggagccaagtggtccagcgtcactccagtgctcagctgtggctggaggagctggcctgtggcacagccctgagtgtcccaagccgggagccaacgaagccggacacggcttcactgaccagcggctgctcaagccgcaagctctcagcaagtgcccagtggagcctgccgcccccgcctgggcaccgggaccccctcaccatccagtgggcccggagaaacctgatgaacagtttggggactcaggaccagatgtccgtctctcttgcttgaggaatgaagacctttattcacccctgccccgttgcttcccgctgcacatggacagacttcacagcgtctgctcataggacctgcatccttcctggggacgaattccactcgtccaagggacagcccacggtctggaggccgaggaccaccagcaggcaggtggactgactgtgttgggcaagacctcttccctctgggcctgttctcttggctgcaaataaggacagcagctggtgccccacctgcctggtgcattgctgtgtgaatccaggaggcagtggacatcgtaggcagccacggccccgggtccaggagaagtgctccctggaggcacgcaccactgcttcccactggggccggcggggcccacgcacgacgtcagcctcttaccttcccgcctcggctaggggtcctcgggatgccgttctgttccaacctcctgctctgggacgtggacatgcctcaaggatacagggagccggcggcctctcgacggcacgcacttgcctgttggctgctgcggctgtgggcgagcatgggggctgccagcgtctgttgtggaaagtagctgctagtgaaatggctggggccgctggggtccgtcttcacactgcgcaggtctcttctgggcgtctgagctggggtgggagctcctccgcagaaggttggtggggggtccagtctgtgatccttggtgctgtgtgccccactccagcctggggaccccacttcagaaggtaggggccgtgtcccgcggtgctgactgaggcctgcttccccctccccctcctgctgtgctggaattccacagggaccagggccaccgcaggggactgtctcagaagacttgatttttccgtccctttttctccacactccactgacaaacgtccccagcggtttccacttgtgggcttcaggtgttttcaagcacaacccaccacaacaagcaagtgcattttcagtcgttgtgcttttttgttttgtgctaacgtcttactaatttaaagatgctgtcggcaccatgtttatttatttccagtggtcatgctcagccttgctgctctgcgtggcgcaggtgccatgcctgctccctgtctgtgtcccagccacgcagggccatccactgtgacgtcggccgaccaggctggacaccctctg

SEQ ID NO: 7077 - DNA, 6000 bp, Homo sapiens
agcccagggctggtgggggggctggccttgcaggggggctggctggtcctaagcccctgtctccaggctgagggttggggcctccctctttcccagccaccttccctcccccaggaggaagctccccctctgcctcaggcgtttgtccattgatttggacacaaacgcatggttcaccttcctgtggaaaaatccggccctcggactttatctggagggtgcagtggcccaggcaccttgccttgggtgggaccttccccctctgctatttcaggctctgggggctgcaggaagccctaggaggggcttcctctgggtgtatttttagaggaacaaagggtggcctgagtggcaggtccctttgtgcatgagtctggctggggacaggggctccaggaggtcagggggcacccaaggaacagggtctccccttctctcttctggcatcaagacctgaggtttctttttctttttctttcttggctcactacaacctccgctgtctgggttcaagcgattctcttgcctcaccctccccagtagctgggattacaggcgcgcaccaccacacctgactaatttttgtgtttttagtagagacggggtttcaccatgttgctcaagctggtctcgaactcctgatctcaggtgatctgccctcctcgacctcccaaagttctgggattacaggtgtgagccactgtacccggcccctgaggtctgaggtttcatttctttctttctttttttttttttttgagacggagtttcactctgtcgcccaggctggagtgctgtggtgcgatctcggctcactgcaagctccgcctcctgggttcaagcaattcttatgtctcagcctgctgagtagctgggattacaggcgtgtaccaccacacctggctaatttttgtgtttttggtagagacagggtttcaccgtgttggccaggctggtctcaaactcttgggctcaagtgatccgcctgcctcagcctcccaaagtgctgggattacaggtgtgagcccctgcgcctggctcaggacctgaggtttcttcacctgagctcccagcatgggcaggaagaggtgggcctcacctgacctccacagagcaggctcagatcctgcccttctcagcctgggttcagggcatgcctcagatggtcagggagcccaggagggcaaagcttaccttgcggggatggctccagtgggggcactggtggcagagaggcagagctctggaagggatgtgtgtagtttgtctttggtgaaggatggagagggcccaactttgggtgccccctgggagctaagggtggctctcagtgtcctctgtcctggctggggataggggaggtgggcaggggaggacactgatgtggttggcccctccttttgggggccgtgaaggcctagttagtgatgactcagccctgggccacaccaggctgggggtggccgcagctgcagtgcagctgatcctagtagtgacgacaggggacagcccccaaacagagacggggtggccagcggtgccaggccctggaggtggtggcagaccctgagccctctgccccctgcccctagcccatgtctccacccccatctggagggccttgggggctaagagcaggtgtgaggggtgacagttctgcgggaggcggctgtgtggttggggcgcggtgcctgcgggggcttccgggcttccctggctcttgctcctctggagcctcaacaggaccgtcctgtgttctggggccgggactcctccctgtcccctcagccctgggtcctggggcagggcagggccttccagcagcttccttccttcctttcttgggacggaagcctagctgggtggggggcgccaggctggagccttcgcaggggagcgggctcagtcatcaccctgctccccagagtgactcagcccccacgtccccacccatccccggggagccagggccgcagagggaggtagataagtggggtggcagcctgggtcggccagagagttcaggccaccccggccggacgcctgccacttgctgtcactgtgccgctgtcatggcacgctccgggagtgccacgccacctgcccgggctccgggagcccctccacggagcccaccccagaggctggtacaggtcaggtggggtgggaggaagggagggctaggaggaaccggcagccgctcagcctcccggggtggaaggaggggactccgggaccttgatgtaagcaggctggtcgctgagcaacaatgaaggcctttctctgccagggctggtgcgtcaccatctgggggggtgcccagggtacccccatgccagcctctttgtccggacacaggcatggctgggggaccagggatggtccagctctgtgctggccgccggcagggagggagcctggagcccgtgggagcccgagggcctggcgggaggcggcaggaagtgtgtgctgagccagggcagggaggaggaatgtgagctatgaacgccgcccgagctcctcggctctctgggccccccttccccacgagcccatgtgctgccagcagcccaccctggcccctccattgcagcccctccacctgaggttttagtgctgtgcctggcgccactgggaccctgctgacaatgaaggggtttaggtttgataggcagaacttcttgccttgtagagtgaaagacggctgcttctggacagaggcagaggggtggccagaatgaccctgagaacactgaggggtccttggcctggcctcagggccccagacacccaccagatcctgcttcctgtctggtgccctgagaaaccctgccccgcaggccgctgtgcaggcgtgggaagggctgccgggccagcactgtggggctggccgcatgtgtgggctgctgtgcgtgtttgcaggtgtgtgtggacgtcttgtgtctgtggctgtgtgatgtgtctttgcggactgggcccatatcacgctcccacctcctccactgaattgggctcctgtccccacgccttccctgcgtcccaggccagcctgggggccgtgctccacctcccctcccgaactggactcctgtccccacgccttccctccgtcccaggccagcctgggggccgtgctccacctcccctcccgaactggactcctgtccccacgccttccctccgtcccaggccagcctgggggccgtgctccacctcccctcccgaactggactcctgtccccacgccttccctccgtcccaggccagcctgggggccgtgctccacctcccctcccgaactgggctcctgtccccacgccttccctccgtcccaggccagcctgggggccgtgctccacctcccctcccgaactggactcctgtccccacgccttccctccgtcccaggccagcctgggggccgtgctccacctcccctcccgaactgggctcctgtccccacgccttccctccgtcccaggccagcctgggggctgtgctccacttcccctcccgaactggactcctgtccccacgccttccctgcgtcccaggccagcctgggggccgtgctgtgactgcatccctgaggggcactttggtgggcaggtgtcagggtcagccttgaagccccacgcctgtgccaccaggtgtgtctgggggaggagtgagtctatgtggtggggccctggagattttgggggtcttgcaccctctaattcagcccatgtggcccagctgagcccctgtggggccagggagccacaggcttgtccctggagtttctggtgtgacgggctgggtggtggccatgcagagagggttcagagggtgggcaggaggcttcagatgaggcatctggcaggctggacaggagaagggtgttccagaccaagggcaggtcctgagcccaggggacagagcactagctgtgtggagaaggacccccttgctcccttggcggggcggtcccccccgctgacatggccgtttctggtccattggggtttggagcgagcttgaaggtgggtggctggaggggttgggggtgtctgaggcctggagacctgccctcctgaggtctgagcgcccccttgccatgccgccccagccctggcctggcctggcctgtggtccctcagggacacacagggaggtaggaggtgagggaagggccctggcagcccccagcccgcctgcacagtctcccctgcgcacgccctcaagcttggcgctccctggaaacctgagctgcctcctgcctgctccggccaccgccatgtttaactgagcacgggcagccgctggccaccgccgccgcaccctggcccaccccctggctgggaggtggtcattgggcctggccttgcctgcatggtcccctggcccagagccctaccgcaggatgccagaggtaacatggggcagggcctgggatggtagcggggggtccttccgggcaccaggaggccctctgtgccctgtccacactaagctcctgccccagcccctgcttgctgggcccacgggggtggggcggctcattttcctggaatgtgaaagcaaacagagccgccaccgcagccagccccacggaggcctctggagagaaaacaaaactgctggcctaggagcgcctgccccacgctctggaggagagcccggggcagggggacgcacaggcagagccctcagggacaaccgccccaggaggccaacggcgacagttcatcccacctggtgcttcctcccaccctgcctgtgcgccacgctggcctcgagccaaaggaattctcccagcaacccgggaaggcggctgggcccgtcggggaggcttctgggtttgaaaacaggctttgcccaagttcccacagctaaagctctgtcacaggcagcctgggtgcccggagtgtttgccactgagacctgggcctgcccgtggggggcacggtaccgagtttgggcagtggcggcaccaccggggagtggcctctggaggcgggaggctggagcaagagactgaccctgtccgttgggcctgcaggatgtcagtgggcccctgagggagctgcgccctcggctctgccacctgcgaaagggacctcagggctatgggttcaacctgcatagtgacaagtcccggcccggccagtacatccgctctgtggacccgggctcacctgccgcccgctctggcctccgcgcccaggaccggctcattgaggtaccggcccaccagggctgcggggtgccgagtgccccgcacctgtccacactggggccctgggtccttgcagggaggagggagacgctgggaacctgagctggtgcgcctcctgctgcctcggtgggcggtggctgtgatgaatatttgatgccacacctggccacgcggcgttgggggctgtctgggcccatggcggggctgatacatgctggtggcggcaggtgaacgggcagaatgtggagggactgcgccatgctgaggtggtggccagcatcaaggcacgggaggacgaggcccggctgctggtcgtggaccccgagacagatgaacacttcaagcggcttcgggtcacacccaccgaggagcacgtggaaggtgggccacggcccagggcacagggtgggtgcggtgtggtggctgagcagccactgacacgctgtccccacaggtcctctgccgtcacccgtcaccaatggaaccagccctgcccaggtaagagggtggggtgcccatgagacacagggtgcctctgggggtacccaggcccgacagaggcccccttctccctggagatccgtcctcgaggtgtgctagtgacacccgattttagccctgtcacctccctttaatgcccctgtgggtctcatcctgggtcgtgccacacacaagccacgtggggcccctggggtcggggccactgccttctgtcctctcctgggcaccacctggtaaggagttgccctccagtctctgcctcctcagggagctggcgg

SEQ ID NO: 7078 - DNA, 6000 bp, Homo sapiens
gaaggcccaggctgtgctctgggtcctggcccctctgcacttggaagaccccttggctctgctgggctcccctctgggctcccatcctgccttctggctttttgcttcacctccctgcgtgcgcctcagtttcctcacctgccagatggagatgctagggtgaacaaaggtggctgcagcctttctggatcagatgctggtgggaatgaatgtgagctgctgtcatgatggttgttgggtgggccaggattcccatgtgccagcctgggcatctccccaacccaagctgtggcccgtccctgtcccctgcatcctgtgggctttactggatcagggcgaggggttacccagcttgcaagacacagctttgctcagaggggctagaaaggaagaacagacaggtggggtccagccaggcacaggggcttgtggggacctgctgccctccgcgctttgagtttcccggggctctgcttggccacccccttccctccctgcctgccagcaagcatggagccagctgcccttccatgggctcaggcctgccctaatccactggcactcgccgttctgtccccacactaggcctgcagccttctcccatgcagtctgccggcttttttgagtctgttgggacagaacatggggacctgtgctcagggttctgggagtgccctgagtgtcagggacccccccacctatgatccccctgagaacagggtctcctctaactcatcactgtatctgcagggagggaacactcaacagaccattcactgagcacctactgtgtacccgtgcagggcaggggtacagctgtgggcgggacagacggtgccctccttggactgccttggagtccagtgcggggagtgagacagcagccaggggacagcccctgagcctagagaagggcaggtagcaaggagagcaaatgaagtagggcaaggctgtagtggtggggtgtgggaggaggggcgcctgggtccagggtggtctgggagggcagcctgcaagaggcgccttctgagaaagtcccgaataggaaggtgccagccgtggggcggtcagggcagaggtgggagcgtgggctcgcagcggagggtgtggggacgcctggggaggcagggagcttggattctctttggtgctggggaggattctgagtggggagaacgccatcacatttttgcaaagatcgtttctcaggaaacatttgctgagtgaatgaaggaacagatacgcactcgggagggccggaccacaggccaggcgtgactgtggctcagtcactgggctctgtgctcgcggcggggcagaaccccacatctggctctgcccatgcctcctggcctgggttcagggcagcagacggggttttggggtcaccactcctcttagagaatccctttgagctggggccgcctgtgcctcagtttcctcattagtcctggggccagtggttgaactggggcccttgaactcaggtgcctcctggcctgcccacctggctttgccccgcctatcccaggtcctggtgccattgtttgattttctacttcctgtccctgaaccacccccacccccaaacacacacacttccccttccgaattgatactgacttgtcttcctgtccagaaaccccaggggagggcaggcaccccagcaggccctgggaaccagaggtgcaggggagagggaggtgggaggtgggaggcacagggcaggttggtgttcttcttgcagggagagaacacagaggttgggacgagtgtagacaggctcacccagccatggtgggaaggctgtctgtggggtcagaggggtcccctgtccagtctggaggcgtgagagaacagctaagtggggttgtggaaccggatggtggcaggggagaggccagggtggtctgtacatgcaggggacagagcagggccaccgtggagctcatggcccgctggagggagaggtgggcgctaatcaggtggccatgctccagaagccagggttgcatgccaaggccactgctccggagggaaggagcccggccgggttgggaaagcttccctgccagagctggtattaaccgggtcagggtgtctttctccagccgggccatctgcgtggtgggggctgccctgtgcacgataggtgccagcaatatccatggtctccctacttgatgccaggagtgccacctgcccccagttgtgacaaccagaagtggctccagacatggccagatgtccccagggtggggacacagtggcccccagttgagaaccactgaacaagggtaagccgccagaacgttctgggcaggggcaactgcctgggccagggcctggtaggagggttcgttgcgggggtcagcgtggctggcgagcagggcatattggggatgtgtagtgttcggtcctgcaggtcattgtgaggacttggaaggcgtcctggctgcagtggcccctgagggtgggcagggagatccttagcgcctgcggcagcctgtctcctggagtcagggggaaggcagtggaatggagggagggcacctcctctgcccagggccctctgcagaagctgccggtttccccgggcctggtccctggacagacgctgggggcgttgacttagctgcctttgtccttcaggcaaacctggcttctggggaaactcctggttgggtaagaatcatttctccttaagggtgctgttcctcaaggacgcagcaggttcgaccctatttggagggaaaacctccttccagtgctgtctgcctgtgctgatgtcagtcttatccaaagggaacaaaaagccagacgtgtcgttctgagtgccgaccgcacgcccagtcctgtgtagaacgcgtctcgggcctgtcctcatcctcactgaccccgggtgcagccagcgtttgctctgtttgtggcgagcgaggcaggagagggaagaaagtgcagggtcttgggactccagagaacctgccagcctcagcactgcggggcagcagaggcaaagccctggcctcagcatgctctcactggctgtgccttgggtgtcacctagagggttgacagggtgcctggagctggggactcttagaccttatgtgcattccatagccacactgtcctccgccacttggcaggcccacccatgggtgaactccgtggctcggccaggtggaggtggtggtcccagccctccaacttctggcgtcattctttcaacatgtggagcacaggcttggcctggcctgggaggggcctcatccccgctcccacccaaatcagctggtgccccgactcctggcacttgccagggggaccctctctgccttcagagccttagccctcaccgtgccccctgccaggaacactattccccatcagcaccgcctccctgcctcccacctgcccacccaggttagcatcttggcacctggttgctgtgttcctgacaatggcaccctgtattgtgagtgaccggcatttggggtactaaccagttacagtctggcgcctgcattagatgctaagcaccatcagggagggagcctctgtctcaccctccctgcctccccgaagctttcccaagtgcctgtctccatctcccgggacactctaccctgttgcttccttggttggcctccgtccaaaccacacaagggactctaccgcccagcttccttctcagatggtgtgccgcgttccaggggtcttcccaggcccgatgcagtgcctggtgacaaaggctgttgtccagtacaccctctcacaggtgtccccaaaggacctgcctgttctgtatatgatgtctgtttgggagagggactgatgtcattgtcatttctttttcttttttttttctttttttttttttttttttgaagagactcttgctcctgtcgcccaggctggagggctagagcgcagtggtgagatctcggctcactgcaacctctgccccccagcttcaagcaattctcatgccttagcctcccaagtaactgggattacacgcatgtgccaccatgcccagctaattattgtattttagtagatacgaggtttcactatgttggccaggctggtctcaaactcctgggctcaagtgatctgccggcctcagccttccaaagtgctggaattacaggcatgagtcactgcacctggccatttatctgctttcaaacccccatctctggccattaggaggccccagttgccctcagtccctgagtggtcatgaacactgagttggggctgggcttcccgaaggcacaccttcagctgaagaaccagaaccatgtctggccctctggcatcctttgctgcagctgtcgctgtcgcagtgttcccggctctgccgccagcgagggtgactcacctgcctggtacagcagcactcggggtttcaaaggtcatgaacaggagctgggtgagcgtgggtgagcagacgccttcgaacgccggccagcatgctttttgtcagggtgagggtgggatgggcaggtctgagaacgattaaaaatagaccccgtggaagtgctaaccgcagctcgtcaacctgctttgtctttcaggactcccgtgtccagcctgagttccagcctcactgagtggccacccccaaagtgctgccagccgaggaagcccccagcactgaccatgtctattatggaccacagccccaccacgggcgtggtcacagtcatcgtcatcctcattgccatcgcggccctgggggccttgatcctgggctgctggtgctacctgcggctgcagcgcatcagccagtcagaggacgaggagagcatcgtgggggatggggagaccaaggaacccttcctgctggtgcagtattcggccaagggaccgtgcgtggagagaaaggccaagctgatgactcccaacggcccggaagtccacggctgagccaggatgcaaggctcctggtcctgtttgcagccggccaagaggcgctgggaggggcaaaaccatacggatgcgctgctgtctgagaggaagggctgacacttgctggcatggcctctgcgggcttcgtcatcgcatgcactgatgcccggggacctggctgtcctgggcttcccctcggcctccaggtgaggctgcccattgcaggcactgggcaggcctgaccttgctggggctcatggccctgtagcgcttttgttacttgaatgtctagctgagcctgtttttgatggagctactactgtaatgcgtgaactaacaaacctgtgaactgtaaataggcccctggaagcacgtgcttaagcccttttgctgatttttaaaaatatcatctagcgcacacgggactggtattctggctgtactaatgacaagctgagtcaagaccctggagggtcataggcttgtaaaggcccacgccacactcggcaggggtctctcatgtgtgtccatctgcgtgtatgtcaaggaagtgagatgccaatttggggtcttgaggctgaccagttggggtgcttgggtgatctctgcttcattagtcatgggtggaagaaaaaccacaccccccgcacccctccgttctttctgcatagactcacttgttaaatagcagttctgttgagagtggagttactgcagggaagctaccggacctgcctgggagccagtgaagggcgagtcagggcacgcgtcctggaggctgccagcgtccttgtagcagagcagtttcttgccgcttgggtcttcagcacgccaagccccccaccaaccctccaccccgagtgaaggcttcgctgaaattgctttggtcctcatagagcctgtggtggctacttttggtctgaaacccacttggcccaggaaagagaaaaggttgtatgttttgtgttggtgtttcctattttctgcactggaggggaggggactgttgaggttctgtcttttttcttcttttcctcttccctcttcacatcacttggcttcctttcctctctgatgacc

SEQ ID NO: 7079 - DNA, 6000 bp, Homo sapiens
attttagaaatcccatataattttggaacatatattagcattatttaccaaaaatataatctaaagaagattgaacatcattttggcaatcccatgtacctaaacatgtcaaataatcctgtttacctctcttttctggacacttatgggccctctgaaacatctgaaaagccaggtgttaggaaagacaattttgaaatttcagtttgattttgggacgccttttaaatatgtttaaagcacttgatattatgaaatagaattccaggttaccataagttatttattttgccaaaataatgactcagaaatttaaaagaagcaaaaaccttttataaccctttatgaattttgccaaagagcagattggcattttaagaataccttgttgtgtttttatttcaattctcaatttacagaaaaaccatataatacccttttgaatttaattaatatgttcacacagagaaccttttctgcaagattaatctccacaattcttccaccacttctttgaactttcagctttttcctatctaatttaaaacaatcctttaaccctaggcaaaaatgtatatttccatgccttcttataaccttttacaaaaaaaaaaaaaaacccacatcgtactgttcttacacatcttgcacgtaaatctatttccagtagtttcaattacatgttataatggtaacccctagcaatttttaactttaatttaaaacctggcaagttgttttaattgtgtgctaagtacagataagttttgactccactataattaagggtatggttagttgcataggtccccaggccttaccagttgtgaagctggcaagtcaaatagttctcaaaacccaaaaagcagtttgtaacctcaaaacacttagcaaacctagcatttgacctgcattattttgtccacctactcacattttaatgacatctgctttttacaaataatctttaagactgtttttatttctcaaagattaaagtcatgtgaactgaaaggtaccacagcttttatctcccctttaaaaaacattagatgcaagcgcttgtctttctttaggccaaattaattagagctcttttacagacatcacatataatacacacacagacaggcagaagaaaacccagtcctctgggtagggccctttaacagaaaaggctaggaaaacatgcaaatatcaaaccagaaagaaacttattccctaaggcaggactgctaaacaaagccttgccaccacagttacaagccatgcccttgggatgtaaaacaagatggaggcttgatttcacaactaaaactttgcagaaaatataaacagtgatagctttggggactggcctagtaaaaacgatttctaaaagaaagaaaaaaaaactttaaaggttaactgctgatagggtggacaataggaaagaaaaataaacagtttaaaaatgcctggggaagaatgtcttattcttatgcaagtggttcctccaccagggagacaagtttaagcttaattactgtctggtagaattaaactccttggctagggaaagggaaggccacggcaggtggcacgtggctgggaaccagccagccagctgaacccttgggccatgcatcccagccccatgagggagtggggagcagcggggagctgctgctttctggtgcatcccaaaagaggaaggaaaaagccatgagcattaaaaggctcggaagggagagagaaaaataattcttgatttgcatctcactcaccacttctcaggccccacgttgggtgccaaaaatgtcgcagggcttttccttagttcagctaaagatagggttttttgtcccatgatcatgaaaattcaggctcacaggcaatttgaatggtgggtaagacagggttttattgggtgaaaagggaagaaaaggggaaacagggactcttactgggccagagtctctgttagagcacttcctacctggccattcaaatcccagtttccacacagaaagaggaggggccaggcttctccctgctgcaaacagcacaaacttctgtggctcctcccagtgtgcaggccagttggagaggctggagattattgagggacctcctctcacctggctgtctaactattattgccctcattttacagatgaagaaactgaggcagagagattaagtaatttgcccaagattatgaagctagtaaggatatagcagacctggaattcaaagtcaaatagtatggcttcagagtccctgcacttaactactatgttaattaagtaattcattgaattatttcttattacatgttggctgttgctgtcatcattattattttctttttcaccttttaacattaaaaaaaattttttttgagacagggtctcgctccattgcccaggctggagtgcagtagtgcagtcatagttcatgacaatctcaaactcctgggttcaagcagtcctcctgcctcagccttctaagtagctggggactataggcctctgccatcatgcccccattatccttgattctatttacaaagcagaaaagatcaaatggacagataactgtattatatacaagaaattagacttgccatgtgacctcccaactttgactttgactcagatgctcactgaagcattatttccttagggaaaccttccctgacactgggagaatgcccctaattataaattcttacaacattatatacctcttcttggttgcaataatcataattacatttatgtcattgtaaggacataatgacatttcaatattgtggtaaaaacacacgttattaaatttaccagtcttaattatttttaactgtatggttcatcagtgtgaagtataggaagtattcacattttgtaacagatctctagaatgttttcaccttgaaaaactgaagttctatgttcattgcacacaaattatctccctcctcctttctctaagccattggcaaccacctttctcctttctgtttctatgattttcattgctttaggtacatccaatgattgaaatcatacagtatttgccctcctgtgcctggcttatttcgcttagcatgatgtccttgaggttcatccacgtggtagtatgtgataggatttccttcttttttaaggctgcacaatactccattgtatgtatgtaaccacattgtctttacccattcatctgctgatggacatttagtttgcttttaatgcttgactattgtgaataatgctgcaataaacatgggtgtgcaaatatcttttgttgttgttgttgttttgttttgttttgtttttgaggcagggtcttcctttgttgcctgggctagagtgcagtggcacgattactgttcactgcagcctccacctcccaggctcaagccatcctcgtacctcagcctcctgagtagttggagctacaggcatgtgccaccatgcctggctaatttttgtatttttttgtggaaactgggtttcaccatgctgcccaggctggtctcaaactcctgggctcaagtgatccacctgcctcaacctcccaaagtgctggaactacaggcctgagctatgatgcctggcccggatgtcattttgagaccttgctttgaatttttttagatatatacctttctgtttttgtttttttgccactatactgttttccacggtggcacccaatttgcattcccaccgacagtgcacaatttctccacatcctcatcaacacttattttttgtttgtttgtttttgttttttgatagtggccagcctagtagatgtgagctggaaatgttgcgggatttttttttttttttttttgagacggagtcttgctctgtcgcccagagctggagagcggtggcgcgatctcggctcactgcaagctccgcctcccgggttcatgcgattctcctgcctcagcctcccgagtagctgggactacaggctcctgccaccatgcccggctaatttttttgtatttttagtagagacggggtttcaccatgttagccaggatggtctcgatctcctgacctcgtgattcgttggcctcggcctcccaaagtgctgggattacaggcttgagccagtgcgcctggcctgttgcgggatttttaaggaatcacagagacctatggggttcaggaggatatttattaattatttaggtgcaccggcccagtcggattaacatccaaaggactgagcactgaacaaagagttaagttaacttttaagcatttcgtaggggtagggagatctgtgcagggggaagcatactacagaagcgagaaacaaaggcagttattcaattgagacatgcattacatcatttcttacttttcaaggaaaaacatgttttgttacttgagtttatctgtctagtgaccttgcagctacacagctagggaatcagggtcttcacaatgcctgggaaaggaggggagagaaggctcactagccacagaaaaataggcagttagttttaaaaggactccagctctttctctttctcagggggaattgagttttcttacatacaactgagtttctgcttatacactctttaatttcttttaattcctgttccaatatctcattatggttttgatttgcatttatctcgtagttactgataatcattagaggacttgcatctctcaggattagatgatgtggctcttggccagagttttggagagcacagccctggcccatgagcctgctgggtcctccgagcgccgccccacccaggcctgcgcggcgtctggtggccatcaggtaaggctgggtcatggaaagaaagaatgaatgcagactacgggcggtgaatagaggtctcggatgccagcaggcgtcccaacccagcaggaactggctcaattctcagaagaaagcgatcggccccgaggcaggaaggccggctccggtgcagggagcgccgcctgcgggctgcttcgggccagggtcgacccgagggccagcgcaagcagcggcaacaggagcgccaggaggtgaggcgggttcgccaggagtggggccagcgcccgggctgccagcctagcaggggcgtcttggcggagccccctcgccggctcccagagaggctgggaagaactgggaggggtgtccccaatgcggggcgcccaagcgtggcagcacgggctgggagcggggagccagcggggtgcggcgccggagtgcggggagaaccaccaggcgccggaattggggagcacgtggagggggcagcggctccagccccagaccgccgcgctctgtcactttgcattaagaaagcttccggggaatgcacacggcctggccgccgccttcgtgcagcccgccctgcaggtgcaggaagaaaagaataatcgcacccgtttctcaggtgcttacttcaccatgtccgatccggtaagttttttatctgagcagcggcctgggtgagagcgaacatgagctttggaagcgcactatttgtgtgttgtgcatctctggacaggttacttatgctctctgggctccagtttccacacctgtttaaaaaaacaaaaggaaaaagaaaggttaaaattagacttccctcacagagattctgtgagccttgtttgcttcctaaatgttagatgttgttatttctcctggggtaatctacgaaatagggtctcctggtcctattttacccttgggagatccagtttcagacagttaagtaacttgaccacagcaattaaatggaaactgtgggatttgaactcaggaagtcaaactccggagactgaatattatctaatccaggtcccaccatttctcagaagggtgaacttgggtttgccacttctgggatccttttccctatctgtgaaacaggtgcaataatagtagcttgcctatggggttgtgaagatctactgagctaacccacatacgtgtccccctactaatgtgtgcattccagaagggtaggatttt

SEQ ID NO: 7080 - DNA, 6000 bp, Homo sapiens
atttaaatctgtggcttaatgtcttttgttagtttggaaaaaaattttaagatcactgctatttcttcttacttgttttctctctcttctgcttcttaattgcaaatgcatgtatgttagatcatttcacaatgtcttctatgtctcttttgctcttttctgtatttttgaactttttttctctgcatgcttcaatcttggtattttctattgaccaatcttccagtttactaatcctctcttctgatgttactagtatgttgccaaatccatctcttcagtccttataaacttcagttattatatttttcagttccaggatttctactttttaaataggttccaaatttctgatagaatttttgaacacattaatcatagttattttaaatcatatctgataatgccattttccaattcacctaagtaacttttctattgtctattttatcttcattgttgatcatttgatactgcttgttggtttaccttgtaattttaactgaaagttggacattatgtataaaaagtatagaggctttggatgaagctaactttttctagatcaatttaaattttcttctagcagacatatagcatataagcagattacaccttgatgcagtcaagaatgaactatttctaatttttccttattcccaaggaatagtattttctaaatagctgggtactcaccagggcccatcttttttttgccaggccctgaactctaattcttccctcagcttgtaaaactgtgaaaattccttcttagttttcccacctattagcaggtgtttttttgctaagtttcttggcatgctacttattttcaatgactttgcacatgatttgaggggaaattgcatgcagaatttcaatgcatttttcctctcttaagtactatataagttggcactctcttgtgcagtttttttttttctgcttagtagttgccctcagtgggaggattagtgtgacaacagctacttcattatagccagaagtggaagtccctcatccatattttattttacaaaactaagcctcacttacatttaaaatggtatgaaatagtttgaacatacaaaagggcataaaatataatcaacacccatggtagcttcaccaagctttaccaaactgttgagacccttgaacattcctccttctcacaccccctccttttccacactattcaaaatttgatgttattatccccatgaatttttaaatatttttatgatgggtgtgcttacctaaacaatatataggatgattttgtatggttttcagtgtggtgtcaatggtgttattatgcttatgctgttctctaacttccttttttcactccaaattttgtttgtgagagtcattcactttgttgtgtgtggctgtaaatgattcatgtttacactgagtgacagtattgcgatttattttttcactctcctgatgatggctatttagattgtttccaatttttcactattaaaatcaatgctgctatagacatgcaggaagaatttctttaccagtttacataagagtgaagttactgggttttaggtagggcatgtgttcgcttttattaggtcatgccaaactttttaccagaccagttgtaataatttacatttcctctggctataaatgagagttcctattatatcatatcctgagcaatatgtgatgtcatcagactttcagtttttgccaatccgacaaaattaaaatggtatgtcattgtggtttttctttgtatttcttttctcttctttttcttttttttgagatggagtctcgctctgtcacccaggctggagtgcagtggtgcaatctcggctcactgcaacctccacctcccgggttcaagcaattctcctgcctcagcctccagagtagctgggattacaggtgcccaccaccacacctggctaatttttgtatttttagtagagatgggtttcaccatgttggccaggctggtctcgaactcctgacctcaggtgatccacccacctcggcctcccaaagtattgggattacaggcatgagccaccacgttgaccatgaagttaagcaccttatattctccatagcactcacttcaatctaatttcctgccccaagcttctccatttccccagaatctcttgaaatttggtcaacttttagggtgaattacagcaactccaggaaacatttctcagcactgaaactggtggataaatgcacctacaggacttcaaattcgatgacacttttaatgctcatgacaaacctgcagcaaagattgatgacctccattttatggatgagaaaacagagaatcagaggggttagagaacttgcccaaagacgcacagctgggacctggcacactccaagtcaggtgcacttcactcctccgtaggagactgcagaggttgggtgctgcagcggtgtgtcaggccattcttgcattgccataaagcaatacctgagactgggtaatttataaagaaaagaggtttaattggctcatggttctgcaggctgtacaagcatactgccagcatcttctcggcttctggtaaggaggccctcagggagcctttactcaaggctgaaggtgaagcagaagcagacacatcacatagcgacagctggagcaaaagggggaggcgccacgcacttctgaacaattagatctcaggtgaactcactcatcaccaagcggatggcactaagccattcatgagaaatccgcccccatgatccaatcacctcccaccaggccccacctccaacattggggatgacatttcaacatgagatttgggtgggacaaatatccaaaccatatcaaggggctcctgtagcaggaagcctcctaagacaccttctgtccttgtaggaaacacacatggtggcccgatctgtatctgaggataaggtgctgttgccctcaggggtcagcctgcgtgcaaagacccaaaaggggatggattcggggcagagaaggcagtggaattagggtaggccccatttggtgctgtgggagcatgaggagggagtgatggagaaagtctgtgtttttaagctgatgtttcccagaagtgagcagtttattttaaacagtgttaaatatccctggatcccctagtgaaagcgtaggctctttcatcacttgccctgctgatggaggaggcaagattctcaatttggtgctatcgcatcttaaacactactctctctttttttgtgttttgttttgtttttttttgagacagagtgtcttgctctgttgcccaggctggagtacagtggtgtaatctctgctcactgcaacctccgcctcttcctgggttcaagcaattctcctgtctcagcctcctgagtagctgggattataggcacacaccatcacacccggctaatttttgtatttttagtagagatggggtttcgccgtgttggccaggctggtctcgaactcctgacctcaaatgatcctcccacctcggcctcccaaagtgctgggattacaggcatgacccagtgtgcccggcctccctttcttaactttaaacaaagacaaaccacatctccagtttctaggactctcaggcaggcagtagcatgtcactaaaattcaattactgcctttgtttttcttgtatttagtttttatgttgtattgtatttagttttatggtaagttgattgttttgtttaagtaacacttatataatatctgctatatgccaggcactgttctaaatgctttataaatgttgactaatttaattctcccaaagacctatgaggcaggtgctgtgattatcattactcccattttacagatgaggcccagaaaggttaagcaaactgcccaaggccacaaagcctataagtggcagagctgggatttgaactgagaccagccagctccatagtctgtgtcttgaccagcatggcgcacactgcctatttcatgccagttatctgctgatggtcatgatataatatttttgagacatgtttattggagtaaaaaataggaggcaaggtaaagatcaatagtaagtggataattaatagtagcaccagtgaaaacctcaaacgcaataggctagtggcaggagttctggaacactccagtgtggctgcagggatacagcacatggaccatgaaagttgagttgagaggatgggaggggaaaggtgttggagggcaggagtctgctccagcagaggcaaagatgcatgacgaagcctgggctgccggggagacgatgagtaattcagggcagtcagccagtaatggcaggaaacccgtgcactggtacagcacttcacagtccgtgaagcactaccacatctgctttctcacagcctcttcttcactgccaggtgcagtgagcactattgtccccatttcagagatggtaactgagttcagagaataaaagagccagagaagagctactatttgcttcaagatcttctggcttcaaattctgagcccttttctcaactccactgtgtcagggatctttggtggcaagtgacagaaatagaattcaacatgattaagcaacataggtggtttttggctcatgggaatgagaaatccacagggtggacatcagatatggctggatccaggacctcccatgatgccatggggactcctgacctgtatttctcagtatggctgtcattttcaaggaggctgtctctaagaggtgacaaagatggctacaagctctgagaagataccaaaaaaagtgtcagttttctagagttctagaaaaaaaatctcaggactgctttcactggccttgcctgggttgacatccatccctgatgcaatcactgtggtcagacagatggggtgttttgattggccaagcctgggtcaggagcccactttgtggagcatggggtggagtcagcctcaggcaaaccactagaggcagctcagatagaggagctctttgggaagagacgccgggcaggcagaagcagcaggtaccccctccacatccctagggctctgtgatgtaggcagaggtaagaaattaggagggatgaggagttttttgtttgtctgtttgtttttttaaagacagggtctcactctttcattcaggctggagtgcaatagtgcaatcatggctcactgcagcctggacctccggcactcaagtgatcctccttcctcagtctcccgaatagctgggaccacaggcacacagcacccggctaacttatttttacttctatttttatttttggtagagacaaggtcttgctatgttggtcaagctggagatgaggaatattgaatctgggcaaaggagtttgcactttttgctgtgctgtggtcaagataaaaccatcagggagtgacggggacagagctatgtcaggactcgcaccgtggctggggtgatggatgtggacagaatagtgagggggcagacacagactccccctcctgcgatcagaggccacatcttcaaagtgtgataacaggacctctgcaggggttggaatcacacaggattcatattcctaaaagcaggttgaaactgcatctacctcaacattattttatttgagtagtgatgttattgcttaggatgatgctggagttaaatttttaagtgtgcttatctatagaaaatatattaaaatatgtattaaaataaacaacagtgcacacaatatacaaatatggccaaaattttggatatgagatattttggcaactcttggctagatcattctgagaccccctctgtttctgaggctctaccttctccatcaattacagctgttgtttgagtgtttatgtgatgggggccatctgcagggttttatgcaaatcacctccttgaattctcacaagcctggaagcaggccttgctgtttccactttacaaggctcagagagggcaagggactggcccggagccacacagctggtcatctgaaccttcctggccc

SEQ ID NO: 7081 - DNA, 6000 bp, Homo sapiens
tctcaaactcctggcctcaagtgatctgcccgcctcggcctcccaaagtgctggaattacaggcgtgagccactgtgccctgccataatatactactttttatctgttgtcctacaacacctaaaatatttactatttggccctttacaaaaaacatttgccaacccctgctctagaaaatgcaaatcaggtcaggcatggtggctcacacctataatcccagcactttgggagtctgaggtaggcagatcacctgagctcaggagttcgagaccagcctggccaatgtggtgaaaccccgtttctactaaaaatacaaaaattacctgggtgtggtagtgggtgcctgtaatcccagccacttgggaggctgaggcaggagaattgcttgaacctgggaggcggaggttgcagtgagctgagactgtaccattgcactccagcctgggtgacaagagcaaaactccatctcaaaaagaaaaaaagaaaatgcaaatcaacctatggtgacagaaagcagatcagtggtttcttgggtatgaggggtcagagagaggcaggtgggagagattacagtcacaaggagacttctgcgtgatgcataccttcgctatcatgattgtggtaatgacttcacggctatagatataaaatatatgtcaaaacatcaaattctggctggacacagtggcttatgcctgtaatcccagcactttgggaggctgtggcaggaagatttgcttgaggccaggtgtttgagactagcttgggcaatattgtgagaccatgtctccaccaaaaaaaggtttttttggttttttttttttaattagctgggcatggttgtgcacacttgtagtcccagctactctgaaggctgaggtgggaggatggtttgagcccaggagtccgaggctgcagtgagctataattgcaccagcgcactccagcctgagcaacagagcaagaccttgttaaaaataaataaataaataagctgcgcgcagtggctcacacctgtaatcccagcactttgggaggctgaggcaggtagatcacctgaggtcaggagttcgagaccagcccggccaacatggtgaaaccccatctctactaaaaatacaaaaattagccaggtgtggtggcgtgcatctgtaatcccagctactcgggaggctgagggaggagaattgcttgagcccgggaggcagaggttgcagtgagccaagatcacaccactgtacttctgcctggttgacagagcaagactccatctcaaaaaaataaacaaaaaacttgctctagtagccaaaaacctaagttgagttgccatagtgaagagttgtagtctctcgcctggattttagacctaagtcagcatagatccagagtcacttaattggagagaagtttggttctccctgagagaggaacatgccctgtttactagagtgtgcatcagggagaagaaaatacccaaccttttgaggattcctagacattggctctgaattaacgccaagtcctgaggatccaaaatgccactgtggctcatcactaaaagtaggggcttaaagatagatggtcaggtgctagatggagtcttagctcagccccaactcacagagggctccgttgatctatggtcccaccctgtggttatttccaaattcctgagagtataataggaatagccatctatggcaactgacaaatctccacactggctctcccacccatggagtgagagaatcatggtggaaagggctaagggaaagttcctgtaacttccacttcctgtcaagacagttaaccagagggctgggcgcagtggcttacacctgtaatcccagcactttgggaggccaaggcaggcggatcacgaggtcaggagattgagaccatcctggctaacacgatgaaaccccatctctactacaaatacaaaaaattagccaggtgtgatggcgggcacctgtagtcctagctactcaagaggctgaggcaggagaatggcgtgaacccaggaggcagaggttgcagtgagccaagatcatcctactgcactccagcctgggcaacagagggagactctgtctcaaagaaaaaaaattttaaaaagacagttaaccagaagcattatcacatccctggagagtcgcacagactagtgccaccctcaaagacttacaaggggccaggtggggtggctcaggcctgtaatcctagcattttgggaggccgaggcgggtggatcacctgacgtcaggagttcgagaccaacctgggcaacatggtgaaaccctatctctactaaaagtacaaaaattagccgagtgtggtggcaggtgcctgtaatcctggctactcaggatgctgaggcaggagaatcccttgaacctgggaggcagaggcttcagtgagctgagatcataccactgtactccagcctaggcaaaagagcgaaactgtgtctaaaaaaaaaaaaaaaaaaaagacttgaatgggcaggcgtttggcatatgctggttggatggatcttagagaatgactgtggactatgggaaactcatttagatggtgactccaattgcagctgctgcctcacatgtggtatctttagacagcagaagaaatcaacatgacccctagtgtggtgcaatgatgtattaaagactcagttaaggcaagatgtggtggcttacacctgtaatcccagcactttgggaggccaaatcacttgaggtcaggagtttgagaccagcctggccaacatgtaaaaccccatctccactaaaaatatgaaaattagccaggcgtggtggcgcatgcctgtaataccagctactctggaggctgaggcaggagaatcacttgaatctgggaggtgaaggttgcagtgagccaagatcatgccactgccctccagcctgggcaacagagcaagactctatctcaaaaaaataaagactcagttaaggcaccactggagagaccacaccccagaaagaatggtttgggttttttaccccgcacagaggctgggattcttttttatagcatgcacactactatctttttttttttttttttgagacagagtctcactcctgttgcccagtctagagcgcaatggggtgatctcagcccactgcaacctccacctccttggttcaagagatactgctgcctcagcctcctgagtagctaggattacaggcatgcgccaccacgcctggctaattttttttttttttttttttttgcattcctaaagtgcaaactttatttgagtttttttttttttaatttatttttttattgataattcttgggtgtttctcacagagggggatttggcagggtcatgggacaatagtggagggaaggtcagcagataaacaagtgaacaaaggtctctggttttcctaggcagaggaccctgcggccttccgcagtgtttgtgtccctgattacttgagattagggattggtgatgactcttaacgagcatgctgccttcaagcatctgtttaacaaagcacatcttgcaccgcccttaatccatttaaccctgagtggacacagcacatgtttcagagagcacagggttgggggtaaggtcacagatcaacaggatcccaaggcagaggaatttttcttagtgcagaacaaaatgaaaagtctcccatgtctacttctttctacacagacacggcaaccatccgatttctcaatcttttccccacctttcccgcctttctattccacaaagccgccattgtcatcctggcccgttctcaatgagctgttgggcacacctcccagacggggtggtggccggtcagaggggctcctcacttcccagtaggggtggccgggcagaggcgcccctcacctcccggatggggcggctcgccgggcaggggggctgaccccccccacctccctcccggacggggcggctggccgggcggggggctgaccccccaacctccctcccggacggggcggctggccgggcagaggggctcctcacttcccagtaggggcggccgggcagaggcgcccctcacctcccgggcggggcggctggccgggcgggggggctgaccccccccacctccctcccggacggggcggctggccgggcagagcggctcctcacttcccagtaggggcggccgggcagaggcgcccctcacctcccggacggggcggctggccgggcgggggggctgaccccccccacctccctcccggacggggcggctggccgggcagaggggctcctcacttcccagtaggggcggccgggcagaggcgcccctcacctcccggacggggcggctggccgggtgggggggctgacccccccatctccctcccggacggggtggctggccaggctgaggggctcctcacttcccagtaggggcggccgggcagaggcgcccctcacctcccggacggggcggctggccgggtggggggctgaccctcccacctccctcccggacggcatggctggccaggcggggggctgacccccccacctccctcccggatggcacggctggccaggcggaggggctgaccccccacctccctcccggatggggcggctggctgggcggggggctgaccccccccacctccctcccggacggggtggctgccgggcggagacgctcctcacttcccagatggggtggctgccgggcggagacactcctcacttcccagatggggtggctgccgggcggagaggctcctcacttctcagacggggcagctgccgggcggaggggctcctcacttctcagacggggtggttgccaggcagagggtctcctcacttctcagacggggcggccgggcagagacgctcctcacctcccagacggggtctcggccgggcagaggcgctcctcacatcccagatggggcggcggggcagaggcgctccccacatctcagacgatgggcggccgggcagagacgctcctcacttcctagatgtgatggcggctgggaagaggcgctcctcacttcctagatgggatggcggccgggcggagacgctcctcactttccagactgggcagccaggcagaggggctcctcatatcccagacgatgggcggccaggcagagacactcctcacttcccagacggggtggcggccgggcagaggctgcaatctcggcactttgggaggccaaggcaggcggctgggaggtgtaggttgtagtgagccgagatcacgccactgcactccagcctgggcaccattgagcactgagtgaacgagactccgtctgcaatcccggcacctcgggaggccgaggttggcggatcactcgcggttaggggctggagaccggcccggccaacacagcgaaaccccgtctccaccaaaaccagtcaggcgtggcggcgcgtgcctgcaatcgcaggcactcggcaggctgaggcaggagaatcaggcagggaggttgcagtgagccgagatggcagcactacagtccagcttcggctccgcatgagagggagaccgtggggagagggagacggagacggagacggagacggagagggagagggagagggagagggagagggagagggcatgaaaataggaaatgtgaatcctccaacttttttttttggagacggagtctcgctctgttgctcagactggagtgcagtggcactatctcagctcactgcaaactccatcttccaggttcaagtgattctcctgcctcagcctaccaagtatctgggactacaggcaggtgccaccatgcccggctaatttttgtatttttagtagagatggggtttcaccatgttggccaggctggtcttcaacttctgacctcaagtgatccaccctcctcagcctcccagcgtgctgggattacgggtgtgagccacctcatccagcctcttttttttttcttttaatatctaaaatcctttttagaacatca

SEQ ID NO: 7082 - DNA, 6000 bp, Homo sapiens
gcaaggcgtggggcatggctggggggcgggatggggggtgtgggggacaacggggctcaaagggcccaataggggatctcaggaaggcgagggatgcccatgtaccactcaggctagggagacttctgggcacagggaggatccttgagaactgctctgtctgggtgaggatgcaggctgaggcctctggggtccagataggaagtgagcaacggctgtgtcccaggggaagcaggctgggaaggtgtggggtgagggcaaggctcttgccattcagatcgcgctgtgatccgtggtgtttctcctgtgcaggtactggtgaggtttgtccaatggcggcggcagcggcagcggcggcagcggcagcagcggcagcagtagcagcccctcccacagctgtgggctccctctcgggggcggagggggtgcctgtgagctctcagccacttccctcccaaccctggtgagctccaagttggttgcgggggagaggggagaatggagtagagtcccttggtacaagctcctctcccccctcttttcccaccaactcctatttccctaccaaccaaggagcctccagaaggaaaggaggaagaaatgttttcttaggggaattcgctaggttttaacgatttgtttctcctgctcctcttctgtcagacctgaccccacacaaacctgtcccctcggttgtgttgaagtcccctggacagtgggcaggggtggcagaggacacgagcagccactgcccgtaccccctctcctctctgtaagcccatgccctgtcttcccagggacttgtgagcctcttccctcgacggtcctcttctctccttccagtcctctccccctgctgtctgcagcccctccccggggagttggtgctttcttttccttttttttttttttccagggggagggaggagaggaaggagggggatcagagctgtcccaaagagggaaagcggtgaggtttgaggaggggcagaagcagggccggcaaaggttgtaccttcataaggtggtatggggggttggggtcaggccctgaacatcgtcctacttgagaatctgtcaggggaaaaagtcaaggggagcaggaggaagagccaggagggccagaggcagagaagagatggagtcttaggggccagggtgagcgaggggtccagggcctagaggtgcttcctgggggcgggggaatgcagccagtgtccccctcccctcttccaccccagctccagccctggtcttgtcttttcatccctcttccccacgacagaagaagttgtggccctggccatgtcatcgtgttcctgtgtcccctgcatgtaccccaccctccaccccttccttttgcgcggaccccattacaataaattttaaataaaatcctgtttctggctctggattgaatgaattgccctcactaagaactgccgccaaccccaagggtttcttctcggcctggtgtccgtcaatccagccttgctctgccctgtgaggctgtgaggttctggctccgccctccccaggggcagccttactggcggcagcacagatacagggcggggccaaggctgtggctgtggagagcaagttccaggtctctggggaattcccaactcggacaggcccagaatagcccctggaggtttgaagaggccccgtcagaaacccaaacagagctgccagacgggaatgccgccctcccccgtccacactcatggccgctgctcagcccccagccgcatccctccccacgcgcgtcacggccctgaggccatggtgggtggatgcggctgcggaaaggctggggagtccgagccctaggactgggagcagcgaggtagagaatgaaagctgcacctgtccctcatcctgggcatgggccactctgtgtttacacgggctcctctgcccagctcctcctgccccttggaattccctttcctgtccccgctccgtcctttccagggccccttttttgagccttccagcgccagtttctgccgctcctttctgcaggctccattctctccaaaccccaccctgctcctcctctgcagcctccccgcgtcttgccccatcttccttgccctcctgctcgtagagacgcctccacccggtcctgcctgtctcactggtcccgtctcctcgcagaaccctctccgtttcccccaaatccccgtctcttccaggaatcccggtgaccgttggcgggaggggccggggacttaagaaggaggcgtctctcctggaggcgcgcgtgagaaggggcagggagggggcgcgagtggtccccgggccggttgcctgggtaacgcgtggctcccttgggctggcgggaggggccggaggctcgcgaggggcgggggcggcgacggcggcggagcgtaggggaggggaccggagaggaggggatgagcacacgggagaggagaagagggagacccgccgcctccctccctccctagctgacttgctccctcccgggctgcggctgctgcaaaagccagcagcggcagcgggagctgtccggaggccggcgtcgaggtgagacccgggcagactgaggctgcgggtaggagtggaccgaccgacggctgacgccgggcggactgcacgggaatgcgggtgtctggagggctggtggtggtgctgggcgggctgaaccatcgggaggaggcgccagcccaccgaaggcgagggaagccccgggagaggggctgacaggggatcgaaggagataaccaggtcccccagaaaggggcgggagcgtcctcgccctaaacgcgcagcaagaaaacccgcaccgcctgggagcccagggaggaggggaggatgcagagggagtggaatgcgaatgtcgggtcctctgcccagtcggcctgtcggagtgctatttgcacagctcgttgattttggggtgctgggatctgagagtctggatcttgttggatggacccagggagagaccctggagaaggtcctgtttacaaaagggttaatcttccccagggctctccaagcagaagactttgagtagagcactcctcccgcagggatgtcccaccctaaggcaaaggaaaccccaacttttcttcctctccctagaggcagtgcaaggctggccctgagacaggaatgtggcccaattgggcctgcagtgctgagcgccctcttccctcctcaccccaagcctatctcctcctcttccagggtttgccgctgtctctgctattccatcctccccataggggctctctcccctctcccatctcaagatggcagccagcagctctgagatctctgagatgaagggggttgaggagagtcccaaggttccaggcgaagggcctggccattctgaagctgaaactggccctccccaggtcctagcaggggtaccagaccagccagaggccccgcagccaggtccaaacaccactgcggcccctgtggactcagggcccaaggctgggctggctccagaaaccacagagaccccggctggggcctcagaaacagcccaggccacagacctcagcttaagcccaggaggggaatcaaaggccaactgcagccccgaagacccatgccaagaaacagtgtccaaaccagaagtgagcaaagaggccactgcagaccaggggtccaggctggagtctgcagccccacctgaaccagccccagagcctgctccccaaccagacccccggccagattcccagcctacccccaagccagcccttcaaccagagctccctacccaggaggaccccacccctgagattctgtctgagagtgtaggggaaaagcaagagaatggggcagtggtgcccctgcaggctggtgatggggaagagggcccagcccctgagcctcactcaccaccctcaaaaaaatcccccccagccaatggggcccccccccgagtgctgcagcagctggttgaggaggatcgaatgagaagggcacacagtgggcatccaggatctccccgaggtagcctgagccgccaccccagctcccagttggcaggtcctggggtggaggggggtgaaggcacccagaaacctcgggactacatcatccttgccatcctgtcctgcttctgccccatgtggcctgtcaacatcgtggccttcgcttatgctgtcatggtgagccccatgggaccctagcccaggcctgctgtggctcccagcttcccgccagcgctgcaatagagcctctggagtaatcatgccttccttcccctctcctctctgcatggatcccacctccccaattccagggcctttgtttgcctctccctaggacctaaccctctgagccaccactgccctgcccctttgggtgggagggatatggaaacacgtgtcacacagcctcgctgacctgtgccctcctccccctgccccttcactcctccttcctcccttacccgccatctatggggctggcctctctctcttctggatgacttttccacctgatcccttctgggctggcttctcctgaccccggctatgtgcctccacccctcgccctaaccccagtcccggaacagcctgcagcagggggacgtggacggggcccagcgtctgggccgggtagccaagctcttaagcatcgtggcgctggtggggggagtcctcatcatcatcgcctcctgcgtcatcaacttaggcggtgagtgggggcttgggacaggcaggggaggaatggaagggttggcaagggcagctttactaacccctgcccctgctctctcctgtctgtcctccttacctctcctttgtctctccttgtctccccctccccccgtctgtccttccctctcctctcccacagtgtataagtgaggggctctgccccgcatcccaagacttttcttcctgttgggagctgccttgggcccatccctcccctggggggagcccaactgatggccctggcccccacccctaaggaccaagggagcctgagcggccttgtttacagcttctgtcctgctcctgcatcttgccaggctcctctgccaactgtaggcctgcctcatccctgcactggttccaacctccctgcactaatgcctgcatcccctccggcctcttggccccctatccctgcacttctggaaacctccctgcactctggaaacctccctgaacacctccccaactctgcgctctcagcctccctgcatctctcctggcctccctgcacttcttccagccccccaaattctctggacctccaccctggccgcctcctcccaactttcattgtcttggcatctctcaaccctcagtcctctcttccttcccttctttatcatctcccctttcctctccacgtcccgcccccttcctcttcctgcctcctcatctcccttaagcatcctcttctccaacctcccgtcaccgtttactctgcaaaattgacagcacttagacgaggcttgggggcagggagcagtgttgggagagggctccccaaccccaggctcggactgttctctgctgggaccacccagggtcggacacccaagggtgcctggcaggtcgcagagttggcaagccgggcctcgtatggggactcgggtgagggtggcgagtactggttccgaacgcacgcaggggagaagggagggacgcggcgctgacccttccaggtcagctggagttgacccgcccacctgggcttttcaaccccagtccgcgagtttctttcttgaaggtgtgggggctagattcattcacgtgcttcgtaatgaaataatccaaaaaataggaccaaagcgcccactggcaggagcgagggcggggcgccgcgctctataattattttctaagatgatgggggaggtttgttgcacgcgacagcccgctgaggaggcggggaccgagctacaacgcggttcggatttggcgggggtttttttccttaaaaaaaaaaaaaaaaaaaaaaaaaaagtctgggggaaga

SEQ ID NO: 7083 - DNA, 6000 bp, Homo sapiens
ctgtgctgactgagacccttccagttgactctgaacccactgaggggccacgggtgcttgttagacgcaacaaactgggtccagaagcctgatgtggactttgagactcttggttgcgagtgacagaagctcaaactggctgaagctgaaaggggcattgcttgtcccatgtggttaaatatctagaggttgcgtaagcttcaggcacagctggctcctgtgaccccaggaggtgttgccaggcccctgtcttgtgccagttctccatgttggtgtcagtttcaggtgggctctctccttgtggtggctcgggtgtctgctgacagtgtcaggtcaccgacaaaagagaacgcctctttccctgggtcagcagaagtccaaagagagccttcacttcccaggcctgtggcattagggcttgagagggactttgctgattggccacactggggtcatgtggcccatgaaccagggtactgagggtcgggagaagggacattgcacagcagaagcatgaaataccctcctcccatgtggacaccttccccacaggggagtcccctcttctttaaaatggggctgctcaccctgctctaccactggggtggtcgtgaggtgagagtaagtaagggaccccctgggactgcagtctcctcaggaagaggggacgtgatacctctgctcttggtggctttggagttcagacaggacccatgcggtgtgggtgagggagtgacagggaggcagggcttgccttgagctaagggaggactcagggccagaaaaagtgcccagtgatggaggagactgccctgagaggtggtgagcccccccgtcatggaggtgtgcaagctaacagcagggtcattcaatccgggagccctggattggatgtgtctcagacatggcagaaggattcctttatccagggccttgtggggaggccctccctgttgccaactgagtcgagggctggtggaagaactggtgattggacaggaggccttgaaaacttcccgggcagggggtgcctctgggtctggctttggcggggtggctcctagggaggagctggcctggggacatgccactggtggtgggttcctgggccccctctggagatgtgatcagtgagttcattccccccaggcctcacggtgcccggcttgttccaggagctggccaaggtccctggatgggctgaagtccttgtgcccatgttgtccactgtccacctgcgcctgcctgccgttgcccagaaagtggcctaatgagttccttgagaggcgtgtttaccaggcctgtgttcccacgggcccttgggactctctcagctggttcctccctttcctcgtggtggcccagcctggctttgtgtgcctggagcgggtgtgtccacacactctcacacttgcactttcatgcacgtgtctggccgcctcagctctggtctgggggctttgcctgggagatggagcagttgtggggagtggcctcagccctctggtgtttggagcttctcagcctggctgtcctggtgcactggtgtttggcagcaggccaggggtcaggtgggtttgctgtttgtgtgctgtggcatctggctcagtcccccgggatgtcagtgggcaagcctgggctgaggagccctggtttgggagctggcagacctgggtttgcatcccagcctatctgtccaccagctccagcagtgtgatcttaggcaaccactctgcctctctgggctcagttctgcatctgtgagacggtggtgccaccttggcctttgccggttgtgaagatgagagtgaatgtgtgtgcaggtgccgggggtgacaggaactgctgctgttattactgcaaagggctattttggggtggggggtgctgaattgaatgtatctcaggcagggaccttatcttgtttggcaacccccacagcacagggttggatgtatatggttagcacacagtaaatgcctcttgtggaatacagactgattagtttagatttagaggttgtaaactagtgggctgcaaatattgaaaaatttgaaatcagctgccaacatttaaaaatcatcatttcacgtagaaatcagatttgtagcctgtctgagcactttgggcactttgacagctcttggccacatccctgaagggttgcccctcgttgaacaggtgccaaggcctgtagacacctgcccaggcactgaaggggatggggcccccagcaaatgaccccttcctccttccccaaatatgtggttttaccattttgttcctggtgtgtggtgatggaataggaacttccagaggaaatagagcctgaggtggctcctggaattgaggtggccccagggatctcatactagcaggtgctggttggggacttggggaccctggatatcctgctttttgcctttgggggctgggggctcacctggccatcttccctccgctggaccagctgtcctttgaagcttctgctggcggctggccatttgtgccctgtgactgctctgagctgtcccgtgtctcacagcctccctgccctctgcctctggccctgtcctggttccaatctgaggcaggcctggaggacactgggggcgtggactcttggtccagggttgcccccttcatgcaaggttcctgctgggaatatggcagctgtccccaagtccccattgctgtgtgagggattgcacaattttggtaattttcctacctttggagactgatggggatccctggggagagagagcccagactagcacacaggagatataagggctggcaggcgtaggtgtgattcacaagcctttttggaatcaatgaatatgctaaggaatgaatggtgctggggaaagaaggaacccatatgggctgagcatggcaagtgtggggtcagctcacagtgttgtcacaaaggggccactgtgtccctctctgagactcagctcccttttctgtgaagcacggcttgcagacatctgaaatttgtatcagtgggctatttaaaaaaataaacaagatttttgctgggtacagtgcctgaaagcttaacacttcggaggctgaggagggtagattgcttgagcttaggagttcaagactagcctgggcaacatggcaaaaccccatctctacaaaaaatacatggcctactgcagcctaagtctccccaggctcaggtaattctcccaccttagcctcctgcatagctgaggtcccagctacgcaggagtctgaggtgggaggattgcctgagccctgggaggttgaggctgcagcgggctatgatcacaccacttcactccagcctgggtgacagagtgagaccccatctcaaaaaaaaaaaaaaaaagagagaaagaaaatgcagttttatgtggagcttactgtaacacagatgcagggggctaccctggctgaagcaggcatgggggcctgagcctatgcccccccaccttcccttcccattgggggcctgatgcatgtccccaaatctcagggctcctaggatcacagcttggaaccctctgtgcctggaggcatgagactcactggaaaatgaagtgaatgtggtgattgcaccaggaccatggggacagagcagagcctggaaacagacaccatctgtgtgtgatcacctgacttatgacagaggtggctccactgaaattcagagagaggatggccggttcactgaacactgctgggataattcaatatccatatggaaaaaagaagtgaaccttgatccctacctcacaccatacccagagtgaatcgaaatggatcagagacctttgtgtgaaagcaaaacagtgaaacatgcagagcagagctggcctgtagaagcttctgtgatgatagacattctctgtttatctgtgctgtccagtacagcagctgcatgtagccattgggtatttgatttttttttttttttgagatggagtctcactctgttgcccaggctggatgcaatggcacgatctcagcttactgcaaaatttgcctcccaggttcaagccattctcctgcctcagcttcccgagtagctgggattacaggcacacgtcaccatgtccggctaatttttgtatttttagtggaggggggttttaccacgtgggccaggctggtctcgaactcctgacctcaggtgatctgcctgcctcgacctctcaaagtgctgggattacaggcatgagccaccatgcctggctggctgttgagtatttgaaatgtggctagtgtgactgagggactgaatttctaattttattttaaattaatttaaatttaatttaaaatagtggctgggcatggtggctcatgcctgttatcccagcactttgggaggctgaggcaggaggattgcttgagcccacgagttcaaaaccaccctgggcagcagggggagacgcccatctctacaaaagagaatttaaaaattagctgcacacctgtagtcccagctacgtaggaggctgaggtgggagaatcacttgagcccgggagtttgaggctgcagtgagctatgatcgtgccactgcactccagcctgggcaacagagtgaggccctgtcttgaaaaaaaaaaaaaaaagcagccacatgtggctagtggctactatcttggacagtgcagtcctagaagacacaggggactagctttacgacaacaggacataaaagttaggttagggttaagatggataaatcagacttggtgctgtgaggcctgggccccgctctccctgatgctagccctcccctgacttggaccattaggtcaagttcctgtctgcttcgtctccgcagagctgaggaactgcgtgtggagtcagcccagtctggatgcacaggaggatgctggcggcacagtgagtgaggcctggtgccagagctgtgcggaccccttgttggccatggagcagcaggcccagaggccctctccccagccctgcttgcctgcctcggagaggacagaggcctaggcccacgggggagggtgttggcagacagatgccctccaggccctggggcctccttaacggccccttaacgacacgcgtgccaagggtggaggatgccagccaaggggcgctacttcctcaacgagggcgaggagggccctgaccaagatgcgctctacgagaagtaccagctcaccagccagcatgggccgctgctgctcacgctcctgctggtggccgccactgcctgcgtggccctcatcatcattgccttcagccagggggtgagtgagggcagcccctgggcttcacgtctcggccccaaccttggccaagctgctatcttctcttagcctcttctgtaaaatgcttatcttctgtaaaatgctatgcttttttgtttgttttgttttgtttttgggtttttttgagacagagtctcactctgtcacccaggctggagtacagtggcatgatctcggctcactgcaacctccatctcctgggctcaagcaattctcctgcctcagccttccgagtagctaggatgacaggtgcatgccaccatgcccagctaatttttgtatttttagtagagatgggctttcaccatgttggccaggctggtctcgaactcccaacctcaggtgatccacctgcttcggccccccaaagtgctgggattatagacgtgagccaccatgcccggccaatgctctgtcttttacagcacatttagactggtagaagacaagtttctaatttaaaaaaattttttttgagactgggccttgttttgttgcccaggttggccttgaactcctgggttcaagtaatcatcctggcttatcctcctgagtagctgggagtacaagcatgcacgaccatgcccagcctctctaactttaattcagttttgaagtctggagtggtttcagacattacattaacttgtccagataaactactctcatttttctccatgatgaaattcgattctactgaagacc

SEQ ID NO: 7084 - DNA, 6000 bp, Homo sapiens
gctgtgcaagatttcctatatacacccagcatccgcctagtctgggctgggcggggcagggctgatcctgtctgagaacacaggaactggaagtctgtaccggggcaggtggcaggggcaggcctggcaaagacccagggagaggacaccaagggccagccaccgcacagagagaccagtgactgaacatggctgggccggggtgtttcccagccccgtcacagtgaaaactcacccgtacccggtgaccccaggtgacaattctgaacctgcaacagcagtgcataactgatagtgtcacctctgcctaatcctcctggaaacacacacacaccctgctttatttcccgtctctcaacacccttccttatgggtacttcataccagtcccaagagcaggcttttgtttactttttcttttttttttttttttgagatggagtcttcctctgtcgcccaggctggagtgcaatggtgtgatcttggctcactgaaacctctgcctcccgggttcaagtgattctcctcccccagcctcctgagtagctggaattacaggcatgcaccaccacaccccactaattttgtatttttagtagatacagggtttcgccacgttggtcaggttggttttgaactcctgacctcaggtgatctgcccgcctcagtctcccaaagtgctgggattacaggcgtgagccaccgcgcccggccttgttttcctttttactgaatttaagtgcttagggttattcacaatatttgactcatgacattctttcatcttcagttggaccttgtgcaacctgcatctggtaatttgttatttatctgtttgtgtatttccttataatacagtcactccactgcacgttcttcccctgtgtcctcccttcctattactttgccttccccaccctattctgaatattgagttcatcattcctttgctcctctaaaaactaatgctttttcaaatatttttctaaaagccatattgtttagatttgttgttttttcttgtgtaaaggaatatcctggctaggcgcagtggttcatacctataatatcagcactttgggagggggaggcaggaggatcacttgaagccaggagttcaagaccagcctgggcaacacagcaagaccctgtctctacaaaaaaatttttaaaatgtagctgggcgtggtggtgtgtgcctgtagtcccagctacttgggaggctgaggcaggaggattgcttgagcccaggagattgaggctgcagtgagccatgatagtgccactgcactccaacttgggcaacagagcaagaccctgtctctaaaaaaaaaaattaaaattaaaacaaaaaagaatatcctgctatatgcagctttcttgggtatacttttttctcataatattatgtggctaaaactcacccatagcgtagcattcagctacggtccacttgttgtccctgctctattgcagttctccctagtatgttccatgggaatttactgaatctcctgttagtggacatttgggttgttaccagctttccatgactttgaacacgctaagctgatcatttttgtctgtgtctccagggaaacaatgtgaatttatcaatttacaatcccagtaacaacaaacatataaatatccaattgatctgtgttctttccaacaatttggtattatcaagcttcttaattttttccaactgaaagggtattaagtgacatctcattgtgatctcttcatggttattgcctttccaaatatggtttacagtggtcagttggtggagcagtgggggtcatcctgcaaggggactgtgaagattttttttttttttttttagagatagggtctctaaaactcaggctggattgagttcagtggcacaatcatgggtcactgcagcctcaacttcctgggctcaagcgatcctcccacctcagcctcccaaagtgttgagattaccagcatgagccactatgcccagccaagacgtaaggatttaatgaagcacagaatgcttgcaaagcctttcccagttaggaccacgtcactgtcttattcaactttgggtcgccaatacccaacacaatgccgggtacctcatcattattaaaccaacaatatgataatattaggttggtgcaaaaataattgcgatttttgccataacatttattgagtgcttgcttattaagtgccaggtgctatattaactgacacctttacttttattatttcatttaattattctggaaactctataagttaagttctatactaccccaattttgtagatgggaaactgaaactaagtgtctctcccagaatcacacaagtagtaaatgatagagccaggatctgaacgctggcatctgacacctaagtccttagctactatattataggtgctcaataaattcttgaatgaaataacttcactgtgttattctctttcatgttgcttataaccaaacacttgaaactggataattgataaagaaaagaaatttcttcacagttacagaggctgagaagtcccaggtcaaggggtcctatctggtgacagccttcttgcttgaggggactctctgaagagtactaaggtggtccaaggtgtcgcatggtgagggggctgagtgtgctaacatgttagctcaggtctttgttcttcttataaagccatcagtccccacccattataacccattaatccatgagtggattaatccactcatggattaacccattcattagggcagagccctcatgatgcaagcaccgtttaaagaccacatctctcaatactgccacattggggattaaagttcaacatgagttttagaggagacaaatattcaacccacagcacctacccataaccagagatagggtcacatgccatggtacttttactttttatctcttatcaagtatatttaaatacacttacattttgattataaacatggcttaaagaatttaactcaatttataattggttataatttctcagcaatcatgcagacttgagaactctcgctgtgagagatatctaactcacagattattctgaaatgccaattcctcctttatcaacaattcctctaacctcgctctcccttccttccttccttccttccttccttccttccttccttccttccttccttctttctctttctttcacagtcttgctctgtcacccaggctggagtgcctgggtgacgatcatagctcactgcagcctcaaactcctaggctcaagcaatcagcccccatcagcctcccaaagcactgggattacaggcatgagccaccgtacctggtctgttgtgtctattattgacccacaagggcagagatatttgtatgcttagttttgtctgtatctttagtgaatttagcacttaatgtgtccctagtacctgtaactgtgtgtggcacagagaggtaactcaacaaatatttattgaatgaagaaataaatgcatgcttgcaggaatggatgaataagtgaatgaatcaatgaatactaaattgaatagttaatgaaaattgacgatattattttgattttgtggtttttaaaaattttggaaccaggctgggtgcggtggctcacactgtaatcccagcactttgggaggccgagatgggtggatgaccttaggtcaggagttcgagcccagcctggccaaaatggtgaaaccctgtctctactaaaaatacaaaaattagccaggtgtggtggcaggtgcctgtaatcccagctactcaggaggttgaggcaggagaatcacttgaacccaggaggtggaggttgcagtgagccgagatcgtgccattgcactccagcctgggggacaagagcgagacttcgtctcaaaaaaaaaattggaaccaactgttttttcaggtttcagacatttctgtaaaccagtagaaaagctgggaggcagacaggcgtggtggcttacgcctgtaatcccagcactttgggaggccgaggcgggtggatcacctgaggtcaggagttcaagaccagcctggccaacatggtgaaacctcgtctctactaaaaatacaaaaataagctgggcatggtgttgggcatctgtaatcccagctatttgggaggctgaggcaggagaattgcttgaacccaggaggtggaggttgcagtgagctgatatggctctgccccactccagcctgggcaacagagtgagactccgtctcaaaaaaaaaaaaaaaaagaaagaaagaaaagctgggaggcctgagattttgtgtctattatacctaagggatgaaagagtcctgacctggagacccgaaacaatgtttggctgcttttttctttgtctcttgtaaaccaacatcagcaatgagcaggccacctcaagtgtgactcaatcaacgcgaggcaggaggcatgcaaaacaaaacagaaaactcctggcagccttaatatagcgatttttctagcaatctacatgactatccaggcccaatgcaccccattacatatgcaaaacatctgacgtttgtgtaacaagcccttaacccctggctgttattcttatttccaaactggggtgcatcattagataaatgcagaaatcaagaaccgtcgctcctagtcaagcgtctgtggctcagttctcagagccaggccaaaggagtaattatagctttcctctatagtgtacggggcaggaggctgatttaataaaggaagcctactgtctgtctccagcctggctctgactcatggaacgagggagtcccagagcactacccacagagggtgggtggtgagcagctgagggtgggaggtgagggtggccgctagcaaggcctgggcccagagccctgagaatgaggaaactccctgcttggccaggaggaacctgcagctggagccagaggaagtgaggctcagacagagcagctgctgttccagcaacagcagcaactgccgcacccttgaaaggaggcccctgccgtgtggacccgtaaaataaaatgggttagtaattttcatattcagaattgattgggggaaacgatcgaattgcttctaatggggatggccacctttgtgtgctgtaccagggtctttggtttcttttaggggcctgggtcgatggagtctggagtgatgagcgttcggttaatttggtttctcactttggcagctaattaggtcttcacgaccacagagagagttctgagctgggagtggtttcagctacaccgagggggacggcccgctctggaatggatttgtgttccaccttagataggtcaccagaggtcatcttatccttccttctgcctccagctgctttctccttcctcccctgacaatcagccagacagaggcaacctgacctcttcctcctccggactcctccgggcgggagattcggctccaccccttcccttcccgctgagtcacacacctcccagtcaggtgatcctcccctgggcccttccgagagcaccttgacctatattccgttctctccatgacagcagactctaagagtcccgggagagagcccgccaggccagctggcgtggtgccctggcagccccagactgcagaccaggcgccccgggcagcgggagggggtgctcccaccccagaggcctggaaatggaaagttaggaggctggtggctgtgtgcagggcgggggaggaggaggtggggagttgagtcagctgggaaagctgacagccactggcggccgcgtgcttcctcccctccctctctgggctcctcagctccctgccaggccctgaccaagcaggctgcaggggatgaagcggtgaagggcagatgccattgtggctgggtgatactgcagcccacggggagaggtgaggaattgtgcaaataatgggataaacctacatgactcacccggagaatgtgagccgaagaaaacttctcctgccacaaggaccgaattcccatt

SEQ ID NO: 7085 - DNA, 6000 bp, Homo sapiens
gaaactgttgctcccactttgcagatagggaaactgaggtcaagagggtcaagggctcgcccaattcccacagctaatgtgggtgaagctgggattcgaattccgggtgccctccagacagaggtgtctgtggctggccacagggtgtgcatggccgggcactgggaggtggtcgtcaggctgcaggccttcattgcctgctctttccaaaggctctgcaggagtcaggggcgatcgtggccatgactggggatggggtgaacgacgcagtggccctgaagtctgcagacattgggatcgccatggggcagacagggacggacgtcagcaaagaggccgccaacatgatcctggtggatgatgacttctcagccatcatgtaagctgcccttctggttgtttttcagttgcaaaaatgcctggggtcaccagcttctccctggaacctgctactgtggagatagaggggggggtctcgcggagtccccagggagagctgaatctcggggctcgtcagtgtggcaggtgcccccaaccccaagtaccaacagcctctcatagcagggtcatggggtccatgatgcctggggctagtcacatgctgcccccaggggaatgttacggatatgaagcagagatgggatttgctgcctgtgggtgcatttcatgtggtactgggaatgcccgcctggctcaggctggtgggcagcagctgaatatgtaaggaaaacctgtggccaaatacgtgctcacacttgagtgtggggtgagaaaggattaaaatgaacatcttccgtttgaggcctgcgtgttgatacatatatctcaggcattgcaaagagacctgggcagaaacacccccatcgctgaccacggaggtgctctctaggttctggggcttgcacaaaactatttgttctgtttcacttttctgtatttttttcttaatacatttaccttcctaattttaattagttctgagactctcctcataagctaatcgcagtggttagttgggggtgagggaaaactttttaagcctgatacaaaaaatccaaataaacaaatattgaggctaggtggatcgtgcactttacaaaggtgtctccacagttgattcgccataggaagccttaacacacttagaaaaaaaaaaaaaagtcatagatagctcttattattttgaaatacgtcccatcaatacctaatttattgagagtttttagcatgaagggttgttgaattttgtcaaaggctttttctgcatctattgagataatcatgtggtttttgtctttggctctgtttatatgctggattacatttattgatttgcgtatattgaaccagccttgcatcccagggatgaagcccacttgatcatggtggataagctttttgatgtgctgctggattcggtttgccagtattttattgaggatttttgcatcaatgttcatcaaggatattggtctaaaattctcttttttggttgtgtctctgcccggctttggtatcagaatgatgctggcctcataaaatgagttagggaggattccctctttttctattgattggaatagtttcagaaggaatggtaccagttcctccttgtacctctggtagaattcggctgtgaatccatctggtcctggactctttttggttggtaaactattgattattgtcacaatttcagagcctgttattggtctattcagagattcaacttcttcctggtttagtcttgggagagtgtatgtgtccacagccaatatcatactgaatgggcaaaaactggaagcattccctttgaaaactggcacaagacagggatgccctctctcaccgctcctattcaacatagtgttggaagttctggccagggcaatcaggcaggagaaggaaataaagggtattcaattaggaaaagaggaagtcaaattgtccctgtttgcagacgacatgattgtttatctagaaaaccccatggtctcagcccaaaatctccttaagctgataagcaacttcagcaaagtctcaggatacaaaatcaatgtacaaaaatcacaagcattcttatacaccaacaacagacaaacagagagccaaatcatgagtgaactcccattcacaattgcttcaaagagaataaaatacctaggaatccaacttacaagggatgtgaaggacctcttcaaggagaactacaaaccactgctcaaggaaataaaagaggacacaaacaaatggaagaacattccatgctcatgggtaggaagaatcaatatcgtgaaaatggccatactgcccaaggtaatttacagattcaatgccatccccatcaagctaccaatgactttcttcacagaattggaaaaaactactttaaagttcatatggaagcaaaaaagagcccgcatcgccaagtcaatcctaagccaaaagaacaaagctggaggcatcacactacctgacttcaaactatactacaaggctacagtaaccaaaacagcatggtactggtaccaaaacagagatatagatcaatggaacagaacagagccctcagaaataatgccgcatatctacaactatctgatctttgacaaacctgagaaaaacaagcaatggggaaaggattccctatttaataaatggtgctgggaaaactggctagccatatgtagaaagctgaaactggatcccttccttacaccttatacaaaaatcaattcaagatggattaaagatttaaacgttagacctaaaaccataaaaaccctagaagaaaacctaggcattaccattcaggacataggcatgggcaaggacttcatgtccaaaacaccaaaagcaatggcaacaaaagccaaaattgacaaatgggatctaattaaactaaagagcttctgcacagcaaaagaaactaccatcagagtgaacaggcaacctacaacatgggagaaaattttcacaacctactcatctgacaaagggctaatatccagaatctacaatgaactcaaacaaatttacaagaaaaaaacaaacaaccccatcaaaaagtgggcgaaggacatgaacagacacttctcaaaagaagacatttatgcagccaaaaaacacatgaaaaaatgctcatcatcactggccatcagagaaatgcaaatcaaaaccactatgagatatcatctcacaccagttagaatggcaatcattaaaaagtcaggaaacaacaggtgctggagaggatgtggagaaataggaacacttttacactgttggtgggactgtaaactagttcaaccattgtggaagtcagtgtggcgattcctcagggatctagaactagaaataccatttgacccagccatcccattactgggtatatacccaaaggactataaatcatgctgctataaagacacatgcacacgtatgtttattgcggcactattcacaatagcaaagacttggaaccaacccaaatgtccaacaatgatagactggattaagaaaatgtggcacatatacaccatggaatactatgcagccataaaaaatgatgagttcatgtcctttgtagggacatggatgaaattggaaaccatcattctcagtaaactattgcaagaacaaaaaaccaaacaccacatattctcactcataggtgggaattgaacaatgagatcacatggacacaggaaggggaatatcacactctggggactgtggtggggtcgggggagggggggagggatagcatcgggagatatacctaatgctagatgacacgttagtgggtgcagcgcaccagcatggcacatgtatacatatgtaactaacctgcacaatgtgcacatgtaccctaaaacttagagtataataaaaaaaaaaaaatttaaataaaaaaaaagtcataatatcagctctatagttcttttcaaaatattttagtaaaatctggcggtgggggcacccacggtgcgtaattgtttttctacattagtgaccccaggtcaaggtttaaaagggcttccgcgaagagccttctaaagacagaagcaggcgatgtccttcagcctccccatccctccctccttaccgtcctccggacctcatttttaggccgaactggttttgctgcgtctctctctcctctttggtaaatcgcggagatgcacggcgcacttcgggagtctgggcagggatggggccccctgggctcggccggagagtaattcatggtctgattggaggcatcaggtgtacccttggcacagaagggcgaacatggctcaaggatcagttcccagtggccgaggggcacctgttagaacaccaccgtctcctacaaatgtgtccccaagaatgccagcaaggggaaccagcaggggcccaagtataacatcaatctgggcgagtcaccactgccccttgcagcaaccgatgcactggtccagccctcacgcaggcccgctccgtgagtaaatggctctcttctcttgcaggaatgcagtggaggaaggcaagggtattttttacaacatcaaaaactttgtccgattccagctgagcacgtaagtagaggccagcattccgagtgtcattaagcaccacgcctggcgggcggccgctgactggctgcgtgtgccccgcaggagcatctccgccctgagtctcatcactctgtccaccgtgttcaacctgcccagccccctcaacgccatgcagatcctatggatcaacatcatcatggatgggccaccggcgcagaggtgaggcagggccggctgggagccctgtgtctctttacccacctgcggggcttcctccaggggctgctggctgtgccccaaggctatagggatgaacaaatacagccactttccatcaggagttcccagaaaactgaagtgtgttgcactgcagtgagactgggagtagaaggcagaggagaaagtacctgggccggcagagctgggtgaggatggaactttctgctccctctgcctggatgctctctctgggcaacctgcatggctcattctcatgcttcattccagtcaccagtcactgccttcaggaagtcttccctgattgcactcccactcaatcccctcaccctgctgtatttttccctagagaggaagatacacacagacacacttttccttatggatctgattgtgatctgtctcccctttagaacatcagtttcatggaggcggagtttgtgtttcatccctgatgtctagagataaagggcttgccactcagtaggtgctcaggagtccacccgctccgccacttaatatccccttcaacaagctggccaagtggtgtgggggaaggaatgcgctttggagtcaggggacccatctggccacgtgtgcgtaaccgtatgagcacagagccagtgcttccgctggagctcagtgctgctgttatcaccagtgatagctgccaagggaaagagagtcctcatttgtgtccccaaagccaagtgtgagggttacctctcctgccagccctccctgggagcagaagtgggaccaggaagctggcctcagctgtgtctgagcggcagggcctcacccggccactcccaccataccgcctgctgcgggtctagcctcaaccctgctgtgtggagttggctggaggctggtctctctcagctgatgaggggctctgcggagggcggagcctggagcctgtttctccaggcgcaacgttggggggggtcccctcggggtgatggagatcatctgggtgtatggaactgtgtgtggttggccttacggggtggtcttccttcactgtctgcgggacagatggaggggcacagctgcccatggacccaggctctggggcttctggaaggtgccgaggagggcaggtgcgatgcctgggggcgttcagcaaatgcctggccctgccccctgtgccaacttggcctgggaggctcaggcacagctgtttcaagggtccttt

SEQ ID NO: 7086 - DNA, 6000 bp, Homo sapiens
aaccatagaagatggttggtgatatatgaataaccaaggatgaaaagcacaggattagagggacaaaagacagacagcaagaataatggaaggctgtgtacccaaagttgtggaaggatggaattagcactgaccatttagaatagaaagaaaaggctgggagtggtggctcacacccagaatcccaacactttgggaggctgagcagggaagattgcttgagcccaggagactagcttgggcaacgaagtgaaaccccatctctacaaaaataataataatagaaagaaaagaatgaccgtgagcgcttcagcaatacctgttggtgggaaggaacccaaggggaaagacagtgccagcagaaaactactacacattgaatcctgacagctgaatacgtccttggaacacgtttacaatcctttatgtagaaatgtatcctttaaagaataaggaaggtgcgtgcattctaaaacgaggaagaactagatagaagagatcatttgttttaacactatgatgaggctttacaataatgacctctttgttagtgagaactgataacatctaaggaagtaagtcgaatatagggctgggcattttccaattggttgcctcaaaggtcacaagtagtatttcttggactgaggaaaaccatgttaactgggcagggcgcggtggcttacacctgtaatcccagcactttgggaggccgaggcgggtggatcatgaggtcagatcgagaccatcctggctaacacagtgaaaccccgtctctactaaaagtacaaaaaattagctgggcgtgttggcgggcgcctatagtcccagctactcaggaggctgaagcaggagaatggtgtgaacccgggaggcggagcttgcagtgagccgagatggcgccacatgcactgggcaatggtgcattccagcctgggcgacagagagaaaaaaaagaaagaaagaaagccacgttaactgtatcccaatgagttctcaacatccggatgtgaaaaaatgggatcttacccactgctcaaaagaactagtcacactaactggaaagaagggaaaatattcaaactttgaacaagaggattgcagtttaaaataagcgggctgatggagcctccacagttgcacacgttaacagtcccagaatggagcaaaagctataaacacagcagtcctacagaatttgtttagaattaaacaaacaggcaaacaaaaacatggtggaacctcagcccgttccacctggtgttacacactcatttaggaaacagctgcgggtcgcgtgactgatttgtcagtgctttaccacgcgttctactttgcagattcttgaagctgaacaggccagacttccctggggaggaagacactgaacatacagcctgctctagctacttattccctggattctccagggaagacattctgaagactgcagtctattcagtgtcaacccctaaatcctcctgaccaaatcctttctgagaatagctccctgcactcctcttgagcaatacttgtttgtttacttgctctcaagagcaaagcgatgacaccacgatggataggacactgggcctatagtggtgcagacgacaaagccggtggcctctctcttccaatcagaaagaggagaggagggagaggccgaggaggcctgaggcctggagcaaattctccgcgtgacttgccgtccatattgagtgtggcaaaaaataaccccgatgctttctgtaggtcaggttaatgttttgtgattcatttgacaggttcttacacacagctagacagcatgatttacagccacttacatcactcaagctgggccatcacattcaattcttagcagttacatcatttccccacggttatggtcatttcctggtttgaaaaaaggaatagggtgccactgctggactttgaagaatgaatgattatttggtagtttaaaggcaccatgaaattcctagagaaaacactgagtaaattaaaatgaaagatgtgttcttgcttttctactttacatggattattacagggaacattaacgtttatattacactatgcttatattaactagcttaaaataattcatgagtaatattaatttaccactctgaatattgttcactactatattaaatttctactaaactgcagtcttttgggtcacatgaaatgtttcataaatactcaagcacacttatgcttccaaaagttacatgaagttgtttcttatatttatttgtatatgaatgtacattattataatatatatacaatagatatatattatttaactaaatgtgttattcttacatgggaatgaaacctatgagccatctttaaaccccaatcattttggattcttttctgagagccatggaaggatatgtggctttagattcaagttggaattagaagttaggcgtagaagtgtcagctttgcaaatgtggacttcagtcctatatttcaaaaacacgcagagtaaccctggcccattactacacaactgtcgatgctacttcctctggcaatgaacccaaggcctggagtaatttggtaaagctttatggatgcccaagggtgggaaaatatgagactctgcttcccctcccccatctccatatgccagatatcgattttttcccttcttcttgcatttggaacagttgtccagcaagagaaagaaaaagcccatttcttacaaagcagcaactcagccaagaacgcactcaccagtcaatacttaatatcataaaaatccagaaaagaaagcaacacagactccactctttaagacttcaaaactgatactttgttgtttggcagaaggtaggtacataatatgcgcttaccggatttttttttctattttcacagaatacaaaccaacagactgtagccatcttctgaacgctgtcctagatcatgtgaaggcacagcttcagaggttaaaaatttcggaatctggaaaccagagagaatgtttaagtactcttctttattaattgtatgactatcagagatgtctgaggtaaagaactatgacaaaaaaatcagggacagaaagtgccacctgcacaaatgcaccgttatttcacaaaaagtggtacaattggctgggcgcggtggctcgtgcctgtaatcccagcactttgggaggccaaggcgtgtggatcacctgaggtcgggagttcaagaccagcctggccaacatggtgacaccctctctctactacaaatacaaaaattagctgggcgtggtggcaggcacctgtattcccagctactggggaggctgaggcaggagaatcacctgaacccgggaggtggaggttgcagtgagctgagatcacgccactgcactccagcctgggcaacagtgcaaggctctgtctcaaaaaacaaataaataaaataaacagtggtgtaataaagaactacaactaacgtcattcttctgatggtgggagtaaattaattatacaaggatctatgacagtagttggcttctctagaagaaatcccaactgtataaaagcactttgagaaatatattttctttctttttttttttgagatggagtttcgctctttcccccaggctggagtgcagtggcaggatcttggctcgctgcaacctctgccttccggtttcaagcgattctcctgcctcagcctcccgagtagctgggattacaggcgcctgccaccacacccggctaatttttgtatttttagtagagatgggggtttcgccatgttgaccaggctggtctcgaactcttgacctcgtgatcctcctgccttgacctcccaaagtgctggaattacaggcatgagtcgccgcacctggcgcgagaaatatattttcatactttttttcttcttttttgtggaggacggggtcttgctatgttgcccagtcaggtctcaaactcctgggctcaagcgatcctcccagcctctgcctccctgagagctgggtttacaggcttggagccaccgccccccgctattttcatgttttgtatgattcaagcttacagtgtagagtgtattagcctaatccaattactttatccaattgggatagaagaaaggcttttacaaagtcaaaaggagaaatcctggaactatggggctctttcaaagtattagatgttaaagaacaaaaacagccaaatagccgggagcagtggctcacgcctgtaatcccaactcttaaggaggccgaggcgggagggttgcttgaggccaggagttcaagaccagcccgggcaacacagcgagatcccggctctactcccagcttctcgggaggctgaggcaggaggatcccttgagcccaggcgaccgaggccgccgcgagctatgatcgtgccactgcattccaggctgggcaacagagcaagaccctgtctcaaaaaaaccccaaagaatctagtgctgttcctacagagacacattggccacaggctgaggtgggcaatagcaaccaaatatcgcatggtggtttacgcactgcagcccatttggagtcctcaaatatgactgccctttcacagatgagtctgagactcaaaaactgtcactagcgtaaggttgtccagcgagtttagtggctgggaggctgaggggtagacagggcggctagcgatgtggggcaggcctggcagtcgccacagacgacctaacggtaggaaaatcttacagccaccaggagagttccaggcgccgcggcagggggactgggagaggggactgcgcccagaatgaaggctcgggacaaaagcagttgcgcaaacgcgccaaggctgggcgtcgagtgaccgcgggcggaggtcaccagcggccactccccggaagccacccacggaccacgcgcgcccctgcacgcagagggggccagggctccacgggcgagcggcgaccctgcctcccggagacggcgcggcctgccctgcgcgcctcagccccgggtgccggcgtctcgggcagcaccaccaagtctctctggaggggaaaggatggtcggatttgccccatgtcccttcctctgacccctccctcaagagtgccccgggacaccccgcctgtggctcagcctcccccgccccgcgctgccatctcctcagggccgggcagcaggctcccgagcgcccacagacccggggtgcggcccagcccacaaccgtcacctcaggggcctcaggcgcccagcggtgctgggcggggctggggcacgaccgggagcatgcgcagagcgcgcgtttcgcccatcgcgcacgcgcacacacctgctccgcccccacgctgcgtgccgctgctgggttccgccacgcccgtcatggcggcggccccggccggctctggccccgcccctcggtgacgcgtcgcgagtcacctgaccaggctgcgggctgaggagatacaagggaagtggctatcgccagagtcggattcgccgccgcagcagccgccgcccccgggagccgccgggaccctcgcgtcgtcgccgccgccgccgcccagatccctgcaccatgccgtcggagaagaccttcaagcagcgccgcaccttcggtgagtgtcgccgcgagggcggcgggtgcggcggggccggggtccgagctgtggagggcggcagggcctgggacgccgtgaggggtcggggccgagccgggaggccgagcggggccggtggctgccggccggcggggccgagggatgcggggcccggggccccgtgagggacccaggccgggaccgagccgggagggccaggggctggtctgggccggggcggcctgcggacctctcggaggcctgggaggaggcagccggcggagggcgggcgggggccggtgcgctcggggccccgggcctgctgaatcaccccgcgccctccgcggcggggtgcctgccgtaccccggccaccgccgcccccgcaagcgcgctgcgggcgagggtcgcgctt

SEQ ID NO: 7087 - DNA, 6000 bp, Homo sapiens
attgatgaggggcccgtccccatgacacaaaacctcccaactgggatccagtttccacgtgagatctggacaaacattcaaactctatcaggactataaaccaaacaaaggtggaagaccttcagtgcaggcattaagtgagcactgacattccaggctgggagtagcaggttggacgaggggaggctctgggggcagggagggaggttgcagagtccagagcttggaagatggaagataagggcacccagtgtagggcaggagaagaaaggcaactggaaactctgggacaaactataaaaccccacggaaaagacaggtgtaaggtgactaccttgatccgagggtgatctgagtggctggtacctttgtgctcacagcaggactgtcgtaaagtaggtacatccatgacttctacttgacagacgaagagactgaggccgagaaattgaaccagctcacccacgctgcccttgaacagtggtcgtgagaggggaacccacagcctaccaggacacggggccctgcccaacccccaggacgccctcgtgttgaattaagtccgtggctttgagcctcagaaacggtgcaaaatgcagtccacgcgtggctttcggccccggtctggtgctcggaagacatgtgcctccctctacctgccccccgtcctcccgccactgtgaggccctgagaggccctgagattcttgcgatgtgtgaataagggtgccgcattttcatgttgcactgggcactgaatggtggagctgagtgatgcggtttggttctgtgtccccacccaaatctcatctcagattataatccccacctgtcaagggagagacccgctggaggtgagtgcatcgtggggccattcaccccatgttctcgtggtagcgagaaagttctcacaagatctgtttgttgttgtttttgttggtggtggtggtttttaagacggagtttcactcttgttgcccaagctggctggagtgcagtggcacaatcttggctccccgcaacctccacctcccgggttcaagcaattctcctgcctcagcctcccgagtagctgggattacaggtatgagccaccgcgcctggctaattttgtattattagtagagatggggtttctccatgttggtcaggctggtctcgaactccggacctcaggtgatccacccgcctcggcctcccaaagtgcttggatcacgcggtggcgtgcgccaccgcacccagcctaagatctggtttttaaaagtgtttggcagtccccccctcaaactctctcccccgctgccatttaagacatgccttgcctccctttgccttcggccatgattgtaattttcctgaggcctccccagccatgtggaactgtgagtcaatgaaggcttttttcctttaaaaattacccagtcttggccaggcgcggtggctcatgcctgtaatcccaacagcttgggaggccgaggcgggtggatcacttggggtcaggagtttgagaccaccctggccaacatggtgaaactgtctgtagtaaaaataaaaaattagtcagacgtggggccaggtatggtggctcacacctgtaatcccaacactttgggaggccgaggcgggcggatcacgaggtcaggagatcgagaccatcctggctaaaacggtgaaaacttgtctctactaaaaaaaaagaaaaaaaagaaaaaaattagccgggcgtggtggcgggcgcctgtagtcccagcttctctggagactgaggcaggagaatggcatgaacccgggaggcagagcttgcagtgagctgaggttgcgccactgcactccagcctgggcaatagagtgagactccgtctcaaaaaaaaaaaaaaaaagtcagatgtgggatcaggcatggtggctcacacctgtaatcccagcactgtgggaggccgaggagggcacattattttaggtcaggagttcaagaccagcctgaccaacatgatgaaaccctgtctctactaaaaatacaaaaaaaattagctgggtgtggtgtgcgcctgtaatcccagctactccggaggccgaggcatgagaatcagttgaggcagaggttgccgtgagccgagattgtgccaccgcactccagcctgggtgacctactgagactctgtctcagagagagagagaggaaggaggggaggggagaagagggaaaggaagggcaggggaacccagtcttggatatttcttctttttttttttttttttttttttttttgaaacggagtcttgctctgccacccaggctggagtacagtgttgcaatctcggctcactgcaacctccgcctccctggttcaagtgattctcctccaaaagcctccaagtagctgggattacgggcaagggccaccatgcccagtaaatttttgtatttttagtagagaaggggtttcaccatgttggtcaggctggtctcaaactcctaacctcgtgatcctcctgccttggcctcccaaagggtatttttgtttgtttttgagacggagtctcgctctttcgcccaggcgggagtgcagtggtgcaatctcggctcactgcaagctctgcctcccgggttcatgccattctcctgcctcagcctcccaagtagctgggactccaggcacccgccaccatgcccggctaattttttttatttttggtagagacggggtttcaccatgttagccaggatggtctcgatctcctgacctggtgatccacccgcctcggcctcccacagtgctgggattacaggcgtgagccaccacacccggccacaaaaggtatttctttctttctttcttttctttcttttttttttttttttgtgagatagagatttactcttgtcgcccaggctggagtgcaatggcgcgatcacagctcatggcatcctccacctcccggattcaagcgattctcctgcctcagcctcccgagtagctgggattacaggcatgcaccaccatgcctggctaatttttgtatttttagtagagacggggtttcaccatgttgcccaggctgatctcgaactcctgacctcaggtgatccgcccgcctcagcctcccacagtgctgggattacaggtgtgagccaccttgcccagcccccaaagggtatttctttatagcagtgtgaaaatggacaaatacagtggcctcaagttctctccttagtggcacctgagggagtgtggtgctcttggaaatgctctcctgtcactcagtttctgcctctgaagcgacaagcagaacatggatgttctcagagtccagggctgtgtagatagtattggagctgaaggcaaaaggaaaaatcagaatattgggcctgtctttattttaaaggtttgtgggggagggggggcggtttgtgttttgtttgtttgtttttctgagatggagtcttgatctgttgcccaggctgaagtgcagtggcatgatcttggctcacagcaacctccgcctcccgggttcaagtgattctcctgcctcagcctcctgagtagctgggactacaggtgcgcaccaccatgcccagctaatttttgtctttttaatacagagagggtttcaccatattggccaggcttgtcttgaactcctgacctcaagtgatccatccgcttcggcctcccaaagtgctgggattataggcgtgaatgactgtgcccagctattttaaagttttatactttgttcattatggattttttttacatgaattctgatttttttaaaatattgaatgaaaatacgatttatcatgacctgggcatggtggctcatgcctgtaatccccgcagtttgagaggccaaagcaggcaggtttgcttgaggccaggagttcgagaccagcctgggaaacatggggaagaccccatctctacaaaaaatacaaaaattagccagacgtggtggtgcacgcctgtggtcccagctactcaggaggctcaggcaggagggttgcttgggcccaggaggtgcaggttgcagtgagccgagagggagccactgtcctccagctggggcgatcctccttccctgccgggctccccccacccccccccgaagcctctgaccagttttccctcctgctcctcccagcaggcctggtttagccccagtgctcagcccactgtcccccagaaccccagacaccacccagccctgggattaagattcttccgtcagggcaccacctgggaactgtgtgcccaggagccctcgggcgacttgaatgtgctctgctgagtcctagagaggccccggttctaaggacgtgtctagctgcttggcctgaagctctgtagctggagtgtgggtccctgtgacgctggagggctgcaggccgggggtgcggacccctcagcaacagggcaggcgccaggggcacacctggctgtgcagcagcttcctggaacgccctaatgtttatcccccatggcaagtcacgtaagatgatttttacgtggaaaggggtgctttatgagaatgcactatttgaatgactgttgtcttgcttgcagatctaggcccccgggtcctgagggaggtggtagtaataacagtagcacagctagagccaacagccactcaccactcatctgggcctgctctcagcctgctgtcctttcatctgggctctagctccacccctgggtctgggatcccagcttcttactatgcctccgcctagcccagacagcaacgcccagtcattgagtgtccggccttccatcctacccaccctggtggggaatgtgctggttacttattgaacatgggaagctataaacaggagagcagccacctgtcatcacttccacccacacctctggtgcctctcctggcaggcagagtggctcctcacagcctgaagctcatccttctgcacgggccagccaggccagcacagaggcaccagggcagcagtgcacacaggtccccggggaccccaccatgtggagcggatggtggctgtggccccttgtggccgtctgcactgcagacttctttcgggacgaggcagagaggatcatgagggactcccctgtcattgatgggtgagtgctcacctgagccaggtgcttagggaaccaggactgggaactggggctgggagagcggggctgggggagccggggctgggggagcggggctgggggagccagggctgggggtgccggggctgggggtgccggggctgggggagccggggttgggggtgccggggctgggggtgccggggctgggggagccggggctgggggtgccggggctgggggtgccggggctgggggagtttggcctggggagttggggctgggggagctgggggtgagactcgtgtgtgcttggcttggggctcagtttctctgggggtgagactcgtgtgcccttgggttggggctcagtttcagcttctgcgacggtgccgggcccttgccctttcctggcccctgctgctttgtggggtctctcagggcccccaaagacttcagcggatgaaggtctgcagggactgggcaggaaggaggcaaggccacactccctggtcccgaagctcagagtgaggtctgagcctgcggacgtggaggccctgcgccccaatctcaccctgtgcctcagcttctcccaaaagcagcaggtgcgggtggcaccctacaggccctctcagccggcatctttttggctctcttcccactccccccggcctgccttctcccggggggaggcccatgccacttgggcccttgcctgtgctgcgctgtgtgcccacccggcccccacccccgacctcgctggggcacctgggtcacctgcttctgtcctgacctcctcagggcggagatccccactgcccgggaatccgaccctcttccccgccccttcctggcccagtgccccgacactgggtcaccatggaggcctcctgcttccaggcaccagactcagatca

SEQ ID NO: 7088 - DNA, 6000 bp, Homo sapiens
taggccacagccgaaagaaaggctgtgtatgcagcgtccttcctgatggtttccccggtggagctggtcagagatgtgtcccggggcctggagggtgacggactagcccaaggctaggagtgcgagggctcctggaggacggcccctgggtaggaagtgaggccctgcgtgggatcgggcctgggcgaggcatgcccaaccttcaccgcctggctctgcctggtagcaaccgcagctgtcctgggacaccggggccccccggcttcttccttcttggtctgtgctgatttcaatactgtcgggtacagccggggcacgggtagcgccacttcccacacatctggagaagttgctgccgaggagtctttaccccagggaagaggacgaccccaggacatttgggtgcctgattgatgattaaacacaggcctggccgggcgcggtgcctcacgactataatcccagcactttgggaggccgaggcgggtggatcacctgaggtcgggagttctagaccagcttgaccaacatggagaaaccccgtctctactaaaaaattcaaaaaaaaattagccagatgtagagccgggcgcctgtaatcccagctactcgggaggctgaggcaagacaattgcttgaacctgggaggtggaggttgcagtgagccaagatcgcagcactgcactccagcctgggcaacaagagcaaaactccgtctcaaaaacaaaaacaaacaaacaaaaagcaccacgggcccagtgtcctccatcagggactcgagttgccatggggcctgcggaggggccgcgctgccgtcctgcctgccatgcagcctgattcttggttccaggtacatccaccggccctgcctgcaggtgattgaggccgtgctggtggccgccgtcacggccacagttgccttcgtgctgatctactcgtcgcgggattgccagcccctgcaggggggctccatgtcctacccgctgcaggtgggaggctgggcccgggcggggtccagcaggcagggcagccacagggcggcctccaggaggctcgcttaggctacgggaggagggctgcccaccccgccgagttccagaagcgcatgggctggcgtgtctcaaagagggttagtcctgtccacccagatctcagaggaggccaggtgtctgctgaggtgccaggggaatgggcggtggtatgggggccagaggctccccccagtcctcttcccagaatggcagcctgacggggcgagcctcaggcgccctatgggggcaccatagatgtggacccaggagaaatgcaaacctccgtccacaactggacctgtgcctggcgctcacggctcaccgccgtccgtgcgtccatctgcactgtgacacggttgccctggaaagcactacgctcagaggaaccacacgtgaggtcacgcgacgtagccccattaacatgaaacatccagaacagggagagcctagaggcccagcagaccagtgggtgccacggcgggagtgggcaggatgggacgggtcaggtgtgaaccgttagagacgtgggaggcccggggccatggggttgaccagccttgctacactctgctccagccccgtggataacaccccctgtgctgctggagcccaggaggctctgggcctgtggcaccggggcgccaacagcctcttctaggagctcatgtgagcgcctgggcccaccttccccggcaccagggatggacagcgtctcagcccatggtcctgctaacccaccccccagggctagacacggccccctgctgggcctaggccgtgtgtgtcctcctttccctccgtgaccatggcttgggccttgtgtgtcctccttgccctctgtgaccgtggccctgacccaatggcaggatcgtgtggtttcgcgcctgatgctggccaggcacagggtacacggcctctcacggcgacaccaggtttgtgcctgcagcccaccagctcatctcccctcccaacgtgtgctctctcccgaccccacagctcttttgtgcagatggcgagtacaactccatggctgcggccttcttcaacaccccggagaagagcgtggtgagcctcttccacgacccgccaggtgtgtgtgggcagtgccgctgggcaggccctgggatcagggcctgggtgatgccttctggctgagtgtcccctgtgggctgaggttgcagccctgggctggggggtcatccctagcatggatcatagcagggactcactcctgtaatcccagcacttggagagaccaaggcaggaggatcacttgagcctaggaggttaagaccagcctgggcaacttagcgagactctgtctttgcaaaaaagcaacattatctggctacggtagtacacccacagtcccaggtacttgggaggctgggccgggaggattgcttgagcccagaaggttgaggccacaatgagctgtgattacatcactgcataccagcctgggtgacacagcgagaccctctctcaaaaaacaaaagaaaacccagcctggtgactcccacaccaagaccacggcctggcctcgctcgaccacaagtgtttcacggaagcgcagaccgcgaccttggagtgccggcctttcacctctgcagttgtgtccctggcggtctcacccgccctgcacgcagtacagtgctgcctgctccaggaaaggaaccccaggctgtggggggcaccctcttcccggagccaggctgcgagctgcaccacggtgcacacccatggagtgtagacctggcgctgctagacccagctgggccgccccgctggacgcggctcctgcttctgctggcatcagggccccgcagagcctcttcccctgtggcctccccatgggatccttttagcctttctgcttcccagggaggctgagaacagggagccttctggggaccgctgggctcgggagctcaggttgctgggctcctggaaggtgactgtgaggcccgagactgggcagcggggcagggcagtcctgcggaggcgggagtcgtggaggccccgtcagcccctcttctctcctaggctcctacaaccccctgaccctcggcctgttcacgctggtctacttcttcctggcctgctggacctacgggctcacggtgtctgccggggtcttcatcccgtccctgctcatcggggctgcctggggccggctctttgggatctccctgtcctacctcacgggggcggcggtgagtggggccggaggggaggctgtggggccctgcagctgagccaggtcttgcggcatcgcgggccggagcagaagtcccagggcaggacaaaagtgtcgcacctcacgtggttcacgggccgtgggcgttgtcctcgcgtggttcacgggccgtgggcgttgtcctgctgtggtggcagcgtgtactgtggcagcgcagcccatgtgtggagtctggaccaggcgaaggtagggggcggaggctcgtgtccttattcttgagaatgtgatgaaaagcagaggtgattgtgggctgctgcagagctgtttctagactccatggggtggatgtccggccagggctgctctctgtgaggccgggggccagagcggcatacactgccctccagacctcagcccccgcaggccttccttctctgcctgcctctgctgggactgggttctcttatgtgtcttctgtttctcatttcagtcgcttaaataagactgaaaacctgtaagaggccctggcaggaagcccccggccatgcttctcatccccggcaggaagcgcccactcctgctccccaggcccgtgtgctctgcccatctccctccgcacaagggtttggtttggtttttaaaattgaaacatgattcaaataccgtaaaactcatcgttttaaagagggcagttcagcggcgtttctcacgttcacgaggcagtgcggccgtcactaccacttctagaatgttccgtcatcccagaatggaaaccctgtgcccaccgaccctcgtgccccgctttctgcagcctccatgcctgggttctgtggcccagcctgatgttcccggggctctctgtgtcgtgtgtgccggggtttcactcctcatgctggacggtgctccctagttggcctgggctgctgcgtggtgactgtgccctctgcatcctccatgcctgccactcccctgttgctcgggtgctgagcgcctggttcaggccaaggatgcagcctccgcagcagggtgtactgtgctaggttgttctgtgtgtatgtacgcggccacgaggtttgttcctggctgtggggctgctgggcctgggcagggcctcctccgtctgtgtatcttggtgggtttgggcctgccaccacactgacacctcctccgtgtcacctcccacagatctgggcggaccccggcaaatacgccctgatgggagctgctgcccagctgggtatgtcccagctcttgcccgatgggtggggagctccacggggtctggagggggccatggctgtccttgcggggctagggtctgggagcaggtggatgggatgggtgctgcagagaaggcagtggccacgtgaccctgagccaggagggtggacgtgctggggttcatgatggctcccgcaggcgggattgtgcggatgacactgagcctgaccgtcatcatgatggaggccaccagcaacgtgacctacggcttccccatcatgctggtgctcatgaccgccaagatcgtgggcgacgtcttcattgaggtgcgccagggcctcgaagcctcaccctgagagcgtgggtgctgccataggggaggggcccctgtgagcctccaaacagccggtcccggggggtaggctcagggtttctgggggcggcctctgggctcccaggggtaggctcggggctccaggggtgggtgtggactcctcaagccctgtgttcccgccccgcccgcagggcctgtacgacatgcacattcagctgcagagtgtgcccttcctgcactgggaggccccggtcacctcacactcactcactgccaggtacagcgcccaggacacctgtgggtggggagggtgtccagcggcctcttgttgcacaggggcagggtgcacggcttgcgggctccaggcagccccgcgtttcctgtccagcggcttcacacctcaccagcccgcagaggtaactgtgggagttggtggcgtgtgacgggcatgtgtggccgggctcctccggcagggaggtgatgagcacaccagtgacctgcctgaggcggcgtgagaaggtcggcgtcattgtggacgtgctgagcgacacggcgtccaatcacaacggcttccccgtggtggagcatgccgatgacacccaggtaccgggcaccccatagacagggtcctgcctatgtgacctctgtcgagtccattggtgggaagcacacggcaaggtttgcaggatggggaagctgcacgtttgggtgcactggcagttccaggagtgccggaagctgagtgtgcagccatggagggctgtgtggacgctgaggctggtggggggggctgcggcctggcagggtcttggggttggcacccaggctgggctgagagccgtggcactgggggccgtgactttgtcaggaggccctgacaggacacacagctcggccactgctgtgtgtcttttagacgtggacactgggtgtttggaggttggtttttattgggacccagtggggctgcatctgccctgcagcaaagccaccatccctgggcccttggctctctgctgtgcgcggtcaggccccgctaccctgtcgccgatccttgggtcccgtggcattgtgcgtgtgggatgccatggcgaggctggtgtgagcaggtagccaccgacacggggcccatgcccagatgggaaatctggccggaacagggtcagagcggggcccgacacagcattccagcgcagcctcccaccctcgggccc

SEQ ID NO: 7089 - DNA, 6000 bp, Homo sapiens
gactacaagtgcacaccaccactcctggctaatttttttttttagacagggtttcgtcatgttgaccaggctggtagaatgatttcttttctgaatatgccgtactctggactgcctcccagctttggcacacacctctgcctagaatacacttgcccccaagcttgacctgggtaactcctcctcatctttcaggtctcagttgagacaactccttttctgggaagtgaggtgttaatctttgttccctcctacctcataggaccctgagttcccatggcttctgaccatcccctgtccccacgtcagtttccctggatggggattgtctgtgtatttgtctgtcttccctatgaggctgtgaagtcacagctcattgaccttgggcctggttgtatccccacaatctatagtcgatattcagtcaatatttactgaatgactgggtgactggtgcaaaagcctcccgtctctggacaaagcagggctcagcactgtccatcattttcctctgaaattggcttgaactccagcctcatccttacctgtcttcaacaagttcttctggaggcaggcagggctggggttgagcaagcaccgtgggaagagagcacaggagagaggactcgacaggttccttgaccagagtgtccccctcccctcactgcaggccccctgcgcccaggtcatggacaccctcttgctaaactcaccggctttcacactgcactgtgtctcccttcgtcctgcttcctttcttattctggagagccacgaaggaaacctaacggttgcctttactttagaaatattggccgggtgcagtggctcatgcctgtaatcccagcactttgggaggccaaggcaggcagatcacttgaggtcaggagttcgagaccagcctggccaacatggtgaaaccctatctccactaaaaatacaacaattagccaggcatggtggtgtgcacctgtaatcccagctacttgggaggctgaggcttgaacctgggaggtggaggttgcagtgagccaagatcgtgccactgcattccagcctgggcaacagagcgagactctgtctaaaaaaaaaaaaaaaaaaaaaaatatatatatatatatatatatatatatatatatattattgtgctgggcatggtctttggctcacacctgtaatcccagcactttgggaggccaaggtaggaggatggcttgaggccaggagtttgaaaccagcctgggcaccatagtaagacccatctctacaaaacaaacaaacaaacaaaaacagattagccaggcatggtggtgcatacctatagtcccagctacatgggaggctaaagtgggaggatcgcctgagcccaagagttcgaggatgtcgtgagctatgatcttgccactgcactccagcctaggcaacacagtgagaccctgtctcaaaaaaaaaaaaaaaaagaaaaaggaaggaaagaaggaaggaagaaaggaaggaaggaaggaaggaaagaagaaaagaaagaaaaagacaagaccaaaatttggccaggcacagtggctcatgcctgtaatctcagcactttgggaggccgaggcaggcggatcacctgaggtcaggagttcaagatcagcctggccaacatggtgaaaacccatctctacaaaaatacaaaaaaattagccgagcatgatggcgggtgcctgtaatcccagctactcaggagtgtgacgcgggagaatcacttgaacccgagaggcggaggttgcggtgagccgcgatcgagcaattgcactctagcctgggtgacagagcgagactccatctcaaaaacaaacaaacaaacaaacaaacaaagaaataccaaaatttattattttaatgtattctttggaacaggtaacctatgcatgtggcacaaaattcaaaaaatacaaaaggatgtacgttgaaaagtaagtctttcctcttcctgccctgtctccccagaggtcaccatagttatattttcttctgtgtatttattatttttttattattatttttattttttcactctctcagcttgtcaagagacacagttaccattcttgtgcaggcctccagaaacaacatatgaacaactaagcaaacacggctaagctctttccctctcaaatggcagtattccaagcatgcttctctgcacttgcttttcttttttgatttttttttcttttttctttttcttctgagatggagtcttgttctgttgcccaggctggagtgcagtggcatgatctcggctcactgcaacctccgcctcccaggttcaagcaattctcctgcctcagcctcccaagattacaggtgcccgccaacatgcccagctaatttttgtaattttaatagagacagcgtttcagcatgttggctaggctgatcttgaactcctgacctcgtgatcctcccgcctcggcctcccaaattgcggggattacaggtgtaagccaccatgcccagcctgcactttgctttttttttctttgagatggagtctcgttctgtcgcccaggctggagtgcagtggcgcaatctcggctcactgcaagctctacctcctgggttcatgccattctcctgcctcagcctcccaagcagctgggactacagttgcccgcctccacgcccagctaattttttgtatttttagtagagatggggtttcaccgtgttagacaagatggtctcgatctcctgacctcgtgatccacccgccttggcctcccaaaatgctgggattacaggcgtgagccatggcgcctggcctgcacttggcttttctaagttaaaatgaaactgtgaaatgattctagggccaggcacagtggcgcacgcctgtaatcccaggactttgggaggccgaagcgggaggattgcttgagtccaggaatttgagaccagcttgggcaaagtagtgagaccttgtatatttaaaaaaaaaaaaaaagatgattctaaacaagagcaaaacagcctcttgtggctgcaccctatttcactgcatggaattacatcatgactgatttaactggtcccctgcttctgggtatctcagttgtttccagtcttttggaacgtgctacatttaagaattttgaacttcatggccaggcgcggtggctcacagctgtaatcccagcactttgggagaccgaagcaggcggatcatgaggtcaggagttcaagaccagcggggctaagatggtgaaacaccgtctctactaaaaatacaaaaacttagccaagtgtggggcgtgcgcccctgtaatcccagctacttgggaggctgaggcaggagaattgcttgaacccaggaggcagaggttgcggtgagccaagatcgcaccattgcactccagcctgggcaacaagagtgaaagtctgtctcaaaaaaaaaaaaagaaaaaaagaatttgaacttctattatttggcttatgggttggcatatctgtaagataaaatcctaaaagtggaatttctgggtctaaggattttttttttttttttttttttttgagacagggtctcactctgttacccaggctggagtgcagtggagtgattatagcttactgcagccttgaccttctgggctcaagagatcctcccaccatcacgaggtcaggagatcgagaccatcttggctaagaaggtgaaaccccatctctattaaaaatacaaaaaaattagtcaggcgtggaggcgggcacctgtagtcccagctacccgggaggctgaggcaggagaatggcatgaacctgggaggtggagcttgcagtgagccgagatcacgccactgcactccagcctgggcgacagagcgagactccatctcaaaaaaaaaaaaaagaaaagaaaaaaaaagaagagagatcctcccacctcagcctcttgagtagctgggaccacaggcacacaccactatgcctggattttttttttttttttttttttttttttgtagagacagggcctcaccatgttgcccaggctggtcttgaacttctgagctcaagggatcagtccgtctcagcttccccccagcccagacactttggctttgcccattttatgggtaataagtgatatctcagggttttttgtttgtttgtttgtttgtttgttttgagactgagttttgctcttacagcccaggctggagtgcagtggcacgatctcagctcactgcaacctccgcctcccgggttcaagcgatcctcctgcctcagcctcccaagacacataccaccacgcccggcatttttagcagagatggggtttcaccatgttggccaggctagtctcaaactcctgacctcaggtgatccacccacctcggcctcccaaagcgctgggattacaggcgtgagccactgcgccccgccccctcagtgttgttgactttacatttctcttacttttttttttttttttttttaagagactgtgtctcactgtgttgcccaggctggcttcactcaagcgatcctctcgccgcagtccctggagtagctaggattacaggcacccgccaccactctcggccccatttctcttatttaaaaaaaaaaaaattgccgtgaaatacgcatatcgaaatgtaccatcttcaccatttttaagggtaagattaggtggtgttaggtatgttcagttgtcgtgcaaccagattgctgttttaaataacagcacttagagatgccgacttcgtgccaggcccagtttgggacattagggactcccagatgaatcagccgctccagtggaactccctgctggtgggggaggcactggcgaagcggtgctgagccgagtcctgacggcgctggagctgaggggcagtgcgggatgccccaggaaggctcctaggaagaggggacccacggtgacttcctaaggaagcgcggttcccaggtagaggagcgcatgtgagccaagatccctaggcctgagccgtctaggtgtgtcccaggaactgcaggaaacggttgggtgagtcagtggtgggcagcgagggtgataagccccttcgtgtcttcgggatggtaagtttggggcacaggtgagtgaagaccgaaggccaggggtggactgacactccgtggcaggcgcagggccgggcaggggggcggcttgggggtggcaaggtttgggtgagaaatggcagcccatggggaactaccgcagggctctgagaccttcagagccaagccccgacgccccttcccacctgcggggcagaactggggatggcaggggggagggtggttcccaaaggagataccatccctggtaaggggacatgggcccctgggagttgggttgggccacaaggagagaggcctgaacggccaaagggagggggcgtgggggaagccgcagcatcagacctctgcctcctccctcagatcgtgaggctccccagcctggctcgggagaccccgagatccccggccggtgacagcaggcgaccccctgctcctgtcaacctgtgggtccctacggacgtggggaagggaggagggaggccccagctccctgcgggggaggggcgtgaagacgcgcgggggtggggggagatgagccggcgtcgccatgacaacgaggccggtggtccggccttggggacccgggagggagggaggcgccgtggccgcgcgcgcgggcgggggcggggggccaggtctcccaggagtagttggggaacacccggcgattctggcggctgcttcctggtggcgcagggagcccgcgtgtttgcgagtgcgtgtgtgtgcgaagttctccgggtaagtgtgccagcgcgcgcctgggtgtgtgcaagggtgtgagcgtgcacacgtgggcacgggcgtgtgcgcgcgggggtgcccggttggatgtgtgcacacgagtgtgtgccggtccgcgtgcccctgcgtgagtgtgcgcgcgcgagcacacgtgtgtgtgcgcgc

SEQ ID NO: 7090 - DNA, 6000 bp, Homo sapiens
tagtagatggtagtgatctttgtttctgttggaagcgattttcgccagcttcatctcaaagccttcagacttcaaggctgcggccgccttctcgtgctgaaagacgcgtccttgtgtctgcttcttccttgcatttcgcttctctcagtgtgtgttttattttttcttttcctttttatttatttatttttttgagacggagtttcgctcttgttgcccaggctggagtgcagtggcgcgatcttggctcacctcaacctccacccaggttcaagtgattctcctgccttagcctcccaagtagctgggattacaggcatgcgccaccatgcctggctaattttgtatttttagtagagacagggtttctccatattggtcaggctggtcttgaactcctgacctcaggtgatctgcctgcctcagcctcccaaagtgctgggattacaggcgtgagtcactgcacccagcccgatttttaaaggcactcttgcaaaacatgttttcctggggtttcgttttgtttttgtcaaagcctcctgaccaggaatggtcatgcatcagctgggttcgttgaagtcatcagctgtgcaggtgtgagcatggaagcaacttggcttttccttttcttctccagggcttagtctttcctacttcattacaattgggcttgtcaaaatagagtttagtctcaaatagtaaattgcatatttattaaatgatattttccaaagatatgtgttaccaaaggaaaagggttttttttccctgtttatcttaaatcaggttaacaaatttctagttctgttattatttacgatcatttctttcatcagaaggaagaagaaattaaaattttactcttctttgtctatcatattttaggcctaagagcctctgaggttttgctgcattaaacacacacacaaacacacacacacacacacacacacacacacacacgaagagaagtttaattttcatagtaaaaccaggtgtaaacttaaggcgtctgactttttcagagccttttctgctactccagatgttatgtattattctccttaaaaagcagtaacacttcaaaataatccaggaagataaaagccaatcaaacctgatacagttagccaaatgtatacattgcggtattttagttgactttattttttacttcagttatcttaaagagctctagaatgctttaggagacacggagttgcctaattttagcacaagaatcctagactctctggagatgggattcccatggacaccatctccactgcgtgtgttccgggtgcctgacacccctgtgaggggagacttgcccactgcgttcccatgccccttgaagttagctgtgaccttcagcagtaagcgtcttttccatcttgaagcctcagtttttctcattcataaaatggagatgatactccctacctcgtggggctgtcatgaagataacatgaaataatgcatatgaagaaagcttagtagagtgttcaagatgttgtaagtaaccaaatgttaacagtttctctggctgttactcgtagaaggttttgctttattttgggctgacaccattctcactctgcatcccacccatttggttctatcccatgggccataagacaaagcctatctgttttctgcgtgacagtagttaaagatgtggtgaagatagctgtctttttgatatttgaagatacccatggtgtgtcccttttggcaattttttctctccaggctaatcctcagttcttgccatagttactcaggtgacttgatttcaagtcccctcatcattttaagtgttttcctttgaatgtactaatttttctaaattgtttgaaagctgtgaagccctgaactgagtataatactggaggtggagtctggcctgtgcagggtcaagcagagcaggcccattcctggtctcagtgttgctcttcagtcagcacctgcagcattgtcccatgctgttgacttaaagatcagactcagcagaggaatttcaattaagaaccgtttcagttggactgtgcaaatatttacttaccagaattgacgtgactgtatgtgtttccaggtccctgtacttaacatgggtgtaggttggtaaggctagaataaaaatgacagtgatttgctttagaaagagaactgtattggtattacagattttctcttcttaaaactgatttgaaatatgacttgttcattataacatggtctttgaaaggttaagggaaaacccttaggccatttctgtggtactgcctttttcctccgctttttaaaaataaagagacttacagatagtaaaattcgtcctttttagagtatagtttggcaagttttggcaaaagtataccatcaaatatccaccaacaaaatcaagatatggaataattccatcaccctcagaaattccctgtctctcactcctgtgtagtccttttgtttttgaaaggtgaaattctagcagataagaatattgagaatattgagcaatatacagttgttttaagtcctgttgatatttgatggcttttgcctgcccaagaaatctagtgaaacttatagtaaaaataaaactcaatgaatgcttagggtcattttctttaacttttcccccttctggttcagtgagaacaagttgctgatgaaaatcaggtttttctttatttttattatcacaattagctttttaaaattattattatttaatttaatcagtctttctttgccttaccttggttagaaaatttcaagtagagaactatttgggagtaatatgacagctaaataacgtcctataattataattgcattgagactgtccttccagaaaaagaagataatcccactttccttcaaacagagtggcaaatggtaatcctccctgtgtttaggatagttttgcctggcgggtatcgtgtagttcgttttgctcttctgttctgatctttctctcccttgcctgtagctgaccccacagtaccctgcaatgaaacccggtggagccagaagtggcaatcatcacgtcccctgcgaagagccagcctctccctgggctctggcttctggcatgctacgggaaggcattcgagcagacggctgctgagagccatcccgcgccaggttgcccagacactgcaggcagatgtgctctggcagatgggatatacaggtgtgtgctattacccagggaaggtgcttatgggatatacaggtgtgtgctattacccagggaaggcgcggaaagtccagacatgcaggaattccatgttcgggactgcctagtgctaaagccctgcagccttccacatctaaccttcttactatttgtttagctggaggtagccaagtactcctcatctttgactcctgtgatgccaggcatctgtttctgtggctttcctaattgtcaccatttgtgtcttatttttgttaccatttctgaggttagaagggaaggctgtggagcacttctctcctattgacacatacacaaacgagcacagcgctgccggccactggcgctgaccgacaggcctgcagaagtctgtcacttcttggggaaagatggtccctgatctgggcaattccacggaaattagtttatcacttgagtttggtgtcctgaatgcagagtgactaagtaattgactatcacacctgctgatgatttgtttcagaacaggaagcagtgttaatgatcatgtcctgtgaaataaaattcagaacaataaggatttttcccttgctgattcatcatgaccaaaccttcatgttttatctaatgtgaagatttttaccttgacttctaaatgtaagccagtttcacctgctcccaggacagcgcagtttgcctcggtgtctttcgtatatccttgacttagggacccttacctctcctttgatctccttggcgccctgccctccaaaatatctgagatacttcaacttttaatacccggtggactggcatttcattaaaatgtgtgtctccccatggttttacctttttatgagaactccttgacaaaacaaattttctagtcatgagaaataattttttattccccccaaaccaaatgatttctgattttgtgtgtgcattttttaaaagtagcattgatttttatatttatctcagtttaatagattatttaacatagtattgatatgtacacagcccttttgccagaaagacattaccctctttacattggttagctgttaagtcatataggtattctgtattttttttctagatgctttctagaatttttggtcagacaggccagttgtatttcacattggtgttgatggctttggccagtatctggaatagacttactattatagaaaagtgcacactgcagtgatttttcttaggtgtgattagccgcatgtggtgttaattgttccttgcggcagagtttgctgtattataaatgagcagcattgaataaattgctgtccttattgggaataggaatggttcccccttttcccatttttgtgtcccgctccttgggtgtgtggtttgtgagtgttttgcagggcctccgagaaggtggggggtggagacctgtgataaattgccagaaggggagtatcagtaggtgccagcctggagccttgagaagcccgctaggagtggaaggggtggttctatcctgagtgctggtggcaattgaggagggtctagaaggattttctgcttatccttaaatcttatttggcggcagatgatggcattgctcctgctgtcctcttttcttagccttggctcagccagctgaccctgggagcagctgacctaacttatttgctctgagcagctttggccttccacaatatgtcattttctgtgggtcccaggaaggaatgtattttataggcaaaatccaaaatgatgatttcttcaaacataattgtgtttgctttcttttccgaataaggtgctaatgtaagagttgctgtttttgacactgggctgagcgagaagcatccccacttcaaaaatgtgaaggagagaaccaactggaccaacgagcgaacgctggacgatggtgggtctcagcagcagtgagaacgtggtcatgtgatcgactgagagtgtgtttagtgcatgattccacagtctgtccagcaattattcagacaagcccaaggtgttattgtgctttttgttgtggcagaaactgctctgaatacctcataggatgtcgggaggtagcacttcaggagagagtgggcatgcctggtgtgggggcagctccctgtcccggagagcgtggagtggctagacctggaaggggtgcttgtgccagtgacgtctaaggggatcgtagagcagcagcagaggccctcctctatccagcacttggaaatggaaggccgtggaactcatggcctggaatgttgcgtcctggcacttgctattcagtgtgttttatgggattgttttctttatggactgcagggttgggccatggcacattcgtggcaggtgtgatagccagcatgagggagtgccaaggatttgctccagatgcagaacttcacattttcagggtctttaccaataatcaggtaggtgttttgaggactcctgaaacttgaggaattcatactgaaatgtaaaaagcagaatcactggactgtacacacttgtgtaaaaggagtgcacgtcagtgacgctgagccattcatactgcagcacgcatgctcagtttactgttcctctgcctcctgggtggctccgcccttctcccaccaaccactgtgtcgacctaagttgaaccctgaagaccctgccgaggctactacttacgacgattctttgatttcccttgtttcttctctacctccaggcttccccaggcctctgtaccctgggtcggttgtctgcatgatagaacagaacaattgcagatagaataagtgtgcttgcctccctgattgggttcctaccacctt

SEQ ID NO: 7091 - DNA, 6000 bp, Homo sapiens
agaagccagtcaggaagggcagcaagtcctggactctttggcagctgcacggtcctcgggagcacggctgtgccgggggttacagaaactgttttcttggtgaccactgggttaggtcaggttgtggccctcgcacacagagccacagtccagcagagcccagctgtgtatgtacactgtgttcttcacctgtccttaacccaaatgtggtctccatttcctcctctcctccctccttccctcctctcctccctccttccctcctccccgcctcttccctcctcctctcctccctccttccctcctttcctccttcaagaccttgcatgttgctcagatgaggtttctcctttaaaacaaaattccctggtgctcagctgggcccagccaggctggacagtccccggtggccaccacggccgtccacagccctgctcgtgggccccagggctcagccagccgcctctctcttccagtgtgtgatgacgctgctctacgccttctccaaggacatcttctccgtcatcaacttcttcagcttcttcaactggctctgcgtggccctggccatcatcggcatgatctggctgcgccacagaaagcctgagcttgagcggcccatcaaggtgagcccggggcctcccgctcacccaggcacccttcacagaggcagggtccgtgggtcctaaggaccctgagttgggagccagcatcccagctcagcctctggacctgcccctgcctgcatgcacctgggtcgactaattccggtgatgacttgaccaccagctacgagggtgccaagtgtgactgcaggagccggggttcctcaaaggacagcagatggcacagagcttgtgctccgttgggtggagggaagcagataaggacactgcagtcataggtgggcggtggtgagccccggcaggggcggggcagagccgggcctggcgcagcattcaaagggccgtcggggctgtgctggcaggaggaatgcagggaacccggcccgaggagcgcctgggcccagctggactctcctggactctccccgtccccagcggctcattcagaggggtagctgttatccgtgggctgccttctccaaaaacggggccgtccagcagaggccatgctcttgcctggggcccagcaagtcccgccgccctggccctgacacagaacaagaggccagagcccctggtggctgctagccagcagcttttgtcactcagctggcctatggctgtcacagtagcccctgcttccctgcccggaccatctctccctctgtgttcccgaagcctgggggccccgggggtgcctgtgaatgctgttgaacgggctttaggctgggcgcggtggctcacgcctgtaatcccagcactttgggaggccgaggcgggcagatcacaaagtcaggagatagagaccatcctggctaacacggtgaaaccccgtctctactaaaaatacaaaaaaattagctgggcgtggtggcgggcgcctatagttgcagctactcgggaggtggaggcaggagaatggcatgaacctgggaggccgaggtcgcgccactgtactccagcctggacgacagagtgagactccgtctcaaacaaacaaaaaaaacaggggctttaaaatacagtcagcacaagaacccagatgctgccccaagagaaggctgcagagggcagggaggagccgccctacatgggcaccagcttgtgcctgctgtgccagcctggggcagtgcctagggcacagggcagtcactgcgcacagcgggggctcagcccccatggggacctgggcatggggtaggctctacccactgttgtgagcctgggcacgggttggcgtctgttccctggggacagggcagtcatgcagcccacactgatgggctgggacctgtggtcagccctgcatctcccagggtgccctgtccaagtatggattcaggacagctgagtcaatcccccagccatgccgagccgcaggttgcggcctgcaggctccttgcagccctgcctggcttctgtgccgggtggagctcatctgctgaaggtgacagtttaggctgcagcttcagggatgggcttttgctcagcgctgtccacagcggcgtctccaagagggtggtctcctggcttattagtgggtggccactgtctcctggaagcatcaggcccctgtgcgtcctggcggctcagggtttccaggcctgtgatgtgggaatggagccgtgaccttccctgcccgtgggaggcctcgggagacgaagctgtctccttccatccctcatcataagccgcctgagcccctggcaacatgcccagcactgtatgcagagtcgagggcgggacagcccggtgtgtgaggcagatggagtgcagatcgcatcttggtgacctggaagtcagcagccgtgggtgtggagggcccaggagggctgaggaacctcggggcatgggggagggaggctggacaggagagggctcacccaggccctgtcctctgccccaggtgaacctggccctgcctgtgttcttcatcctggcctgcctcttcctgatcgccgtctccttctggaagacacccgtggagtgtggcatcggcttcaccatcatcctcagcgggctgcccgtctacttcttcggggtctggtggaaaaacaagcccaagtggctcctccagggcatctgtgagtatctcgctggcccacagcccgtggtaccctctgccctgggcagcgaagggagttgagaggcgtcggccgtctccacccacatggggcgaagcgtgttgggtggcaggagggttcaggtcactgcagtgtccgccagtgacacgcagcccacatggttcagggataagacacacagcgcagcaccagctaatctctcaggacgagggattccggaaaaccaggctactgctgccaagtaacaaaatcctgctggctgccaccagcggacacagcagacttacccagaaaggcagaaagaggcagaggcaggcggatcacttgaggtcaggagttcaagaccagcctggccaacatggtgaaactctgtctctactaaaaatacacagatcagctgggtgtagtggcacacacctgtaatcccagctactcaggaggctgaggcaggagaatcacttgaacccgggagacggaggttgcagtgagccgagatcgcaccattgcactccagcctgggcgacagagcgagactcttctcaaaaaaaaaaaaaaaggcagaaggagaaacccgccccccggccctgtgtgcagcggcagccccaggggtgctttgtcaccaagctcaggaccccgtcctcagcgcctgcaaatgtggccaggctcgtagaaaaaggccggggtgcttgcgggcctacatgctgatccccatgtcactgggtggcttggagaattcccgggatggcagcaacacaggcagggagaccccccacccctaccccacactctgatcaccgccagggtcatggtagaacatttgcctcaagctttgcagtgggatctgcattaactgtcattcaggacaccaagagcttaaagcaaacccccgtctctatcctgaaagcagtccccctccacagagtgatgtctctgtagacagtcccaggcgcgacaggtcttccgaggacccgttagcagattggcccctccggccctgcctgctgtgaacagtccaggcatgtgtccaggtggtggcccgggtgtggacctgcaggaaggcctgtcatccccccgttgcactttgctgagacaccagggcctggttcgtgtgccccaggggccgcactctgcctccccagggttctgaagcaggcgaggggtgggccgagtgggatgtggcacttccgcatttcagttgaagacagcgcctcgggcacccggcacccacatgcgcaagtacacaagggaaggttccttaaaatcccagcgctgggcagcggcgctgggtttggtgacagcagggctgggggagccccagctcacgcccccgtgtcccacgggtgcctacccagcccccaggctaacacagctgtcttctctcctgacagtctccacgaccgtcctgtgtcagaagctcatgcaggtggtcccccaggagacatagccaggaggccgagtggctgccggaggagcatgcgcagaggccagttaaagtagatcacctcctcgaacccactccggttccccgcaacccacagctcagctgcccatcccagtccctcgccgtccctcccaggtcgggcagtggaggctgctgtgaaaactctggtacgaatctcatccctcaactgagggccagggacccaggtgtgcctgtgctcctgcccaggagcagcttttggtctccttgggccctttttcccttccctcctttgtttacttatatatatattttttttaaacttaaattttgggtcaacttgacaccactaagatgattttttaaggagctgggggaaggcaggagccttcctttctcctgccccaagggcccagaccctgggcaaacagagctactgagacttggaacctcattgctaccacagacttgcactgaagccggacagctgcccagacacatgggcttgtgacattcgtgaaaaccaaccctgtgggcttatgtctctgccttagggtttgcagagtggaaactcagccgtagggtggcactgggagggggtgggggatctgggcaaggtgggtgattcctcccaggaggtgcttgaggccccgatggactcctgaccataatcctagccccgagacaccatcctgagccagggaacagccccagggttggggggtgccggcatctcccctagctcaccaggcctggcctctgggcagtgtggcctcttggctatttctgtgtccagttttggaggctgagttctggttcatgcagacaaagccctgtccttcagtcttctagaaacagagacaagaaaggcagacacaccgcggccaggcacccatgtgggcgcccaccctgggctccacacagcagtgtcccctgccccagaggtcgcagctaccctcagcctccaatgcattggcctctgtaccgcccggcagccccttctggccggtgctgggttcccactcccggcctaggcacctccccgctctccctgtcacgctcatgtcctgtcctggtcctgatgcccgttgtctaggagacagagccaagcactgctcacgtctctgccgcctgcgtttggaggcccctgggctctcacccagtccccacccgcctgcagagagggaactagggcaccccttgtttctgttgttcccgtgaatttttttcgctatgggaggcagccgaggcctggccaatgcggcccactttcctgagctgtcgctgcctccatggcagcagccagggacccccagaacaagaagaccccgcaggatccctcctgagctcggggggctctgccttctcaggccccgggcttcccttctccccagccagaggtggagccaagtggtccagcgtcactccagtgctcagctgtggctggaggagctggcctgtggcacagccctgagtgtcccaagccgggagccaacgaagccggacacggcttcactgaccagcggctgctcaagccgcaagctctcagcaagtgcccagtggagcctgccgcccccgcctgggcaccgggaccccctcaccatccagtgggcccggagaaacctgatgaacagtttggggactcaggaccagatgtccgtctctcttgcttgaggaatgaagacctttattcacccctgccccgttgcttcccgctgcacatggacagacttcacagcgtctgctcataggacctgcatccttcctggggacgaattccactcgtccaagggacagcccacggtctggaggccgaggaccaccagcaggcaggtggactgactgtgttgggcaagacctcttccctctg

SEQ ID NO: 7092 - DNA, 6000 bp, Homo sapiens
cctttaactcaacaagtctccttctgggtatatatccaaaagatttgaaaatgcatgtctacacaaagactcgcatgcaagtgttcatagcatgcttgtttgtagtaaaggaaaaagtggacatactccaaatgtccatcatctcatgaaaggataaatgaatgtggcatatctatgcaatgtaatattcttcagcaataaaaatcaatttttattttttatttttttgagatggagtttcgctctgtctcccaggctggagggcagtggcactagctctgctcactgcaacctccacttcccgtgttcaagcaattctcctgcctcagcctcctgagtagctagggctacaggtgcacgtcaccatacctaactaatttttgtatttttagtagaacagggtttcaccatgttggccaggctggtctcaatctcccggcgtgtgcaaccacaccaggctaattattgtattttttagtagaggcggggttttaccatgttgtccaagctggtctcgaactcctgatctcaagtgatccgcccaccttggcctcccaaagtgttgagattacaggcatgagccaccgcgcctggcctaaaaatggatttttagatatgtggtgccaacacacgctacaacgtggttgaaccccaaacacgcgatgctgaaagaaactaaacacaaaagacaacatattgatatgagatgcctaggaaaaaaaaaaagcaaaatcagtagaggcataaagtagacgagtggccctgggaatgggaatggagattgactataagcaggcacaaggaacctttcaggagtgatgggattgttttaaaattggatcgtggttataattgcacaattcgataaattcactaaaaatcattgaactgtacatttacagtggcttgattttatgttatgtaaaacatagctaaataaagctcttaaaataaaaataaaaaagaggaaatgggttgagggagggggtgtgtcaattattttttcccaggaggccccttggctgaaatgcaaatgtgaccacttcctccccgctgaccagctatcagcactgaggcatggttggagggccgctgagatcctatggcaccttccttccaagggtatagaggccatacttatgagacatttacagacccagaggaacccctcaagggaccacatgtctatttctgaggggactcatgtttaccccagtggacatgggcctggcagctccaaatgcatctactttttaagcaccaagggactgtgacccctgctgatcccacccattccccaactcctggcctgaactgaaaatgtaaactggattaagccactcttaagatgaaaccctccaatgatgacttcccatttcctttggaacaatctaccttcctcacccaaaaccgtgaggtcccatgtggtgtagatgtgtgatttccgtgccttcaccttctactattcctccatttgctcactgtattacgccatgctgttctcaagttcctggagccagccacattctttcctacctcagtgcctttgcacttgcagatccttctgccgataatgttcttcccatggctgggcacttcttagcacctagtgtacccccaaatgtcacaaccttgatctctcattggttttctatgacatttagtacagtttacattgagtttgtctgttacttctttttgtctaactctccctactagaatataggctccatgggggctgtcactgtgtgtatatttctgtgggctagccccaggatgtagccaagctgcgtgattttggacaagtcacttaacctctctgagcctgctcaataaatattagggggaggaagcaaggaatggctgggtgggtgggtgcagagaagaatgaatgggtggataggtaggtgggtgggtagaaagcaggtagataaagaaggcaggcaggagggagggaggagaaattgaatatccttgttttcatacacaccccagagcagtgtagtgagttaagagtgcgggctctggagcccaaatgactgagttcaaatcccaactctggcactcatcagctgtgtgaccttggacaagtcacttaacctctctgagcctcagtttcctcatctgtaaaacagggacgatgatgatgatgatgataactatcttctagactcattctttttcattttggggattttatttttgaagacagagtcttgctctgttgcccaggcttgagtgcagcactacagtcatagctcactgcagccttcagctccttggctcaagtggtcctcccacctcagcctccagagtagctgggactacaggcgtgcaccaccatgactgtctaatttttaaatttttttatagagacagggtcttgctatgttgcccagactggtcttgaactcctagcctcaatcgatcctcccacctcagcctcccaaaatgatggaattataggtgtgcaccgctgcacacagccttctcgagtatttctgaggtttaaatgagagggtgcatctttaaagtccttaaaaccctggcacacaatgagctttcagcaaatattagctctttttactgtctcttctcctgatctttcaaccactacaaatttcagtgcatgttatcagagaattcaccccgaagatcaagagaaagaaaaacaaaagctggtgtcttcccaaggttcgttctccagagaacacgacacacttcggtagctgggaagagctctacagggccaggatccctcaaatcaaccacaggggaatttgtaccaagttcctcaaaaacagctagaaaaaaaaagaaagaaagaatagcaagacgctttctcttttttctctggagtggtcacgaaagtcaacagcaagttgattcccaaaaatgagtcagcagggagagctacaaattgcatcttgttatcaaaacagcataaaatagcctcccccaactgtgggacatttcatcctggtatggccccgttttcacagcctggtataagcttaggaatcaaacacacccaggttcaaatcccagctctaattcttcttggcttgtgtgacgtttcactcctctgggcctcagtctctccatctgtaaaatgggactaatcttgtctgcctcacactttgtgggataaagtgagatcatgtaggcaccaaagtaattcgaggtggtggtgatggcagtggtagtggtggtggtggtagcggtggtggtggtagcaattctcttgctctcctttggagactgcactaggcattaagcttgttacattttgtctcctggtttcttgaatgtcttccagaaacatctgaccctctcatgggcctctggcatgttagcaagatgaaaactctcttgagaatttcttttctctattttcttcttgaattctcatgtgttaatgtctgccctcttcctcatagctaggtgcccccatttgacagatgggcaaagtgaggcattcagagaggtgatgtgacgtgcccaaggggtcctgctccctggagctctgcagcaggagactggatccaaaggaaatggaggcagagaggcatgggggtcaagccagagcagagggtcccaagctcagaccctattaggcaggtaaggctcaggaataagaaacaggctggtttgcaaagtctgaaaaaggggcttccgtgggaccttgggcaaggttctggtccttctctctgtgctgaggggctggagtcggccactgaggactctgggtccacgggtgaaactgtgccacatcttcacacctctggcctcagtttccatatctgtgcaatgtggtggctccaggaggcactgcctgcctcatgggttatgactgagaggcctgtggggatgatgtcacaggtccctaagagggaagtgtcaccccgatggccccaaatgtcttacttgcaggtgacctttggtgacagtgggtgcctgctgtggggccaggccccctcccacctctttctcactccctcccaggaggagcccagctgcgggtgggcggggctggcggggagcggctcaccacatcctcctcttcctccccactctgcacatgcggctgggtggcagccagcggcctcagacagacccactggcgtctctctgctgagtgaccgtaagctcggcgtctggccctctgcctgcctctccctgagtgtggctgacagccacgcagctgtgtctgtctgtctgcggcccgtgcatccctgctgcggccgcctggtaccttccttgccgtctctttcctctgtctgctgctctgtgggacacctgcctggaggcccagctgcccgtcatcagagtgacaggtcttatgacagcctgattggtgactcgggctgggtgtggattctcaccccaggcctctgcctgctttctcagaccctcatctgtcacccccacgctgaacccagctgccacccccagaagcccatcagactgcccccagcacacggaatggatttctgagaaagaagccgaaacagaaggtaattccagccctggttttctgctgggaccagggtgccttctctgcccaggagggactgttccctgcctgctgcatctagtgtcacagtgggagggctcggaggactgtgcccaagtcacaattggggacactgaggcaaagaagattcatgcagtgaggctgggcagaaatgaggttggggtctcttgttcagcacagcttaggggcccagcagcagggatgtggctgagacgaccctctatcttgaaaaccagcctccaaaatgtagcgggctggggaaggaaagccagtttcaagccaaacataacatgtcaatcacccgattctgggcggctgagtcgggaggtgacgggcatgggtgtagagcctgatgggacccattctgtgtcagtttctatgtcttaccaccttgattccacccagtcattcaaaacaatggctggtgtgcccatttcgcagatgaggcaatgaggctgcgagaggtagagtgattttccctcggtgactcaactgggacgtagcaggtcgggcagtcaagccaggtgaccccatgagctgtcgctgcatctttctcatgaagcacggggaacgggtcggatggtaagaggccaacccagttccctgtgcatgtggaggagaggagggtggggaggtcagtggaggctgagccttgaaggatgggaaaggaagaacattcctggtggaggagccctggggagcgggaacttaggacttgccgcaggaatgacgtctctgctcagtgaaggcagaagaccaggtgcgggacattcaaagccaggaggctgctgcgaggaggacatctgtgattccctggggggagagtggggctttcagaagcacatggtggagtcggggaaaacctgccaggtcaaaacccggccacgcgccttcctcactcggtgaacttgggcaagtctctctgcttctagccttgagaagccatggttttctcatctatgaaatggggaccaaggtacccccatcctggtggagctagttgtggggacctcagggccgaacagggtgaaagctgtgctcctaatggcccttttcctttgaggaagagagtttgtggcatgagaagctttgagcccatggagacgggcccgactccaagagtgacagagggggagcgacacactcaggctgctgtggtcctgcctggccagccacctggctctggcccccccagtgccaactcaccatgttgtaggcacttaagcgtctcccatagtcctcaacaggtgaagcgggcagcctcattcagcccatttcacagatgacaagagtgaggcttagtggggacaaccttgccccaggttaactgtgaccagatgacatggagctgggattggatgccagtctgtaggacaaggccaccacctgctagatagaataacatgaaaacaagactcatgggcttgggtagcttctgggaagcagcattggatggggatggc

SEQ ID NO: 7093 - DNA, 6000 bp, Homo sapiens
ctttctgtgtgtatattatacatatatatgtgtgtgtatgtgtatatatatatatatatatatgctttttttggaaaccttgtttgtgtgtgagactcattctgttgccaggctggagtgcagtggcaagatctcggctcactgcaatctccacctcccgggttcaagcgattcccctgcctcagcctcccgagtagctggaactacaggcgcgcaccactacgcctggctaattttttgtattttagtagagacagggtttcaccatgttggccaggctggtctcgagctcctgacctcaaatgatccacccacctcagcctcccaaagtgctgagattacaggcatgagccaccacacctggccttttggaaacatttgagagtaggttgcatctatcacactctgttgccccatcatacttctttatatatttactaagaatataccctgggctgggcttggtggctcacgcctgtaatcccagcactttgggaggccaaggtgggcagatcacttgaggtcaggagttcaagaccagcctggctaatgtggtgaaaccccgtatctactaaaaatacaaaaattaggccgggcgcagtggctcacgcctgtaatcccagcactttgggaggccaaggagggtggatcacctgaggtcaggagttcaagaccagcctgactaacatggagaaaccccctctctactaaaaatacaaaattagccaggcgtggtggcacacgcctgtaatcccagctactcgggaggctgaggcaggagaatcacttgaacccaggaggcggaggttgcagtgagctgggatctcaccactgcactgcagcctgggtgacaagagggagggagactctgtctcaaaaaacaaaaaacaaaacaaaacaaaaaaacaccctggccggacatggtggctcacatctgtgatcccaacactttgggaggcagaggcaggtggatagcttgaggccagcagttcaagaccagcatgggcaacacagcaaaaccccatctttaccaaaagaaaaaaaaaccaagaaacaaaaaattagctgggcgtggtggtgcacacctatagttccagccacaactacttgggagactgaggtgggaggatctcttgagcctgggaggtggaggctgcattgagccaagaccccactgctgcactccagcctgggtgacaagagcgagaccctgtctcaacaaccacaaaaaagaatacatccttccatatctccagtagagtcataacacattcaggaaatttatcatggatgcaatactttgtagtctatattccaaatttatcaattttccccatactgtctgttttgtttttattttgagatagggtctcgctctgtcgctcaggctggagtgcagtggcgagatcacggctcactgcagccaggacctcctgagctcaagcaatcctcattttcccccatccccccatcacaggtaatcaatttgatgagtttctggtttatactttgtttttcttggcaaaaacctgcagatacatttatgtcttcatatttccccttcttccttatacaaaaggtagcacagtatacaaaaggtagcacagtcttttgaagtttgctttctttttcttttctttttttttttttttttttttttatgagatggagtctggctctgtcatccaggctggagtgcagtggcatgatcttggctcactgcaacctccacctcccgggttcaagcgattcttctgcctcaggctcccgagtagctgggactacaggcgtgagccaccacacccagctaatttttgtattattagtagagacggggtttcaccatattggccaggctggtctcgaactcctgacctcacgatccaaccacctcggcctcccaaagtgctgggattacaggcgtgagccactgagcctggccatagtgatataatttttaaattgcacacgataagacaacattcccattgttggggcaggagtgctgccccaaccccaccaccaggaatgttaggcaaccatcaggtgatggtcaggtggttgttaaacttgtctctaaaatagtaattggttgcagccagcaccagggaaaggcagtctccaaatagatggaaaacacttgaaactgatgatcagcagcttctcgataagatctcagaagttgggtaaatgggctcaagcttatgcaccaagaggcaaaatggcggagtttaatggtacatgcccttcctccaggaatgctagatctgtaagggaagaacgtcttaagtgagcatgtgcacttcagtatactgaacacactgtgcttgtggcccctccaagtgctggcaggccaccgtgcatgtggacagcccatgccaaggtaggaatcaggggagaagagatgcaaaccgtaaatccctggaagcatgccagcatatgaaaccccaagtcaaaggtcaaaccagggacttgaatctgtcaagtcattcacgcctggccctcttccaagtgtactttacttcctttcattcctgctctaaaactttttaataaacgttcactcctgctctaaaacttgcctctgtctctccctctgccttatgccccttggtggaattctttcttctgaggaggcaagaattgaggttgctgtagaccccatgcaaattagctgccactagcaagggcaaggcaagctatggagaaagaagtttcatggggctaaaactcagaatttgagtgtggagcaggatggggtagatggaagggggttagagtgctcagtgctcacaatctgtcaatgagggtagagaggtggcatggcatcaggtggtccaggtaatgccaggaaaaagctggactgtgtttgttagggaacccaggagacatgatgacctttaaaacaccatttgggctgggcgtggtggctcatgcctgtaatcccagcactttcggaggtcgaggcgggtggatcacctgaggtcgggagttcaagatcagcctgaccaacatggagaaaccccgtctccactaaaaatacaaaattagccgggtgtggtggtgcatgactgtaatcccaggtactcaagaggctgaggcaggagaaacgcttgaacccgggaggcggaggttgtggtgagccgagatcgcgccattgcactccagcctgggcaataagaacaaaactccatctcaaaaacaaacaaaaaaacatcatttggatccactcaccttacagatatttcattgagtgcctgcagtgtgctagagtactgcagagcaagaaataagtcaagatcctaacccttagggagctgacattagcaggaagacagaattaaaggagctgttagaatacagtgggataaattgctcggcgagcacacaggaggggaaactagcacatctgaaggcaggagcgaggcagggcgaaggactattacccaaaaagtaaggcagtgttgtagctaggtgtgcatgtgtttggtgcaggggctgggaagagttccaatgctaacatttagagcgaagagattgagacattgagagtttcgctgggattaagaccacatggacttaacagctccactccattctccacgttgcaaagagtaaacctttaaaaatgcaaatctgacctcttttcacttgtttttttgtttgttttggggggaaggagtcttgctctgtcacccaggctggagtgcagtggtgcgatctgggctcacggcaacctccgcctccttggttcaagtgattctcctgcctcagcctcctgagtagctgggattacaggcatgcaccaccacgcctagctaatttttgcatttttagtagagacagggtttcaccatgttggccaggctgatctcaaactcctgacctcaaacctcccaaagtactgggattacagaccatgcccagcctcttttcactttcttaaataagctccccactgctttgaggataatgtccgtgtctcttacaagacttgggagcctttaaaacctgatcccagattagctacctcttcccccctttaattttatgcttaggacaagctgagtttttcttagtttgtcatatcctatttccctgcctagaaacccatctccccctgccctcttatcagtttttttttataatttaaatttttttttttttgtagagacaaagtctcactttgttgcctaggctggtctcaaactcctggccttaaacgatccttctgcctcggactcccaaaatgttaggattacaggtatgagccactgcgcccggccctcctgtcccttatctgggtctcccaaaactggattaagattaggtgtcactcccatttgctcttgtagtcctctgtgcttcacctactagatctcgtcaaattctctgaattcaccactagcatgaactcctccagagcaggaagcagtttaattatccttgtgtccaaaacaactaactgaatactccaatgcccaactcattttgaatgaatgaagctgccttcattgcagggtcgggtggaggattttgaactcggaactttggccttcagtctttgttattacagtttaaagattcattctcgggcatggaggaacaatttaggtcaaaatcacaaaaatctgaaataatttaggacgaggcgtaaatttatctgcaaagatcaacacgctcaaacgaatcactaatgctcatcagtcttttacttaaagcaaacaaggtggagggtagctccttgcgaaacctaccacctgcctaaaagcgcagtggctcgggtggtccagtcccggagactttcttggcacttaaggctctgcccacgggccgccaagtggcggaagagcctcacgcacgacgtgccgcctcacactcccgcggaggcatcgcgacgcagcgacggcgtgggcggagaggccggcccttcctctggcgccttcggctcctccccctgcgcctcacacgctcattgtgaagcgacagcggccgccggcttctaaggcggtttgagaccttaagaccctaaatccttggcgcgcgtgagcgcccgcgccgctccttacccactcccagggctaggggtgcgaggttcaccgacttgattctctcccactttcccgccgggagctaaccgcgccggtgtgcgcggcacctcgcgccactgctcgctcctggccccccccccccccccccccccccgggagctcccacccgcgcgctcctccctctccgctccccggcgacgcgcacgcgcgccagcccggctcgcgccctctcgctttcctccagccgcgagaccccctccccttccgcctcgcggcgcttcctcgcgccgcggtcttctctctccacccccgacaccgcggggctccccccgcccgcccacggcgggccccggctgcccgatccccctcgcttcccgcgctctccagcggggccccagccccggccccctctctccctcccttctctctaattccccttccggacgctgccatcatgttgaagcctcagccgctacaacagccctcccagccccagcagccgccccccacgcaacaggccgtggcccgtcggccccccgggggcaccagccctcccaacggcggcctcccggggccgctggccacctctgcggctcctcccgggcctccagcggccgcctccccctgcctggggcctgtggccgctgccgggagcgggctccgccggggagccgaaggcatcttggcgccgcagccgccgccgccgcagcaacaccaggagaggccgggggcagccgccatcggcagcgccaggtgagaagggtgggctccgggcgagggagccgcggccacccagaggctgtggctcggttccggtggggcggaccccgacccggcaccgtcaggggcaccggctgggtggggagtccccgtgaagctgggggagggccccctcaggtccgaacaggtcggacggaaagggtccccgggcggccaccggagcactgag

SEQ ID NO: 7094 - DNA, 6000 bp, Homo sapiens
agtaaataattattatgcttctattttaaaaataaggagactaaaaaccagtacaccagcttacaataaacaatttaagagaagtaaaatgccttattaaattatctttataataccaaattactttaagatactttccttttgactgcagaggttttaattctttcctttcttggcttccatggcaccactgtctcctgatacttaccttaccattcttgcattttcttgttgttttccttcaatagctcctcttcatctgctagctcctggaacttgttgtttttgggtttcaccactggttctcttctgttattctacattgtctctctaggcagataaactcattcttgctcaaggcttgctatcttctgttttatgtcctcttccattgaaacttctatccacctagtcctccaagcctaaagcctaagagtcttcctctctcttgagaaaggttgggagaattttagctacaatgcagttatatctctgttgttgaaaatttattgttctgtgttttatttttactaaggaattatatctgggaccttgcatttcttcatattttaaaaatatgtcaagtagagccaggcgtggtggctcacgcttgtaatcccagcactatgggaggccaagatgggcagatcacgaggtcaggagatcgagaccatcctggctaacatggtgaaaccccgtctctactaaaaatacaaaaaaattagccgggcgtggtggcgggcgcctgtagtcccagctactcgtgagcctgaggcaggagaatggcgtgaacctgggaggcggagcttgcagtgagccgagatcacaccactgcactccagcctgggcgacagagcaagactccatctcaaaaaaaaaaaaaaaaaaaaaaaaaatatatatatacacacacacacacacacacacacacacatttatgtcaagtagaatgtttctttatctagataacgtgtgtgtgtgtgtgtgtgtgtgtgtataaccttcaccaccccagcctgccaggagaggaacctgttctctgagtgtacagtggtcatgtgatcatttttcccttctctttttgaaaatttataatttctacttatatccacacactagtgatccagtaattttattaatacaactgaaatattggaaatggaggaatttcccaatatggctgttggttacatgtgaaattatttcaccagaggagaaaggacctaagtccccactcagattttaaaacctctaatttcttgcccaaatctcttcgcttcttttcctcatgaaggaaaaggcgagtaacaggtagtgtgaaaaattataattttattagaggcatgaagtgcatgcataagggtctgacactatcctcttctactctatttgtttttttgtttttgttttgttgttgtttttttagtagttgtctggaccctttaaatgtgtatcatgacttgctattaggtcatgacctgtctttgacaaacacttatactataaatctttgagtttccccagtactgaaatatgatatatagagtcttccatatattccttccaggtgctatcaaaataacatatcacatatgatatcatctcttgtactataggttttcttttttaatgaatatttggatatgatattaatatatgtgccttttatgtatttttttgtttatatgtttgtttgtttatttgttttgagacagagtttcgctctgttgcccaggctagagtacggtggcatgatctcagctgactgcaacctccacctcctgggttcaagcgattctcctgcctcagccccctgagtaactgggattagacgtgcgccaccatgcccagctagtttttgtatttttagtagagatggggtttcaccatgttggccaagctgatctagaactcctgacctcaagtgatgcatccaccttggcctccccaaggctgggattacaggcatgagccaccgcgcccgacctattattttaatcatacaagctcatggggagcaaggcctgtgactttattttaaatttttaaatactttgtattttgaaacttatcacacttacagaaaaattgcaagcatagtacaaataaattattttactccatttgaatagggtgcagacctagtaatccatcatccccaaagactttggtatatgttttctacagatcagaacatttcctacataaccacagtataacaagtagaaagttaataaagcaggagctgtggggacttagaagaggaaaaaaaccaaaaatacaattaagtagatttggcagaatttgatgactgcttagatggtggggggaagggcagaaaaaccataacattgtatgtttgtgtgtgtgaattgggaaatgaccaacattaaaaatgttcagttacttaacacctctgttgatattctgtgggaatatggttttaaaatgctgtattctagtagcagaggaaatatttcatcatagatttattaaggtttattaaacagttgggattctgagtcaggtagtagaatctattgaaaaactttataagagaagtgagttgttttggaaatcctcttaggttctttgaatagtgtcagtgaattataagggtaatggaagaaaacagcaggaggatctgcatcttacattccagccctgacttctctctctgatgatccagtcccaaatttcaaattgctagagatctccatttcaaactcagtatgaaaagaattaaacttgttatacacacatacacattctttctcaactaggtttcctatttcttttacttttttttttaaattaagacagagtttcactcttgttgcccaggctggagtgcaatggcattatctctgctcaccacaacctccgcctcccaggttcaagcagttctcctgcctcagcctcctaagtagctgggattacaggcatgcaccaccaggcccagttaattttgtatttttagtagaggcgatttttcctccatgttggtcaggctggtctcgaactcccgacctcaggtgatccgcccacctcggcctcccaaagtgctgggattataggcatgagccaccacacctggccttcttttaccttttcttggtcgagaaaccaagtgctggctcttcctgctcctcagccatgcctcacctctgtctagttgatttctacacttttgaaagggcaccgggaaaaaaaaaaaaaaaccatcctagccttattatttggtatctctgcaattttgagaatgttactactttcctttgtcctcaaattaaactctgtaaattatgatagttgaaccaaacatgattaaaatataatggttaagagtgtggtctccctaacaagacccccttgtcttttaatccctgctccactattcagtagctgtgtgatcttgggcaagtcatttctctatcccccagtatcctcatataaaatgggaataacagtagtacctatcttacagggttgttctgaagattgagtcaatatataggaaatattaggaatagtgcctggtacatagtaagcactacattttagctcttattgtcataatgatttttgtaattgtttgctctctcagttccattctgtctctttgtaatgctactatcagagtatttctctcattagccagccccttgtctccattatcactgttattaccctattattaatcaggattacattagttattaaatgtaaaatagaataatccctggcacttagtaagtagtctgtaagtgttatctcattattgttattattttcacattgatgacatctcaagtcagatcctttcctcgtccttacttgtcctctgcctttaatctctcatgccatccagatgggtctttctagagccctgtttagatagtgttgtttctgttttgaggcctttggtacctaaaaggggcagaggggagaacccaatgttgttttatagtgatatcagatgactaaccaggaccaactgaaaaaatggcattgatgaaagaggtaaacttgaattttaaagcagtgaaattttgttttagtgatttaagggcattgcttactaaaatagaatcaatttttatagaaagaaaagttgtactgatgttcaaattcaagttgacttgctatggaactaaacctacagttttacctgaaaaactcatcagtgcagttaaaatagaaggttaggaggaaaggtcagaaaggttttttatgttacgaaaaaaatgtattcatccatgttaagacgatgaaacaattttaacattgttagtaatctttataaacagttctcatttgttcatttcaaaattttaagcttctttttataattcaaatgaaaatagcttcatttctgtattttcaaaataacactgttagctttttgttagaaaaattataagaaaccttatctaacttcttaaacttattttgggttcatttgcatgacctctttaaccctttgctaatcttcagctatttcatattttaaatattttagagtatcttggagaaaagtatttttttccaataaaaattgctttagattttgtttttttaaaatattgatagccacataatgccattttaccacagtttagttctcaggtgatttttttttttaatcagatttttatgtatattttttaaaactttactgcaggaaatggcagagtgagagttaatgtgttacatggagggaagaacagtccattgggggttaaattgcagagtctaatggaataataactggtagcaccatctgctggcctacttccgcagaaggagtcagtatttttaacgacatctctaatattcatgctgatgcattttgatgctttgtgcattcatttctttctgtgctttgttggaatctggctatctgcttacagctattgaggaaactcagctttttaggagtgtttacagcctttttcatacctaaataggatgaacagtagatataaacttgccaaggcagaaatgtgttgataaatcaaaatgtgtatttgtggagggttgtgcatctcttggttgcagcttgctaaataggccatttaggaatcttctttcaatgcttttttcttgagcactgcctggggtggtgaaaaagcagagggcaagcctttgtctgacgccaaaaatgtcttcagtgaagaggccaagaggaagggtaagtgaaagcctgaatgagtgggaggaggaggggttctttgggctaaaaggctaatgggattgaataaccttccttattactggctgctgctacgggagtcgtactgcatcgccatcttgagcttgttgctgtttcctcgagtcttggttatttgttatagcctgtaggccttaaggtggcattttagtgagcaattctaaaccctccttcctttcccagtgctgcagtgctgctatgaaacctttgatgaggcaggtatagaaaaaatatccagtgaagcacactggaatcagcatgaaaatgtgtttggaaattcctgatggttttttcctttggtatagtcagaggcatgtttacgggtaagaacataacaaaactgtgatctaagtatatgtggatgaatgcgtgtttgaagaggaaattctttttaaaatgctcttgatctgcttcctgtgatattgctaaatattaataattttaatgtaaaactgtaaaacttgtttatttcccaaattgcttgagcaaaataattatgatatagaaaaagaaaaaaaattttcacatttaactctttcatgggaaaactaaaactttctctaattttaagtatgagaatgtctgtttactaactagctatgttgctgcacttaaatattaaatgatttcaggttgtagtcgtaaagcagaggttttatttttctaaaagccataataaactgtatggagtaattctaaattaaaattatttaaaaatttattaatgttcagaattttggagggaagaggaaagaaaagacttttat

SEQ ID NO: 7095 - DNA, 6000 bp, Homo sapiens
gggcgacagagagaaaaaaaagaaagaaagaaagccacgttaactgtatcccaatgagttctcaacatccggatgtgaaaaaatgggatcttacccactgctcaaaagaactagtcacactaactggaaagaagggaaaatattcaaactttgaacaagaggattgcagtttaaaataagcgggctgatggagcctccacagttgcacacgttaacagtcccagaatggagcaaaagctataaacacagcagtcctacagaatttgtttagaattaaacaaacaggcaaacaaaaacatggtggaacctcagcccgttccacctggtgttacacactcatttaggaaacagctgcgggtcgcgtgactgatttgtcagtgctttaccacgcgttctactttgcagattcttgaagctgaacaggccagacttccctggggaggaagacactgaacatacagcctgctctagctacttattccctggattctccagggaagacattctgaagactgcagtctattcagtgtcaacccctaaatcctcctgaccaaatcctttctgagaatagctccctgcactcctcttgagcaatacttgtttgtttacttgctctcaagagcaaagcgatgacaccacgatggataggacactgggcctatagtggtgcagacgacaaagccggtggcctctctcttccaatcagaaagaggagaggagggagaggccgaggaggcctgaggcctggagcaaattctccgcgtgacttgccgtccatattgagtgtggcaaaaaataaccccgatgctttctgtaggtcaggttaatgttttgtgattcatttgacaggttcttacacacagctagacagcatgatttacagccacttacatcactcaagctgggccatcacattcaattcttagcagttacatcatttccccacggttatggtcatttcctggtttgaaaaaaggaatagggtgccactgctggactttgaagaatgaatgattatttggtagtttaaaggcaccatgaaattcctagagaaaacactgagtaaattaaaatgaaagatgtgttcttgcttttctactttacatggattattacagggaacattaacgtttatattacactatgcttatattaactagcttaaaataattcatgagtaatattaatttaccactctgaatattgttcactactatattaaatttctactaaactgcagtcttttgggtcacatgaaatgtttcataaatactcaagcacacttatgcttccaaaagttacatgaagttgtttcttatatttatttgtatatgaatgtacattattataatatatatacaatagatatatattatttaactaaatgtgttattcttacatgggaatgaaacctatgagccatctttaaaccccaatcattttggattcttttctgagagccatggaaggatatgtggctttagattcaagttggaattagaagttaggcgtagaagtgtcagctttgcaaatgtggacttcagtcctatatttcaaaaacacgcagagtaaccctggcccattactacacaactgtcgatgctacttcctctggcaatgaacccaaggcctggagtaatttggtaaagctttatggatgcccaagggtgggaaaatatgagactctgcttcccctcccccatctccatatgccagatatcgattttttcccttcttcttgcatttggaacagttgtccagcaagagaaagaaaaagcccatttcttacaaagcagcaactcagccaagaacgcactcaccagtcaatacttaatatcataaaaatccagaaaagaaagcaacacagactccactctttaagacttcaaaactgatactttgttgtttggcagaaggtaggtacataatatgcgcttaccggatttttttttctattttcacagaatacaaaccaacagactgtagccatcttctgaacgctgtcctagatcatgtgaaggcacagcttcagaggttaaaaatttcggaatctggaaaccagagagaatgtttaagtactcttctttattaattgtatgactatcagagatgtctgaggtaaagaactatgacaaaaaaatcagggacagaaagtgccacctgcacaaatgcaccgttatttcacaaaaagtggtacaattggctgggcgcggtggctcgtgcctgtaatcccagcactttgggaggccaaggcgtgtggatcacctgaggtcgggagttcaagaccagcctggccaacatggtgacaccctctctctactacaaatacaaaaattagctgggcgtggtggcaggcacctgtattcccagctactggggaggctgaggcaggagaatcacctgaacccgggaggtggaggttgcagtgagctgagatcacgccactgcactccagcctgggcaacagtgcaaggctctgtctcaaaaaacaaataaataaaataaacagtggtgtaataaagaactacaactaacgtcattcttctgatggtgggagtaaattaattatacaaggatctatgacagtagttggcttctctagaagaaatcccaactgtataaaagcactttgagaaatatattttctttctttttttttttgagatggagtttcgctctttcccccaggctggagtgcagtggcaggatcttggctcgctgcaacctctgccttccggtttcaagcgattctcctgcctcagcctcccgagtagctgggattacaggcgcctgccaccacacccggctaatttttgtatttttagtagagatgggggtttcgccatgttgaccaggctggtctcgaactcttgacctcgtgatcctcctgccttgacctcccaaagtgctggaattacaggcatgagtcgccgcacctggcgcgagaaatatattttcatactttttttcttcttttttgtggaggacggggtcttgctatgttgcccagtcaggtctcaaactcctgggctcaagcgatcctcccagcctctgcctccctgagagctgggtttacaggcttggagccaccgccccccgctattttcatgttttgtatgattcaagcttacagtgtagagtgtattagcctaatccaattactttatccaattgggatagaagaaaggcttttacaaagtcaaaaggagaaatcctggaactatggggctctttcaaagtattagatgttaaagaacaaaaacagccaaatagccgggagcagtggctcacgcctgtaatcccaactcttaaggaggccgaggcgggagggttgcttgaggccaggagttcaagaccagcccgggcaacacagcgagatcccggctctactcccagcttctcgggaggctgaggcaggaggatcccttgagcccaggcgaccgaggccgccgcgagctatgatcgtgccactgcattccaggctgggcaacagagcaagaccctgtctcaaaaaaaccccaaagaatctagtgctgttcctacagagacacattggccacaggctgaggtgggcaatagcaaccaaatatcgcatggtggtttacgcactgcagcccatttggagtcctcaaatatgactgccctttcacagatgagtctgagactcaaaaactgtcactagcgtaaggttgtccagcgagtttagtggctgggaggctgaggggtagacagggcggctagcgatgtggggcaggcctggcagtcgccacagacgacctaacggtaggaaaatcttacagccaccaggagagttccaggcgccgcggcagggggactgggagaggggactgcgcccagaatgaaggctcgggacaaaagcagttgcgcaaacgcgccaaggctgggcgtcgagtgaccgcgggcggaggtcaccagcggccactccccggaagccacccacggaccacgcgcgcccctgcacgcagagggggccagggctccacgggcgagcggcgaccctgcctcccggagacggcgcggcctgccctgcgcgcctcagccccgggtgccggcgtctcgggcagcaccaccaagtctctctggaggggaaaggatggtcggatttgccccatgtcccttcctctgacccctccctcaagagtgccccgggacaccccgcctgtggctcagcctcccccgccccgcgctgccatctcctcagggccgggcagcaggctcccgagcgcccacagacccggggtgcggcccagcccacaaccgtcacctcaggggcctcaggcgcccagcggtgctgggcggggctggggcacgaccgggagcatgcgcagagcgcgcgtttcgcccatcgcgcacgcgcacacacctgctccgcccccacgctgcgtgccgctgctgggttccgccacgcccgtcatggcggcggccccggccggctctggccccgcccctcggtgacgcgtcgcgagtcacctgaccaggctgcgggctgaggagatacaagggaagtggctatcgccagagtcggattcgccgccgcagcagccgccgcccccgggagccgccgggaccctcgcgtcgtcgccgccgccgccgcccagatccctgcaccatgccgtcggagaagaccttcaagcagcgccgcaccttcggtgagtgtcgccgcgagggcggcgggtgcggcggggccggggtccgagctgtggagggcggcagggcctgggacgccgtgaggggtcggggccgagccgggaggccgagcggggccggtggctgccggccggcggggccgagggatgcggggcccggggccccgtgagggacccaggccgggaccgagccgggagggccaggggctggtctgggccggggcggcctgcggacctctcggaggcctgggaggaggcagccggcggagggcgggcgggggccggtgcgctcggggccccgggcctgctgaatcaccccgcgccctccgcggcggggtgcctgccgtaccccggccaccgccgcccccgcaagcgcgctgcgggcgagggtcgcgcttctggggcccaacagcccccggggccgcgctgggccgttcggctctgaagcggggctgcgccgggacccagcgcgtcaccttcagggctggttttcccgtcgagggagcccgcccgggtgcgagtgcctcttacagacctcagtgcctcggtcgagaggaggggaatgtgctgggccccggcctcgccgcgcccgggacggcccacagcggtgttgccagttcctgtctgtagcccaggagctggggtgggagacttctcttgggtttgcgattacgttctcaccttggcaccaggaataccgaatacatcccttttctgccggttcagactggaaacccagcttaggtgtgctggcatttggttaaacgtgcaggtgtcaccatcacaatatttactccacgcagatgatgcgaagtgattatttcccgcttgagcaagagaacgccgcagatccaggtatctgttgttgcctaagttccagacaccggtttggaagggaagcaccgtgttcatcgcggtggactgcgaatgcctgccgccatcctcgtcaggagcccacacagtggtgctgtttgtctgcttttgcctagtttcccggagtctagaaagagtttagcattcatttgagtttggatatagttttgcaggtctcattgaccattattttttttcttatgcctgagaaacttaagcaaattaaaatggaccttagcttgccaagcatatcttttcagacagcctcttgaggcagtccgttggttagcaagacttacacgtgccttttttgttagtagttttcttgttagtcaccttaatgaactctttactgtagtgtctaggcttattgagccctgagagcagcattaaagacagattttcttttcttttttattttgagacagggtctcactctgtcacctgggctggagtgcag

SEQ ID NO: 7096 - DNA, 6000 bp, Homo sapiens
gattttattccaaaaataatatatggtggctgccacaaacgattcagaccatcggaaatgcgggaggcagaagctgacccggggtgctgctctgccagccgcctggctcactgcacctccgtgggcgcccactctgttcgtttctcagcggggtgcatcacacacagtttccttccgcttctcctgcatctttccgtgccagcccgcgtgactgcctttgttccctctggctgtgtcacacatcactccaaaatgtagtgttctaaaaggaaaagcacttattatctcacagtttccgtaagtcaggaattcagggagctggtgcctgaagctgtgttctcatcgtagggtgtgaccagggctggagaggccactccacagtggcttcctccagggctgtgggctgcaggccccacccctgagcacactgggctcccccaacaggctgcttcccccaaagccagtgagatacagcagaggaagctggggtctggcagctgtgggctggcctcagaggtcctggcccttgcttactactccttccctgagttagaagccagtcaggaagggcagcaagtcctggactctttggcagctgcacggtcctcgggagcacggctgtgccgggggttacagaaactgttttcttggtgaccactgggttaggtcaggttgtggccctcgcacacagagccacagtccagcagagcccagctgtgtatgtacactgtgttcttcacctgtccttaacccaaatgtggtctccatttcctcctctcctccctccttccctcctctcctccctccttccctcctccccgcctcttccctcctcctctcctccctccttccctcctttcctccttcaagaccttgcatgttgctcagatgaggtttctcctttaaaacaaaattccctggtgctcagctgggcccagccaggctggacagtccccggtggccaccacggccgtccacagccctgctcgtgggccccagggctcagccagccgcctctctcttccagtgtgtgatgacgctgctctacgccttctccaaggacatcttctccgtcatcaacttcttcagcttcttcaactggctctgcgtggccctggccatcatcggcatgatctggctgcgccacagaaagcctgagcttgagcggcccatcaaggtgagcccggggcctcccgctcacccaggcacccttcacagaggcagggtccgtgggtcctaaggaccctgagttgggagccagcatcccagctcagcctctggacctgcccctgcctgcatgcacctgggtcgactaattccggtgatgacttgaccaccagctacgagggtgccaagtgtgactgcaggagccggggttcctcaaaggacagcagatggcacagagcttgtgctccgttgggtggagggaagcagataaggacactgcagtcataggtgggcggtggtgagccccggcaggggcggggcagagccgggcctggcgcagcattcaaagggccgtcggggctgtgctggcaggaggaatgcagggaacccggcccgaggagcgcctgggcccagctggactctcctggactctccccgtccccagcggctcattcagaggggtagctgttatccgtgggctgccttctccaaaaacggggccgtccagcagaggccatgctcttgcctggggcccagcaagtcccgccgccctggccctgacacagaacaagaggccagagcccctggtggctgctagccagcagcttttgtcactcagctggcctatggctgtcacagtagcccctgcttccctgcccggaccatctctccctctgtgttcccgaagcctgggggccccgggggtgcctgtgaatgctgttgaacgggctttaggctgggcgcggtggctcacgcctgtaatcccagcactttgggaggccgaggcgggcagatcacaaagtcaggagatagagaccatcctggctaacacggtgaaaccccgtctctactaaaaatacaaaaaaattagctgggcgtggtggcgggcgcctatagttgcagctactcgggaggtggaggcaggagaatggcatgaacctgggaggccgaggtcgcgccactgtactccagcctggacgacagagtgagactccgtctcaaacaaacaaaaaaaacaggggctttaaaatacagtcagcacaagaacccagatgctgccccaagagaaggctgcagagggcagggaggagccgccctacatgggcaccagcttgtgcctgctgtgccagcctggggcagtgcctagggcacagggcagtcactgcgcacagcgggggctcagcccccatggggacctgggcatggggtaggctctacccactgttgtgagcctgggcacgggttggcgtctgttccctggggacagggcagtcatgcagcccacactgatgggctgggacctgtggtcagccctgcatctcccagggtgccctgtccaagtatggattcaggacagctgagtcaatcccccagccatgccgagccgcaggttgcggcctgcaggctccttgcagccctgcctggcttctgtgccgggtggagctcatctgctgaaggtgacagtttaggctgcagcttcagggatgggcttttgctcagcgctgtccacagcggcgtctccaagagggtggtctcctggcttattagtgggtggccactgtctcctggaagcatcaggcccctgtgcgtcctggcggctcagggtttccaggcctgtgatgtgggaatggagccgtgaccttccctgcccgtgggaggcctcgggagacgaagctgtctccttccatccctcatcataagccgcctgagcccctggcaacatgcccagcactgtatgcagagtcgagggcgggacagcccggtgtgtgaggcagatggagtgcagatcgcatcttggtgacctggaagtcagcagccgtgggtgtggagggcccaggagggctgaggaacctcggggcatgggggagggaggctggacaggagagggctcacccaggccctgtcctctgccccaggtgaacctggccctgcctgtgttcttcatcctggcctgcctcttcctgatcgccgtctccttctggaagacacccgtggagtgtggcatcggcttcaccatcatcctcagcgggctgcccgtctacttcttcggggtctggtggaaaaacaagcccaagtggctcctccagggcatctgtgagtatctcgctggcccacagcccgtggtaccctctgccctgggcagcgaagggagttgagaggcgtcggccgtctccacccacatggggcgaagcgtgttgggtggcaggagggttcaggtcactgcagtgtccgccagtgacacgcagcccacatggttcagggataagacacacagcgcagcaccagctaatctctcaggacgagggattccggaaaaccaggctactgctgccaagtaacaaaatcctgctggctgccaccagcggacacagcagacttacccagaaaggcagaaagaggcagaggcaggcggatcacttgaggtcaggagttcaagaccagcctggccaacatggtgaaactctgtctctactaaaaatacacagatcagctgggtgtagtggcacacacctgtaatcccagctactcaggaggctgaggcaggagaatcacttgaacccgggagacggaggttgcagtgagccgagatcgcaccattgcactccagcctgggcgacagagcgagactcttctcaaaaaaaaaaaaaaaggcagaaggagaaacccgccccccggccctgtgtgcagcggcagccccaggggtgctttgtcaccaagctcaggaccccgtcctcagcgcctgcaaatgtggccaggctcgtagaaaaaggccggggtgcttgcgggcctacatgctgatccccatgtcactgggtggcttggagaattcccgggatggcagcaacacaggcagggagaccccccacccctaccccacactctgatcaccgccagggtcatggtagaacatttgcctcaagctttgcagtgggatctgcattaactgtcattcaggacaccaagagcttaaagcaaacccccgtctctatcctgaaagcagtccccctccacagagtgatgtctctgtagacagtcccaggcgcgacaggtcttccgaggacccgttagcagattggcccctccggccctgcctgctgtgaacagtccaggcatgtgtccaggtggtggcccgggtgtggacctgcaggaaggcctgtcatccccccgttgcactttgctgagacaccagggcctggttcgtgtgccccaggggccgcactctgcctccccagggttctgaagcaggcgaggggtgggccgagtgggatgtggcacttccgcatttcagttgaagacagcgcctcgggcacccggcacccacatgcgcaagtacacaagggaaggttccttaaaatcccagcgctgggcagcggcgctgggtttggtgacagcagggctgggggagccccagctcacgcccccgtgtcccacgggtgcctacccagcccccaggctaacacagctgtcttctctcctgacagtctccacgaccgtcctgtgtcagaagctcatgcaggtggtcccccaggagacatagccaggaggccgagtggctgccggaggagcatgcgcagaggccagttaaagtagatcacctcctcgaacccactccggttccccgcaacccacagctcagctgcccatcccagtccctcgccgtccctcccaggtcgggcagtggaggctgctgtgaaaactctggtacgaatctcatccctcaactgagggccagggacccaggtgtgcctgtgctcctgcccaggagcagcttttggtctccttgggccctttttcccttccctcctttgtttacttatatatatattttttttaaacttaaattttgggtcaacttgacaccactaagatgattttttaaggagctgggggaaggcaggagccttcctttctcctgccccaagggcccagaccctgggcaaacagagctactgagacttggaacctcattgctaccacagacttgcactgaagccggacagctgcccagacacatgggcttgtgacattcgtgaaaaccaaccctgtgggcttatgtctctgccttagggtttgcagagtggaaactcagccgtagggtggcactgggagggggtgggggatctgggcaaggtgggtgattcctcccaggaggtgcttgaggccccgatggactcctgaccataatcctagccccgagacaccatcctgagccagggaacagccccagggttggggggtgccggcatctcccctagctcaccaggcctggcctctgggcagtgtggcctcttggctatttctgtgtccagttttggaggctgagttctggttcatgcagacaaagccctgtccttcagtcttctagaaacagagacaagaaaggcagacacaccgcggccaggcacccatgtgggcgcccaccctgggctccacacagcagtgtcccctgccccagaggtcgcagctaccctcagcctccaatgcattggcctctgtaccgcccggcagccccttctggccggtgctgggttcccactcccggcctaggcacctccccgctctccctgtcacgctcatgtcctgtcctggtcctgatgcccgttgtctaggagacagagccaagcactgctcacgtctctgccgcctgcgtttggaggcccctgggctctcacccagtccccacccgcctgcagagagggaactagggcaccccttgtttctgttgttcccgtgaatttttttcgctatgggaggcagccgaggcctggccaatgcggcccactttcctgagctgtcgctgcctccatggcagcagccagggacccccagaac

SEQ ID NO: 7097 - DNA, 6000 bp, Homo sapiens
atgtatattttattctcttgattttgtctcataggtttttttaggcttgattcacttttcttcttcatttttctttctttttctttttctttttcttttccctcccctcccctcccctccccccctcccctccctttcctctccttgtcctgtcctttccttgtcctgtccttttctgatggagtattgctctgtcacccaggctggagtacagtggcatgatatcagctcactgcaaactctgcctctcgggttcaagtgattctcctgcctcagcctctcccaagtagctgggattacaggcgcctgccatcatgccaggctagtttttatatttttttagtagagatggggtttcaccatgttggccaggttggtctcgaactcctgacctcaggtgatccacctgccttagactcccagagtgctgggattacaggcgtgagacaccacgtccagcctcttcattattttttctttgtgatcctcatattggagaatctggtaatttcaattcttctatcttcaagtcttcaagtttgctgattatttcttcggtttgctcaaatctcctgttgaacaacgataatgaattttttatttcgggtattgtacttttcagctctagaatttctattttgttacttttaagatgttctatttctgtattgatattcttattttattcatatgctgttttcctggtttactttcattcttgggccatggtttcctttagctctttgatcatatctaagacacttgatttcaagtttttgaccatcaaatctaatggactttctaagggacaatttctgtcaacttttttcttcctttggatgggctttcttattctttgtatgctttcagggtatgtgtgtgtgtgtgtgtgtgtgtgtgattgtgggcaggggtgcacatacacacgtgtgtgtgcatatgtgtgtgagaaaaccagaccatttgatactgtgatgtgctaacttcagaaataagatttaccccctcccttagcatttgctcgtcttgattgttgaaggctggagtcattcatttagacacttttcaaactattttctgtagtgactatattggttgttgtctgaggttactgaagcctgtattacttaggtttgtgtttagccagtgttttaatacagatttccttgaatgctgggagtattttcttttcagcattctcttggttgttataaatatttgactgttttccagagttctgataaagttggttctgacacttcctgcttgtttttggtgtttctgtggagagacaggtgtttggagctgtctagtctgtcattttgctggcatcactctctcatgcttggctttttagtgacctgaggaggccattgtggctgaagcaagggggtgagcaagagagaagtgcagccagagctgaaggcagagagctgttctggtggtggtgcagggctgtgcttacaagtcatagtaaggatttcagtttttcatgtgagtgacataaagagtcattggagggttgtgagcagaggagtgtcctgaattaacttgcattttaatgagatcactgttttgaaacagggcaaggtaaatagcaggctgttagttgccaatcaagtgtccaagatgagaagtcaagtagtttattaggtaaatgggtctagatttaaggtagtgatatataattaatagatgtaagttagggaattgccaatatagagattttatttaaaaccttgagattggatgaaatcaccttggaagtgattatagatagaaaagagaagaggttggagtcctcaacatttgtagattgtagattgaaatctgtaaaaagagaatgagaatgagaatgaacactcagaaaagtaggagagaaaccaagtgaataccatatataacaattaaatgaagttaagtgtttcaaggaggattccatgataactacatcaaatgctgctgataggtagtgttagatgagacgtgaaaaacgacccttgtatttcgttatgtgaaggtccgtatgccctcaggtcagtttggtgagatgatgggaataaaacaatttcaagagagaatggcaacaagtaaattgaagacaataaacctaaacagattcctcaagtttgttgtaaagaggaagaaagaagggggaggaaattgaaaggataataaatgggatcaagagaggggatatttgaagatgagagaaatagcagcttgtttgtatacagatgagaatgggacaaattgatgactcagaagagaagaaagaattactggggcaatgcctttgagtaggcaagtaggtggggaaggaaggcagaggaaggagagttttaattttttattgcttattacaagaatcaaacattttccaacttaaatgtaaaacagtggaggaaactttttaaaagtaatttccttggttttttcttcgtttgttttggagacagggcctctctctgttacccaggctagagtgtagtggcttaatcatggctcactgcagcctcaatctctcaggctcaagcgatcctcccacctcagccccccaaatagctgggactacaggaatgcactatgcctggctaattttttttttattttttatttttagtagagagaagggtctcattttgttacctaggctggtctcgaactcctgggcttaataagcattcctcccacttcagcctcccaaagtgctgggattataggtgtgagccactgcaccttgccaatttccagatttatttatgatatgattgaggaaagctgatcagaaatacttcagcttgtaggtaggaaacacagttattctggcatgtgagtatctgtatgctagctggtaaggtgcccaggaaaggggagatcagatcaaataatgaatatacaactgaatggaaagagtataagtccttacctgctttaatccttactggatacagagttaatcagttcttgttaccttttaaagggctagccctaaataattaagggacaatattgaattcatattaatttaatattaacaccctttcaattgatatttattactcaaaagtatctgggcttcctaattttttgataaaaagtaagaattctagatatcctaaatttaaattttcaaattttactaatgttttactaatatttcctgagctgtgacattctaaagctgactgttcctcaaaccaaacatcacttactattattactgattataaaaacatcttgcttttgtatggaaaacaatttaatatgcaatgtatcacttaatcattgtatcaagtatgtaggataggcagagggttttgttgattctttagtttttatatttcttcaggtccctaatattaaggagctttgtggatgatactatgcatcttctagagaagcagtcctcaacctttttggcaccagggaccggtttcgtggatggggtagggaaatggggtgtggtggatggagggagatgatttcaggatgaaactgttccacctcaggcattaattagattcttataagggagcacagcctagatcacttacatatgcagttcacgatagggttcgggctgctatgagaatctaatactgccgctgatgtgacaggaggcggagctcaggcagtaatgctggctgacctgctgctcatctcctgccgtgcagcctggtttctaacaggccacgcacccattccatctgcagcctggggtttcgggacccctgttctagagttgtcatttgtgacagagtcagtaaaaatcatttcagtaaattttgaagttttaaattttgattgattaaaatgatcttgatagcttaccctgtctcaaaaaaattttttttcctgagtcatttaaaaatatgtctactctagagttcttatttattttaaaatttttccagcgcttaatttttacttatattactagcttattttaacattgttataagtttcaaagttgtattagataaaatattttctttgagaagacacagacttccactgtaacttaaatcatccaaagtaacttcacctacttaattttttctcagaaagatctaccttgcaaatacttgccaagtaaaattagttggtaattagattgaataaaatcagttttgttttttttttgagacagtgtctcactctgttgcccaggctggagtgcagtggcacaattatggctcactgcagcctcaacctctcaggctcaagcagtcctcccacctcagcctcccaggtagctgagactacaggtacacaccaccatggccgagtagttttgaaattttttctgagatgggtgtcactcttgttgcccaggctggtctcaaacgatcctccttatctaaaagatacaacagaaaattagaagtttcaaaataattttacttatataatttttattcttaaagtagctttattgagatataattcagataccatacaattcattcatctaaagtgtatatttagtggcttttagcatactcagagttgtttatccattaccataaccaattttagagcattttcgttacccccaaaagaaatcccataacctgtagctatcactcaccaatcaccagtcctttctacccacccaccatgccaccagctctaggtgacccactaatctattttctctctatatatacttgcctacttttgacattttatataaatcgagtcatataatatgtggtattttgtgactgacctctttcacttagcataatgttttcagagttcatttttgttgtagcatgtatcagtacttaatttctctttattgtttttgttcctttttttctaggattttgacacttcatgacatgtcattatttagagcaataatgaatattgacctgttttggattagttgatgaccttcggaaatgatccaataatatctactatagagaagctgaatatactccatttggagtgaacagcccggattgttacagaattttcaagatgacagatccaatgatggacttttttgatgatgccaatctttttggtgagaccttagaaggtttgtcagatgatgcatttgtacaaccaggacctgtttcactagttgatgaattgaatttgggtgcagaatttgaaccgttgcacatagattcactgaaccatgttcaaggtactccaacacatcagaagatgactgattttgaacagttaaatcaatttgattcaataaaatttcaccatgttaatcaatcttttggtagcccagctgaacatgtgttatctccacactctcagtttaattgttctccaatccatccccaaaaccaacccaatggtttgtttccagatgtatcagatggcagtccaatgtggggccatcagacagctactaccatttcaaatcaaaatggatctccttttcaccaacaaggacattcacactctatgcatcaaaataaaagctttgtggcacaccatgactttgccttatttcaggccaatgaacaacaaacacagtgtacttcactacgctcacaacaaaacagaaataatctcaacccagggcagaattctcttagccagtctaaaaattttatgaatgtttctggtccacatagagtcaatgttaaccacccaccacagatgactaatgcatctaattcacaacagtctatttcaatgcagcaattttctcaaacgtcaaatccttcagcacacttccacaagtgtagcagtcatcaagaaggaaattttaatggaccttccccaaatatgacttcttgttctgtcagtaattcacagcaattttcttcacattattccttttccagtaatcatatatcaccaaacagtctacttcagtcctctgcagttcttgcatctaatcatacaaatcagactttatctgattttactggaagtaattccttttcacctcatagaggaatcaagcaagaatctactcagcatatcctaaaccccaatacatcattgaattcaaat

SEQ ID NO: 7098 - DNA, 6000 bp, Homo sapiens
tgcacaaactgagcatctgcttgacacagtaggtatgtaaatcattgctgtgagacctctgccattgagaagtacacagtctagtgggagagactgtcgcataaagcagtcaggactgtactttaaatttaaggggtatgtttcagacccggcacggtggcacacacctataatcccagcactttggaggccgaggtgggcagatcatttgaggttaggagttcgagaccggcctggccaacatggtgaaacattgtctcttaaatacaaaaagtagctgggtgtggtagcacacacctgtaatcccagctactcgagagactgaggcaggagaatcgcttgaacctgggaggcagacattgcagtgagcagagattgcaccactgcactccagcctgggcaacagagcgagactctaattaaaaaaaaaggaagctaaaaaaaaaaaaatttaagggatatgttccaggtgctattatggaagctcaaggctgagcagtttggacaacccaggagtcccagaaaaacttcatgggagatggcaatttagctgagccttgcgggataagtaggtcaaagcagaagcaacggatattctgggcagaaaggacagcctggccaaaatggtgaaacccagtctctactaaaaatacaaaaattagccgggagtggtggcaggcgcctatagtctcagctactcgggaggttgaggcagagaatcgcttgaacccaggaggcagaggttgcagtgagccaagatcgcaccattgcactccagcctgggcgacagagcgagactctgtctcaaacaatgacaaaaagaaaaagtgtaactgtaggggtgggttgcccctccacacctgtgggtgtttctcgtaaggtggaatgagagacttaggaaagaaaaagacacagagacaaagtatagagaaagaaataaggggacccggggaaccagcgttcagcatatggaggatcccgccagcctctgagttcccttagtatttatttatcattcatgggtgtttctcgaagagggggatgtgtcagggtcacaagacaattgtggggagagggtcagcagacaaacacgtgaacaaaggtctttgcatcatagacaatgtaaaggattaagtgctgtgcttttagatatgcatacacataaacatctcaatgctttacaaagcagtattgctgcccgcaggtcccacctccagccctaaggcggtttttccctatctcagtagatggagcatacaatcgggttttataccgagacattccattgcccagggacaggcaggagacagatgccttcctcttgtctcaactgcaagaggcattccttcctcttttactaatcctcctcagcacagaccctttacgggtgtcgggctgggggacggtcaggtctttcccttcccacgaggccatatttcagactatcacatggggagaaaccttggacaatacctggctttcctaggcagaggtccctgtggccttccgcagtttttgtgtccctgggtacttgagattagggagtagtgatgactcttaaggagcatgctgccttcaagcatctgtttaacaaagcacatcttgcaccgcccttaatccattcaactctgagttgacacagcacatgtttcagagagcacggggttgggggtaaggtcacagaatctcaaggcagaagaatttttcttagtacataacaaaatggagtctcctatgtctacttctttctacacagacacagtaacaatctgatctctcttgcttttccccacatgtaacagcttgtctatgaaaggtaggaggaatggtattagagatctataaagggtcagcggagggtcctcttactttgtttttaggctaagaggaactttgatgtgtttatgggttcaggagaaagagccagaagagagacctttgagatgtagggaagaagagctaactggtggtataaggtcccattgggaataagaggggatgagactaccgtgcaaatgggctggcagagggagcgatcatggtgggttggtgggatagtttgtgctgggaagctgacagcttttatgcttatccatcctttgatgggaatgttactgaaaagcaccggtgttgtcttttaactcttcctcatctgctaaggatgtgatcttaatattgggacttttaccctacaggccatgtaggctgatattttgtctttatttgtttgctgaagggaaaagtagctctcccaaattatttaaataagagatgatttgttatgttttaccaaaaggattaaatgtaacactgaggccgggtgcagtggctcacgcctgtaatcccagcactttgggaggccgaggcgggcagatcatgaggtcaggagtttgagaccaccctggctaacacggtgaaaccccatctctataaatacatacatacatacatatatacatacatacgtgtaacactgaaagactagataggtcatgggaagagatggccccaattgtgaacttagtaggattaggttcttcctaagctaagagctacatttttttgggaaacagagtctcactctgttgcccaggctggagtgtagtggtgtgatcatagctcactgcagccttgacctcctgggctcaattggtcctcccacctcagcttcccaagcagctgggaccacagacatgcatcaccatgcctggctaattttttaaattttttatggagacaaggtctccctgtgttgcctaggttgatctcaaactcctgggctcaagcgatccacctcccttggcctcccaaagtgctgggattacggaggtgagccactgaaccaggcttgcctgtctggcttgctcacagttgcagcctcaacaattagtacgtaacagatactcaatttttttttgagacttttttgagatggagcttcactcttgttgcccaggctagagtgcaatggcgcgatctcagctccctgcaacctctacctcccgggttcaagcaattctcctgtctcagcttcctgcctcctgagtagctgggattacagtcacctgccaccacacccagctaatttttgtatttttagtagagacggggtttcaccatgttgtccaggttggtctcaaactcctgacatcaggtgatccacctgcctcagcctcccaaaatgctgggattacaggtttgacccaccatgcctggcccccagacactcgagttttaaaggaatgctataataaatagaaattattttacaacagtgggatgaaactatgttttttttgttttcgttttttttttttgagatggagtcttgctcttttgccagcctggagtgcagtggcgcaatctcggctcactgcaacctctgcctcccaagttcaagcgattctcctgcctcagcctcctgagtatctgggactacaggcgcgcaccaccacacccaactaatttttgtatttttagtagaaatggggtttcaccatgttgaccaggattgtctcgatctcttgacctcgtgatccacccaccttggcctcccaaagtgctgggattacaggtatgagccaccgcgcctggcagcataccattacattttattttacttggatttaacaaaaataaaaagaaattgaggtaaaactggtgacattattggatcattcattcaggcagatttcagaatttggagtcattatcccgtgtgtttccatttcagtcaatatcctttagctccctgcttagaaataggaattagccttcttaaactcctccctcgcttacctatttttgttagctattgtaaggaacatggctgtgctttggtcaaggataggccaaggtaagatgtttacatcctgcgtgactcagcaagtttagacagaggcgtataactccacttgttatcacagccatgtaggcataacatgggaaggtcatcacttggctctaagccactattttctgtaaaaggtataattgccctgctgatactgtacaggcgttcgtgcccagagaaagagagagccagagctgtcagtctttgcagacagacagggggagccagatcacagctgagagagagttaagctgctgaccctgaaggcaagggagagccagcctcgcagttgtgtgggggagccatgggactaagcagctgagacaaggcagacagtgtgagagaactagtgtaagtaagctgctgatgagagctgctgctgaataaaatcatctttcacctgcctaccgtcccctgagtgttctttcagctatctgttcatccacccactcccctcagacctcgatatgggctggaacctggctgtgggcatgacagttggcatagtcgtggacctgacagctatattatacactgtcaagttttaaaacatgtatattgttttaatcgtaattctcacatttattagtcttaggtattgaaattgattattttttcacattattatatatatttttttacctattcaataaatgttaatacttgtggaagaattgtggaatcaaaactttgtcctttttttcttttaatcttttttgtaatagagacggagtcttgccgtgttggccaggttggtcttgaactcctgagctcaaacagtcctgccaccttggcctcccaaagtgctaggattaaaggcgtcagccaccgcacccggccccaaacgtttaaacagatgtatttcagaactttcagataaaaaatgaaagtaggtttctcgtgccgtgtcgtttagggaaagacggcgacgtctgcacagtttagttgtgacaccaagcagttgttcgtccccgaacctggatgggctccgagggcgcagtgcctccaggagccgccaggggccgccaccgccggcggtgcccgacagcgctgccgtgtgcgtcgcctgcgcgccgccggaaaggaaccctggtccggaggcggcggcgcagtgcatcctgggttggcgtagccatggcgtctcgtgtcctttcagcctatgtcagccgcctgcccgcggcctttgcgccgctgccccgggtccggatgctggccgtggcccggcctctcagcaccgctctctgctccgcggggacccagacgaggctcgggactttgcagccggccttagtgctcgcgcaggtgactcgtggtgactttgctgccgcttggcaagggtcagggattgggcccggtgggggtgggggccgggcatccggggcgcgccagctgcaggcaggggtgacccggggggcagccggctcgctccgcagccccgctgcctaaaggtgtttagttgacccctgacgggaggccgggtgacctcgtaataacgagcaagagcactgactcgagtccagcactgctgggctgccgcttaccgaaactttggacaagtctcctagcctggctcacactcacctgcaaaattgggatcctggtctctaccttgcggagtagcaatgaggattagatgagttaatgcggctagagcacctcgtacggtctcaaaatagcggtcaccgtattgtagtgaaagcagcatgcaaagaggcagccacactggcctacagccttctccagagcggttttctctctgcagttctgtccttactcttccctgcagcaccttctgcctgtgtccaggactcctggaagtaattctaggaaacaagccaagtgacctttgaccaataaggatttgaattgcgcgggtccacttatatgcggattttttttcaaccaaacgcgaccagtatttacgggatgtgccgccccgcgtataaggagggcaggctcttcctataagcggattctgcaaggctgactgcgggacgtgagtgtgcggggatttgggtatagtcgggggtcctggaaccaatctgcgcaaataccaaggaacgactgtacctgtagtatatagcttgagctgatgaaatctgcgtgaggctgaaacgccgggaggcagtgatttcggtgttgttgtt

SEQ ID NO: 7099 - DNA, 6000 bp, Homo sapiens; identical to SEQ ID NO: 1870

SEQ ID NO: 7100 - DNA, 6000 bp, Homo sapiens
gttatcaacagacttgtccttcattaaaaagtaaaactgcatttgcctacattttatgaaagtgtccaattatgaacaattttgaaatgtaacttttaaaaatgtaaacagcaaaaatgttgtatttaaaataaatctggaaaggcagaaaaacaaaaaatacccagaagacagagtttttggtgaaagttaagatatttcatctttgaacaacttagaatctttcctgcattttatagtctagttccaggcattaatttgaaataaccttggaatcctaaatctaacacccttcggaacaaagtagcttttctcttctgctttatgagcaaatggactaaatactagggaatggtactgtctgggcctttgaaccaagattgaaagagatgaaatcctatatgatatgtataaacattagagaatccattttgatttaataaaaggttgaatttgttctatatcctgtgagaaaatggttcccttttcctgaaaatgttacctcattccaacaatagaaagttggtttttttccagggtgtggtgttggcgggggacagagttgccatgaatatggcatctatgaagactgctgttatattcatttctcaaaatgcactgtggtaggaaattcagaacgcagtgagagaaaataaatgtttgacttcaaaatataaggccgcatttaaagcagaaggtaaagtatagaacagttgacagtataaattctttatctgcaatcttgcagttccctaaatctctgtaacacatcacttttaaaagcctcagataagtggttctataataatttaccaataattcaacccctcaaaagtcttagcaagttaaaccttataatcttacattttagaaatgacccaacttgatccttttattcttcagaatatctctctcaaattttcatttgtttttcattaattgatgaataatgagacattttaggtacctgtccacaaagaaatgaaattttcactttccaggaacctaacaaatgaaaagatagaaatcaattccaacagaatattaccaaagaaatcttttagaatggactgttaaaattatttatttgtatttatctggctctactatttgtggtacatttccacttcaaagctaaacctcaaataacatcatagtgagtggttgacttcatgtttaactgagatcttgaagactgaaaaagaccacgacaaacacacatctattttcttggctactgcatccgtgttcatcaccattctgatagtctgcaatgtattgcagctcaccctttgggaaggactaaagtagacatctgtttgttctgcttactcagcattcctaccctaattttcctttggagaacccctttattctagaccacgtgaagctaatgccaaaccccattccaggggatgcacctgaatccaacctccatcatctaaacagtgccttctccacgttcagagaagagcaagtgactcaaactgccctcataagaacagacctgggacttctgctgcaaatattgaagagtaagtactcttttttcttgctaggactaagctggtagtaccttctatgaggctatcatatggaaacaacttgtctgaaaatgaagccacaactagaaaacagatcctggtaacccggattgatggatccagccctaccttaaatggcaagacctaacccgaggctttttgcatcaaccaataaagtccttaagccagtttgagttggttttgtcacttgcagctaaaagaattctgactctaacaatgtgacaatagcaaaaataaacataactgcttttgaggtttctaatggattttcctccctatatacatgatttcatttaatcctcacaattcaggaaagcacatatctattaacattaaattaatattcattattttgaacacatgctatgtggataagggatgaggaaagccaaggaagtaatcaacgtgaaatctcacttatatgggagggaagtggaggttacatatctcagggcacttaacagatatcatcaaatgaaagaataaacagtgtgtgggagaggcagtaggtgattcttcatcaattcctggatgaaaaattaggagataatgaactccgaacaggcagcctaatgagaatggctcaagcaacaggacatagagagggagttaggttagacatggggttcttgggaattttcacctcgtgggggggcgggggggtcgtgcagctgttgtcagtgggaaagggaaaaaggaaaaggctgagtttggaaggcagggagggaggagacaatgtgagtcagtgaaaaagggcccttagaatgacaagtctggaccagagagaggctaagactgaaaatacaagttgggtaaccactggcatacagatggcagttcaggcttgggcactgcccaccagagcctcagcatgaagagaagagggggaggctggccaccacctccctctaggtaatcgtcatcctgatgctgagctcctgaaaacaggctctttcactcgccccatctcttgctcttgattgcaacccggcattcaggaggcaccctgtaatatctgtggagtgaccgacaacacagcgccagggcactgagaagatcccagggcgccagggactggttctacaagggtgcccctcccggtcccctccagcgcgccgccagagctgccagtcttggctgctacacgggaggcagcctcattatgcagctctcacctcttaaattagttcatgctctcacattaggtgtaatcacagcttgcaacgctttctggggatgtctcagaaagatctgagttgaaaaaatatttttgtgtcattttaatttaaagtaaaattgctgcttcttccccgcccctttctttcctcctggcccacccagcgaccctggccggccgtgctcaacgggggcgggggtcggaggtgagatttcctccacataattccttaaacagctatcaactaagtctcaaagaaaaaaaaaagagatctagaagcagagacgtggctgctggcgatcccaaagctggtgttcgctcttgggggagagcgtaccctgggggaggccgggaggccgggccagaggctagcccagaggcagagggcaggagcgctcagccggcgccccgcgtctctccagctcccgacgctgcgctggctccgctgagcacgccaggatcaaggtcgcctggtggggaccggagcgccaggagcctgtgggaagcgttccagccggcctctgactgggatccggcgccgcgtttctgctttggacttgactgacaggtccccccgccctcccgccgccctactaccagcctgggttcatccttcagggctacgtctaccgcacccgggctggaaagcctggagcgcgcccttcctctcctcatcttctcagctctcctttctccctgccacttggcaaagctgcattttgactttcacgttttggactacgtgtgtgtagttccaagtccatgcgtggcacgaaaatccacttagggtaaaaattattctcgaaaaatcgcccatctcaggatctggtgtctacactcaaggctaggaggtgcaggtacgggtgcgtaaagcatgccgtaagggtgcacagtaaataaaaagtacggatgcaaaatgtaaattttaagtgcaaaacagaaaagcagtactcgttgccgccccgcacgctgggttttaaggggcacgaaggtgggcctcggctgcttttgctcagccccgcgtcctcagcgcccggcccagtacccggtactccgtaggggttcaatgatctcccctgaataagtgaacgaattaacaaatgaatgaatgaccgctcgatccgacctccgcggccggcagagcagtcgctggagaggcgggagagagcgagaggccaagctccaccatcgcggccgccggctggggcagagggacacggagacactcggcgccccggctccgcaccgagtccccgcggtgagtgcccgcccagcagctcccgggcaccacgtgcgcccgccagagccgcgcaggccccgccccgccgcgcgcgcacgcgccctgcaccccggccgccgggaccctgagccaggctcgcccagcgcgccggctgccctcgcgcccgcgcccgctggggggcgctcccctcccaacgggcgcgcccacaggcgggcaggcgactcgcagcctccagcgattccactcccgaccccggggcgcgccgcctcctacctgagggccgacgagtgggggcgggcaggagggccgagggaggcggaacaggatcgaggcgcgaggcgggagtcgagaaagcgagcggccgaggcgactctcagtgcgcggacgcgggcgcgcgcccgcgctcccttcgtcgactcacggcgagagcccaaccctgctgccgcgcgccacccgcctcgccgcgcctaataacaacggcgcccggggtcaggtggccgagcgcggacagcgccgccattggctcggtggggagcgcggcgcgtcaggattggctggggggcgtggcctcggccggggcgggggcagggcctcggagggaggcgggccgggaggcggcgggggcggggccaggccgaggtccgcgcctttgtgcccggcgcgcgctctccgcccgctccggctgcagcgccggctgcatcaataattcagagcggcggcggcggcggcagcggcgggtgcgggcaggaggcggcggcagcagcgggaccgagcagcagcggctatgcatccaagtgcggctgggcagccgcggcacccctgaggcccgggaggggctccgggaacacagcgcggaggggacgctagtcgcggaggggacgctagtcccggagtgcgaggaagaggtgtagtgtccagagcggcggcggcggagctgcgcacggagctgaggagggggcttcggagcgggactgggacggggggggcggctggcgcgagcagccctgggggtggggggcggggtgggcgccggcggcgcgatgctgggcgtcctggagctgctgctgctgggggctgcgtggctggcgggcccggcccgcgggcagaatgagacggagcccatcgtgctggagggcaagtgcctggtggtgtgcgactccaaccccacgtccgaccccacgggcactgccctgggcatctctgtgcgctctggcagcgccaaggtggctttctctgccatcaggagcaccaaccacgagccgtccgagatgagtaatcgcaccatgatcatctacttcgaccaggtgagtgttccttcctcccgcggcgtgcagattgggctggtgaaggagggatggatggaagaccgatgcccggtcctctccaagggctctgcggaggcgcggggacgacagtccgggaccgattcctgcccactccccttcgttcccgtctcgttataggtactagtgaacattgggaacaactttgattcagaacgcagcactttcatcgccccgcgcaaagggatctacagttttaacttccacgtggtaaaagtctacaacagacaaaccatacaggtcagccgacgcctcgtgccgggccctggccccgtaggggggttactggcctcaggggtgctcgggctgtccggaggtggtaggcagaagtggcggctgcatgtacttcgggctgcttggagggacagatagcggggcctctcagttctgtggcttcaactgtcctctgctttccctgtctctggctcttgggatccagccccatcccccgagagacagaattttctgcttctgccttccgggcctctccgaagggttccctggatttcagggacttccttgtaacggctgttgttagcgccccagacagctgccgcttgggaagccttcccggactccccaggaagcaccgcgacagtacaccctaccccttgccccggctcagaagcctgcgatgcggcttgcgtgcttgtcttcagcaccacggacggggcc

SEQ ID NO: 7101 - DNA, 6000 bp, Homo sapiens
acaggcaacatcatacttaataatgaaccgctgaatgattgtctcctgaaacaaggaacaaaacaaggatgtccactctcatcacttcattcaacattgtactggaggttctggtacagtcaaggctagaaaataaaaggaatccagattagaaaggaagatataaaattatctctatttacaggttttataatcttatgttgaagattccactaataaaactattagagctagtaaataagttcaacagaattgtagggtgtaagatcaatatacaaaacagttgtaggagtagcacagtgtctcacacctgtattcctagcactttgggaggctgaggtggaaggattgcctgagcccaggaattcaagactagcctggacaacacagcaagaccctgtctttgcaaaaaatttaaaaattagctggacatggtggcacacatctgcagtcctggctacttgggagactgaggtgggaggatcacttgagcccaggattttgtgctgagcagcagcctgggcaacagagcaaggccctgtctctaaaatgataataataataataacaaaatactttttttttctgagacagagtcttgctctgtcacccaggctagggtgcagtggtgcaatctcggcttactgcaacctccacctcccaggttcaagcagttctcctacctcagcctcccgactagctgggactacaggcgcatgccaccacacctggctaatttttttgtatttttagtagagacagggtttcaccgtgttagccaggatggtctagatcccctgacatcgtgatccacccgcctcagcctcccaaagtgctgggattacaggcgtgagccaccgcacccggccaataaaataatttttaaaaggttaaacatagagttaccatctgatccatcaattccacttctacatgtatacccaagagaaatgaaaacatatgtccacacaaaaactagtccatgagggaggccgaggtaggcggatcacccaaggtcaggagctcgataccagcctggccaacatgatgaaaccccatttctactaaaaatacaaaattagttgggcgtgggggtgggcacctgtaatcccagctactcgggaggctgaggcaggagaatcgcttgaacccaggaggcagaggttacagtgagccaagatcatgccattgcactccaacctgggcaaaaagagcgaaattccatctcaaataaaacaaccttgtacatgaatgttcacagcaccattattcacagtagccaaaaagaaaaaataacacaaatatcaactactgaacagataaaaaaatgtggtgtaatgagaaaaacactgaattgtacgaaaaaccttcccccaaacttggaggcagttgagagaccagagaatgactcaggcaagtccagcttggcgagtagatgagtttgaggacttacatacgggacactccttgacagcagcaggacagtgctagagatccgcgccacctcccatctctaagccatttttaagctaattttctagctctttgcctactgcgtgtatgcagtgggactgttttccttggtagattctcagatcctctccaggatgtttgagttctcaggaatatctgctcctaggctgggcaccatggccttggctcaccacccagcattcaggattcaagcagtggatatacacctccaagtaacctgatgggggacctgccacactacatgtggtatagccatacaacagaacattattcagcaataaaaatgaatgaaatactggttcatgttccaactaggatgagcactgaaaacagtatgctcagtgaaagaagcagacagaacaggtcacatattgtgtgactcaatttatatgaaaggtcaagaataggcaaacccacagaagcaaagagtagattcagagttgccaggggcttggtggagggggagatgggaagtgactgctaatgggttcaggattttagtaggggagggtgatcacaatattctgaaattagatagtggtcatcattgcacaactctgaagaaactaaaatgcaccttattggactctttcaaagggtggattttatggcatacgaatatctcaacaaaactattcttattttttaaatttttttttccaaggcagagtctcactctgttgcccaagttggagtgcagtggcgcaatctcggctcactgcagcctccacctcccaggttcaagtgattctcgtgactcagcctcctgagtaacagggattacagacatgcaccaccacacccagctaatttttgtatttttagtagagacaagagtttcaccatgttggccagactggtctcgaactcctgacctcaaatgatctgcctgcctcagcctcccaaagtactgggattacaggcatgagccaccatgcctggcctcaataaagctatgttaaaaaaaaaaaggcagacaattcaaatgtccttcaaagagtgatgggtaagtaaactgtggtacatacataccactgaatactactcagcaataaaacctatctgtgttgacgtatatagcttagatgaatctcttctagggaattttactgagttaaaaaaaaaaaggcaatcttagaaaattacagactgtgtggtctatgaactgaatgtttgtgttcatcccaaactgatatgtggaaaccctaatccccaacgtgatagtatttggagacgtgcctttgggaggtaattaggtaattaaagccctcatgatgggattagtactattttttttttttttgagacagagtcttactctgtcacccaggctggaatgcagtggcacgatctcggctcactgaaacctctgcctcctgggttcaagcaattctcctgcctcagcctcctgagtagctggattacaggcgcatgccaccacacccagctaatttgttttgtatttttagtagagatggggtttcaccatgttggtcaggctggtcttgaactcctgacctcatgatctacctgcctcggcctcccaaagtgctggaattacaggcgtgagccaccacacccagccgcaggattagttcacttataagaagaaacaagaccaggcatggtggctcatgcctgtaatccaagcacttggggagactgagacaggaggttcacttgagcccaggagtttgaggccattctgggcaacataggaagaccttgtctctataaaaaatgaaaagttagctaggcatgatggcacgcatgcctgtagtctcaactatttgggaggctgaagcgggaggactagtggagcctgggagatggcgactgcagtgagctgtgattgcgccactgccctccagcctgggcaacagagaccgtgtctctaaaaataataataataataaaataaataaaaataagagagagtttactttccctctctgctttccgcaatgtgaggacacagcaggaagatggccatctgaaaactatgaagatggtcctccccagaacttgactctgctggcattctgacctcagtcttgacagcttccaggacggtgaaaaataaatctctgtcgtttaaaccacccagtctatgatactctgttatagcggccttaactgattaagacagtatgattctatttttttttttttttttgagacagagtctcactctgtctcccaggctggagtgcagtggcacgatctctgctcaccgccacctccgccccccgggttcaagtgattctcctgcctcaggctcccgagtagctgggactactggcgtgcaccaccatgcccagctaatttttgtatttttaatagagacaggacttcgccatgttggccaggctggtctcgaactcctgacctcaagtgatcagcccgccttggcctcccaaagtgctgggattacaggtgtgagccaccgcactcaaccagtatgattcaatttatataaactttttggaggccaggcacggtggctcatgcctgtaatcccagcactttgggaggctgaggtgggtggatcacttgaggtcaggagtttgagaccaacctggccaacatggcgaaaccccatctctactaaaaatacaaaaattagctgggagtggtggtgcatgcctgtaatcccaggtactcgggaggctgaggcaggagaatcacatgaacccgggaggcagaggttgcagtgagcaaagatcgtgccactgcaccccagccggggagacagagtgagactctgtctcaaaaaaaaaaaaaaaaaaaaaaaaaaaaaaggtgtgatttgggtttctaaggattcccagtgtgtcctcatcggtgaggacctctgatgcatggagaggtaagtgcagtggagagcatatccacaaaacagagatgaggctattgggatgctggagattacgtgacaatttatgagtgacacacagccaagaacagaaccaggactggatgcccatttcgtcattcaacaaatatttactgagcacctacaatccctcaaaaactgttctagagtctaaaccgatggggtcgtaaccatgcccccagcccactcccttgcaggaaagaccgtggctccaggtcccccacattactgattaaaaaaaaactccagtgctctggccatgggcgtgaaggcaaggacagagaccgggaggataatgaggccaaacagctttggcccaccgccaccgggactggcaaagaggccagacctcctaatgctcttccttggaggaaggagcagtgtttgatttggtcaagaggccaagactaaaagtaagaggataaacacgagctggctggacgcgaggctggctcagggcagtgctgtcgggctgaggattcagggagctggtgttgtccaagcttcacatttgcggaaactacaactcccagcgtgtcccgcggccgcccgagcgggcgtcatgtgatgcatgctcacgtgtctccgcagccggctcgggaaagaatcccccaaggtaggtggccggagacaggctctggagggtggaagtgttagatccccgaggtctgtggagcccctcagtccccgccaccgcggaaaagctcagaccctttccctgcaggggtccagatcctggcgtcctcgccccacgcccgtccctctgttgcgccagctctgccgcgcctttacccagccagagggtctccacccagtcctaggccgggatcgggtcccggagctcctccccaggttaccccacagtagcccacccttctcgctccaggcctgggaatcgccccgccccggcctcctggcccgggtgcgccctggctcacctcacaaagcctcacctcacaaagcagcccaccctttctatctcagggctccaaccccaggctggactgggagcacactccagttgggatctgaggggcctacatcgctggcctgagcatgtgggcatcaggcttctattctggctctgccagctacccactgtgaccttagtctaacctctccctcctgggcctgttttcctatctgtcctgaagctccatttcatgagtaagcgtgagagccgctcagtttcctccagctctgctgaagccagcacagaagtagcccaaactcttccctctgctgacagcaaattttaggcaaagtcttgagaaagaagaaattgggtccagaaagggaagtgaggagaatcagatcccagacctttggggagaaggagcaaccgcctctggcacagcccatcagggagaaagagcaggtaaggtgcaacaatgagctgagtaatttgccagtgagcagtgggggtgccgagaggtcttaaccaaggcagagaatctgcaagaggtgggacccccagcttctgagttccacgaggaccccagcctgcactctcatgtgggtggcaggagaggctggaggatggtgcaggactcgggcaggggtgcccaagggaaacattttggttggagagtcaggaagccgcaccaagc

SEQ ID NO: 7102 - DNA, 6000 bp, Homo sapiens
ccagcccaccctcaccctggtcccaccaaccatggtggccgatccctgaaggtcaggaaggggcctcgccgctagccgccagaggtcgagtggcagggccaggactcacagctgccagttcccagattagcccctggcacagtcagcagggtctccggtgccaggagcaggcaggggcggggcagtgttgggggcatcagatagacagcctgagtggggcacccggagccagggctggcactcctttcctcgatggccctggggctgggtcatgaccctcccaggacaggactggccaggcaaggtgggggccaaggtagccggtgggggccttctcccaggcagcggccaagaggaggggtctggagcagtttgccgacttggaggcagagggggttcctgtcctgagggctgggagacagctggataaacagcggggagcagggctggggacagggcagacgagggggagggctgactgcaccttgaggatcaccagagctgtgcttccagattgagatccctggctgagtgcagtggctcatgcctgtaatcccagcactttgggaggctgaggcaggaggatcacttgagcccaggatgtcaggccgcagtgaaccttgactgcactccagcctgcgtgactgagcgagacactgtcttaaaaacaaaaaaaaagccagcctggccaacatggtgaaaccccatctctactaaaaatataaaaattagccgggcgtggtggtgtgggcctgttaattccagctacttgggaggctgaggcaggagaatcacttgaacctgggaggcagaggttgcaggttgcagtgaggcgagatcgcgccgctgcactccagcctgggcaatagggtaagactccgtctcaaaaaaaaaaaaaaaatcaagatctgactcctgtcattcacaatcattgaaatacttttatgaatttatcttttttatttttttgagatggagtcgctctgttgcccaggctggagtgcagaggcgtgatctcggctcactgcaagctccccctcccgggttcacaccattctcctgcctcagcctcccaagtagctgggactacaggcgcctgccaccacacccggctacctttttgtatttttggtagagacgaggtttcactgtgttagccaggatgttctcgatctcctgaccttgtgatctgcctacctcagcctcccaaagtgctgggattacaggcatgagccaccgcgcctggccttatttaaagagacaatgtctcattccatggctcaggctggaatgcagcggtgtgatcatacctcacttgcagcctcaaccttttgggcttaagtggtccttctgcctcagcaggacctaatttttaaatgtgtcttgttgtagaggcgggcgtctcaccatgttgcctaggctggtctgaaactcctggcctcaagtgattctcctgcctcagcctctcaaagtgctgagattacaggtataagccacagcacctggccaaatttaaattttgaatttaagttttgaatgaagagggggttgaaatcttatttttttttctttttttttttttttttttgagacagggtttctctctggtgcccaggctaaaatgtagtggcacagtaatagctcactgcagcctcagtctcctgggttcaagcaatcctcctgccttcatccccctgagtagctgagaccacaggcacttaccaccatgcctcactaatttttgtattgtttatagagatggggatctcattatgttgcccaggctggtctcgaactcctgagctcaagcaatctgcctgccttggcctcctagagtgctaggattacagatgtgagccactgcgcccctcaaaatctttttcaattcaaagattctatggttgtaaagttttgttttttttgtttttgttttgagatggagtctcattctgttgcccaggctggagttcagtggcacaatctcggctcactgtaacctctgcttcctgggttcaagctatcctcctgcctcagccccactagtaactgggattacaggtgtgtgccaccatgcccagctgatttttgtatttttagtagagatggggttttgccatgttggccaggctggtcttaaactcctgacctcaggtgatccacccgcctcggcctcccaaagtgctgggattacaggtgtgagccaccccgcccagccagttgtaaagttctatagcagtggaattctagagtttttcaggcctatgacatctctaagatacgtggttcttacatcaatagatactaagattctaggctactaaaatgtcaagattgtttgggtctcatggttcatatttctttccaagactttggccaggcacagtggctcatgtctgtaatctcagaactttgggaggccgaggtgggcagatcacgtaaggtcaggagtttgagaccagaaacatggtgaaaccctgtctctactaaaaatacaaaaaattagccgggcgtagtggcagacacctgtagtctcagctactcaggaggctgagacaggagaatcacttgaaactgggaggaggaggaggttgcagtgagccgagattacgcgctgcactccagcctgggcaacagagcgagagaactgtctcaaaaaaaaaaaaacaaaaacaaaaacaaaaaaagaaaaaaaagttcataatgtgaagaccgaacgtttctgtgaccgtagatcctgttgtgtccggaattggtgagttcttggtctcactgacttcaagaatgaagccacggaccctcgcggtgagtgttgcagttcctaaaggcggggtgtccggagtttgctcgttctgatgttccgatgtgttcggagtttcttccttctggtaggttcgcgctctcgctagctcaggaatgaagctacagaccttcgcggtgttacagctcttaaggcgccgcgcgtctggagttgttcatcctgccagtgggctcgtaatctcactggcttcaggagtgaagctgcaaatcttcgcggttgagtgttacagctcataaaggcactgtgaccccaaagagtgagcagcagcaagacttactggaaagagagaaagaacaaagcttccacactgtggaaggggacctgagtgagttaccactgctggctcccgcagcctgcttttattctcttatctggccccacccacatcctgctgattggtagagtccagtggtctgttttgacagggcgctgattggtgcgtttacaatccctgagctagacacaaagcttctccacatcctcaccagattagctagatacagagtgtccacacaaaggttctccaagtccccaccagagtagctagatacaaagtgtcgattggtgcattcacaaaccctgagctagacacagagtgctgattggtgtgtttacaaaccttgtgctagatacagagtgccgattggtgtatttacaatccctgagctagacataaaggttctccacgtctccaccagactcaggagcccagctggcttcacccggtggatcccgcacgggggctgcaggtggagctgcctgccagtcccgcgccgtacgcccgcactcctcagcccttgggtggttgatgggattgggcgccctggagcagggggcggcgctcgtcggggaggttcgggccgcacaggagcccacggagtgggggaggctcaggcatggcgggctgtaggtcccgagccctgccccgcggggaggcagctaaggcctggcgagagaaatcgagcgcagcgccggtgggccggcctgctgggggacccagcacaccctccgcagccgctggcccgggtgctaagcccctcattgcccagggccggcagggccggccaggctctccgagtgcggggcccgccgagcccacacccacctggaattcgcgctggcccgcaaagcaccgcgcgcagccccggttcccgcctgcgcctctccctccacacctccccgcaagctgagggagcccgctctggccttggccagcccagaaaggggctcctcaagtgccgccaaagtgggagcccaggcagaggaggcgccgagagcgagcgagggctctgaggactgccagcacgctgtcacctctcactgtttgtctgtagggttgatggttctgtgtcgctggcctcaacctcaggacaggacatgaccagtgtcccccctggatagcagccaggggccgtgccaggtgtggagactgaagatgtggccagcaggaccctgctcagtggagctgcctagaagcaccagagtgccccagggccaggatggaaccatcaaagccggccagagggccctgtgcccagggtaggtgccttctccctatgagccgcctaagggcaagccctgcctcctggtctgctccctgccctcccccagacaggctcccaagttaactggcaccagccagtccatgaggggcccttgtagagagcggggcccagagaagtctgtagggactaggcaatccaggaaagcttcctggaggagtagggtgtttggaatcgcgtgctatttgttcactttgtcgtgtgcgctctaacggcctgtgttctccatcacagtttatcttattccctgctgcactcagcacagtgcctggcgcgcagtgggaaccgaatgaccccctcctattccttatgtcagttgccttttgtctgtttctttcatcgtaagcaggaatctgtccggttcgcggctgcttcccaggcgcccagaccagcgaccagcaccgcgtaggcgctcggcacagaccgagaacggaggccccacgcgggggcgccctgcggcgaggcgggtcccggccgcgcccggcggagccggggaactacaagtcccatggtgcatcgcggcgccagcgcgcagacgcagccgccctcggcgtcctctgtagcgggcgacctaggccgcgggacccggacggaggtagaggccagggcagcgcgtccgggagcggagtccgcgcccgccgccgccatgccggacagctgggacaaggatgtgtaccctgagcccccgcgccgcacgccggtgcagcccaatcccatcgtctacatgatgaaagcgttcgacctcatcgtggaccgacccgtgaccctcgtgagaggtacgaagccccagcccggggctccctcgccggcctctggggacccctggatcccacaccctgcctggatcctccaatgcctccggggtcccgtctgcctgagaccgccccccgctgcaccccggggacaactccccacccccggagacctccgagctccgtcgcctcctttggcctcccactgcaccccggacctcacctcccaggatcccttactctcccctgcaccccgggatgccccgcttcttcccaggactcttccctccctgccgcacccagcgcccactgccccaggaccccgcactgctctccgccccccgccgccccgggcacccctccactgcaccgctggcctcaggcctctctcaaatgtctctctgccggatgaccaagtgtcggggtgatggccgagatgcccaaattcagcatctctggaacgaaccgggaaaatgcccagttcagtttttgttgtttttttttttcctgagacagtctcactctgttgcccaggctggagtgcagtggcgcgatctcggctcactgcaacctctgccccaccccgggttcaagcgattctcctgcctcagcctccccagtactaggattacaggcgcaccaccaccacgcccagctaatttttatatttttagtagacacggggtttcaccatgttggccaggctggtctcgaactcctgacctcaggtgatcctcccaccttggcccccaggtgctgggattacaggcctgagccaccgtgtccagcctggttcagttctttttgaacacttggggtgcatagcatgctctggtggttcttccgtaagagggtgaagtctccaaat

SEQ ID NO: 7103 - DNA, 6000 bp, Homo sapiens
tcctgcctcctcagcctcctgcgtagctgggactacaggtgcacaccaccacacccagtttttttttttttttttttttcctaatttttgtagagacagggtttcaccatggtgcctaggctggtttcaaactcgtgggcccaagtgatctgcccacctcggcctcccacaatgctgggattacaggtgtcagacaccatgcccagccccatctctgggttcttaacccacacagtctcctgcagctactgtggatgaaaagcaagccaggtttgtgagaaccgtgactcttgggagatagaaacaaaaccagagagagagagagagagggagagagagagagaaaaactgtagttttccctctttgaagccacactaaagagcaagaataagccttgaaatcctcagagtcaactaaatgccaggtaggcagctcatggttaacttaggggattttgggagagctagggaggaaactgattgctcagagagactgagacttgcccaagggctcactgttgctaagtcaacaaatgtatcttgtcttaacagggactctttctcccaggcttgcatgttgcctagaaaagcttatttcagttttgaggatttgctcttttcaattcttgcaacaaatagcaacatttgagttgttagggatgtgggtaggcaaaggtgtgttattaaaagtctgcagaaaatctaggaagaaatcacatcttgagccctctaggagaacatgcgacccaggaatacagattccaaacagagccccgtgcatcatttgacacaccccgcattttagctattttgttgcttttgaatttaccaaaccttacaagtcatcagagtttctattaaaaacaaaaacaaaaacaaaaaaaacccagacttagatttctcttgcaaaaggaatgctggcaacataagacccacgttcttacgtggtgacaatgggctggaactaaaatctgggagacagactcgcaataactgtatttgctcagtgtatttgctctgtatgaattcactgtttgtatatttgctcttttttttgagatggagtctcactctgtcacccaggctacagtgcaatggcatgatctcggctcactgcaacctccatctcctgtgttcaagcgattctcctgcctcagcctcccgagtagctgggactacaggtgcaccccaccacgcctggctaatttttgtatttttagtagagacagggtttcaccatgttggccaggattgtctcgatctcttgacctcatgatccgcccacctcggcctcccaaagtgctaggattacaggggtaagccactgtgcccggccatctgctctcatttttaaagatataatttacatacaataaaatgcatgagtcagccaggcgcggtggctcatgcctgtaatcccagcactttgggagggtgaggcaggagaatcacttgaacccaggagacagaagtttaagtgagctgagatggcgccattgcactccatcctgggtgatagagtgagacttggtcaaaaaaaaaaaaaaaagcataagtgttcatccttcaattcacggggttttaccaattgtatataccgtataattaccacccaattcaagataatagaaatttccatcacctctgagagcacactcccaccctcttccagttgttcactgggtcctgttctttgacttctgtcaccacaaatccatctttcctgttcttgagcctcacataaattgaatcataaggtctgtactcttttcatgtcagctttttttttttttttttttttttttttttgagatggagtcttgctctgtctcacccaggctggagtccagtggcgtgatcctggcttactgcagcctccacctcctgggttcaagcaattctcctgtctcagcctcacgagtaactgggaccacaggcgcacaccaccacagcaggataatttaattttatatttttggaagagacagcgttttacaacataggccaggctggtctcgaactcctgacctcaggcgatccacccacctcggcctcccaaagtgctgggatcacaggtgtgaccaccgcacccagcccaggtcagctccttttgctcagcataatgtttcgtagagtcttcgattcatccgtggtgttgcgtgggttgggtagttcattcctttcgatgaaagtttttcacggtgttggatgcaccgcagtttgtttcttcactcacctgtcgatggaactggtgttgtttccacttagaaacagttttgaataaggccaccatgaacacttgtgtgcacaactttttgggaacatatgtctccatttctcttgataaatacctaagagtgaaattgctgggtcatgggggaggtgtatggtaactttatttatttatttatttaattttattttttagatggagtttcgccttgtcacccaggctggagtgcaatggcacggtcttggctcactgcaacctccatctgcctcccaggttcaaatgattctcctgcctcagcctcctgagtagctgggattacaggggcccaccacaacacccagctaatttttgtatttttagtagagacgagtgcaggctggtcttgaactcctgaccttgtgatccacccaccttggcctcccaaagtgctgcgattacaggcatgagccaccgcgctcggcaaagtgtatggtaactttataagaaatgtccaaatagttctctaaagtggttatacagttctttttttttttttttttttttttgaattgagatctcattctgttgcctcgagtgtagtggcactatcatggctcactgcagccttgaactcctgggctcaaacgattctcccacctcagtctcctgagtagctgggactacaggtgcacactgctatgtccatctaattcttcctattttgtgtagagatgagggtctcactgagttacccagactggcctctaactcctggcctcaagagatcctcctgcctcagcttcccaaagctctgagatgatagcatgagcccctgcactccacctctcctattctttatagcactgagggtaaaaatgaaaaacctgacagagaaacaatcggaggtgacaagccaagggtcgagcaggccacatctggccctcaaggatgcgtaatcatgaaactttgcagaacttctctagaacaatcagaagttctgaccccattgggcctgtcttcccccacgtggagctgggtcgtggctgtcctcttcagctgggacacatgctctcgggtcagcctcagctccacctgcccggcttcactcactaccacgcctcttctgtagacaccctgcacatggctaaggctccccagacattcccaagaagtcaggactggaccccaggttggcgaagcagtgcaccctcggtggcaccccactgcctttcctggtgctgtggcctctgctgcagatcacagattcatggccttctgtctgtccctcttctccaatcccagctgttccttctgtaaatctgtcccccagggcaggtccctcccccaaaggccccattcatactggtgttggtcagtcacccagtgtttgctcacccaggccaccctttatccagtcaagccaccctccactgctcctgcaggactctagagccaggtggcctgggctgaaatcttgctgtgtcacttacaacccgggtgatcctgggccgatgactcatctcctctacctctgttacctcgtcagtaagatagagataacaggacctaacttcgagggttgttggaaagaccaagtgagtaaaggcatgttgtgcccttagagcctggcacgtgttcatcactgctattatttctggctactcggtgccaggacaggggcctcagctgagggccccccagagcctggcaggcccagtgaaggagtgagatggggaggccacgactcctccccagtcagcagctgtcctgtggccatgggggcctggtgaggccagatcttcaggttgttctagaaaagtgagtattctagaattatgtttcaagcctcttggtttgcaaatactagtaactatttttaaaatgttttggtatttggcctggcacagtgtttgacccctgtaatcccagcactttgggaggccaaggtgggaggatcacttaaacccaggagttggagaccagcctgggcaacatagcaagattctctctctaccaaaaaaatgaaaaaattagctgggtgtggtggtgcacgcctgtagtcccagctactcgggaggctgtggtgggaggatcacttgagcccaggaggatgagcctgcagcaagctgtgatgccaccactgcactccagcctgggtgacagagtgagatcctgtctcagaaataaaaagtaaataaagttttggatgctttgagcatctggcagaaatcttcgctatgccccgctgatgtcctgggcccgatgtgggcgcctggccatggctcggtcactcctgacggtttttcagggcctcagacacctcttcttcttcttcttcttctttttttgagactgattttcgctcttgttgcccaggctggagtgcaatggtgtaatctcggctcaccacaacctccgcctcccggattcaagtgattctcctgcctcagcctcccgagtagctgggaccacaggcatgcaccaccatacccggctaactttgtatttttagtagagatggggtttctccatgttggtcaggctggtctcgaactctcgacttcaggcagacacctgttctttgccatgcctctgtctgaagagtatatggaaaggggttgcacaagcaatggttgctgttcctgttgctgccactgcggtgagggctgtggctggacgtccctcctggcactttgcctctgtcccctccatccgccgccagcatttttcctcccctccccttcctccagctcgtcccaagcctgcctgtccccagcgtggaggcgggacagtggaagactgggtgagtgaagcaggatggtgccttgggctccagcgtctccccaacccctccatgccatgggtccccacgcaggtgaggaccctggtggaggacggtgtgggcagagcgtgggacatgtcaccttccccacctgctcagagttcaagggtcctgggctgggccccgttctctcttctgccctggggagatcattcacgcttcctttaatccccgctgcagctgaggctggagtttggagtttgacccgcttggaggctctctcagcagcgggcatataggaggaagggtcactgctgtctccggaagctcttggctgcaaagagagaggatcccgggtatctccctccttacaaccaccgccacctcctagtgccttagaagccactgacagcccccagggcaggtgagccctgcatctggaataaggtaagacaccccctgcccccaaacaggtagccactctccaaactgggaagttggtctggggacaggtgctggcagaaggactccagctgtcacctgtggggcaggggaagctcagccctctctgcagagaaagcttgtcatacaccaggacaatggagtgtgtttgtggggtgggcatggtggtatgaagccagcagccggcagccagcagcaccgtacgtgggtcccagctcttccacttaaccaaggtcagggacattgagccaaacattttgcctcaccgagtctcaggttccttatctgtcaaatgggaatatgaacctcaggctgacccaccccacaggtgtgttacccagagataacgaaggtaaatgtatccacataagcattaaaaagctataggaatgtatttactacaactgcagctgctgttaactacaaggcaaatacaagtcttcactggtacgtgtcagacacgtgcagagaactttacgcctggatctcatctaactgacacagaaaccctgtaaggtaggtacagcaccccctaattcatgga

SEQ ID NO: 7104 - DNA, 6000 bp, Homo sapiens
gaggggggttttaactgcttcttgttcagagaataaaaattggtgtctgaatgcccagttttgcttctcatgagggactgaagtactaaagacaattgggccaatttaactgagatggcctaaaagtcacccctggtttcatctccattgctagtgtggaagtcatgcttgtattaaacatattcacagaggacactgtattagggcagaacctaaaaagatgaaggagtattttttgtcttattcttagatgtgtgggctctgcctacatcgaggaaattcagaaggatatcacaccctgtgtgtcctccacaaaagatcttcagacacccacaggctcacacatgttcttcactgtgtctagtcctggtctggactattgtgagaagaccttgcatcgtagggagctacatgtgatgggcctctcagcatcacacatttttcaacacaaaagccaattaattcacccgctcaaaccaagtcttctaagcacctgccgtgctccagaccctgttctgagcacgcagcagtaaaaatacagaaatgagcttacattccagaggaagagacagacaacaagccaacagatgtaatcactcattaattattgctacaaaacaaattacctcaaaatataaagcaattgtttattttcaggtcacatacctgctgatcagctgagctgggcaaatttggctgggcaagcatctgtgggcccatgaggggctcatatttcctcctaggaccggcgggatagcccacaaatgctcttttcaaggcatcagtaggagcttttgcgagagtaagctaaaacacagagggtctcttgggacctgagcttataactggtaccccatcccttctgcttcatttcatttgtcacagaagttgcatggctaaacccaaggccaaggggcaaagggcacagatgcaggttggagtgaaggattgagatgacaacgcaagcaacaatgcgtagcagaaggtcaagtaacatagggggccaggaagaaacacgaagcagtgtttgtggcttaagagtgatcaggaatgctacttttggtcagcattctggtagccagggagacttgttgtaggacggtgcattgtcctaatcttgggtgtttttagcaggtgttcccattgtagggagtgagacattagcatgaaggtatgttgcagtgctgtgtgatacaggcttccctgcatgctgtccaagtgggtctctgttatccaggtccccagacacgcctaatcactgggttgttgcataagggctcctagctggattaatcccgctctatacaaatgcctcatcatagcagcacattgaaagcataacaaaatttgaatacattatctctgccggactatatgccagtcactccctccccccagcacacacacacccatgtgcttatatgcatacacacaggaacatgcacgcactcacacagccacatccacccactgtggaatgccttcatcaacatcagccaaggacaggaaacaaactcaacccttggcacccacaggaggcagctactggctgttggattattccctccgtgccaaagctaggctgatgcgtctggaaaaggggtgtgaacctcgaatgtgtctaaaggcagacacagcttcttgaggagcccacagatgctacagcagctggggcttggtcgggggatgatacggggtaggcggtggagtggggatacgtagggctcaactttagtatttatttgccacatcaatcaattaatcagccaaaaaacccttattagggaactgaataaaaagcaaagcaaaacgaagaatggatttcttcttcagaagccttttatcattggaatgaaataatttttcttctgtctttgttggacaaaatatgatctcttgttctttgttgaagtgcacgttctctgaaagtcgagaggaatagatgatagaggggaagagaaacatcaatatttacaacagtcctgggagtgttatcatgttatcattcgcattttattgatgacatactgagtcttagggtaccaaactgacttgcctcatatatgtggaatctgaagatctcagttcaggtctaatctttctgacaaatctttttccaccttagtaggcttggcatgttttgaacctcgtgggattacagaagtgagcctcaatgcctagggagactccagaagacaactcctctcattccttaaaagccaatctgtggggattgaggtgaggaaggagtgaagactggccctttgggcacacccacctggaatcaggcaaggtttactggagccactctgcctgccagcagaacagcccaggaaaaaagcctgggacctttgcaaatgcctgagcaggactttgcaggggacagagtcagcaggattttcaccaaacgacatccatcttaattggtagcatcagactcatgaggtcttctatggcctgggcatcacagactctcattactggtcgtactgccaatggcctccttttatatatagttgatgaatttgaggacaaaccagagaattgcccttggccaaaccaagctgtctcacccaagatttttcccctccttggggaaatactggggcaaaaagcacgtccagggaaaccaatctgcctgacactggcaattaaatgctccaggcttgaagggacatggcacttttgcacatggctcattggctagatgtacacacactgccccaccccagcaacaagggggccagtaaatgcaatcccaccatgatcccaaaaggggaaaaattggaaatatttggtcatcagcactaaggacaagggaatggggagaccacagaaggccagcagaactgtaaaactgacagcaccgaactgtccttagaacacagccttgaaaactccctcttctgagggactgcttcccttaactgagctgctgcagatggaaacctagctagatcctcatcttctgcagtctagtccctcactgtggtttatcacctcccaagctgtcctctgctctctttccctatctttgtgttgctaagccatggactcagtttagctggccctgaattacaagatggcaccttccctggagtggagaaaagtccggatatttcaggatgccttgatttgaagcctgtttgactccaaagttctctggtttactcccacctgtgggaaacgtgaggctagatctccacacacatggattccaaagtgtcatgatctgtgacgtcatctgtcggaccgtattgatcagaggctcagggacagatgaccctatttaggcaaggaaatgagtgggtgaagcagcaagattcacctttcccagtttcatctgggggttgttttgccaacattgccatctgttgggccagtgctggctacagcagccaagcttcagacatcactgcatctttatcaatgaccttgggaccacaggaggtgaccttctgaccaaacagcagccaatgaaggaatcttaaaaggcacatcactttatatttattcagtggttatgtcatcacttaatcctcaccacaaccttgtgagttcagtagaatttgtgttttcattttatctgtgaacaaatggaggcagagagtttgagtaatttacaagtaagtggcagatccgggggctgtgcctagacaatgtggctccagactccttgcccctccctgccttctgctgcatcttgattgagtctagccatctatttctttaacacacactaattgctgtctccatgttccaggccctgtgccagatgctagaaatacatccccatccactggatcttggcatggtccattgctcagtgtcctgctatgttacgtgttacataatgcatttattccggtatttagcccatggaaaataatgctgaaagacattgtatgcatgtttctacaacaaaactatgtaacttatgtttcttttattgctttggctatcaggaagctcttatccaaatcagagcaaatacattagaatttgggcttgtcatttcagtttgctgaacttttccttctggcccagattttctattttggttcataaattctattgcacaaatgtcctttattgtaaaacaccttaaattctttctaagggaaggctgcatggaaatgatacagtaaggtcttccctgcattttcttagattcctattagggaaggcagacctagatgtccctcttaccctcagtcccaaagccccccatttataaaatcccttaagcagtgactactgctgttctgagtacctggaggtagttcagagcttctgaaaggtaacatccatatacaaaaagaagttccttccgatccagatcccagctttggtgccagatgcacatttgaggagtaggtggctagtcagactctcacctgagcagttaataaaatctattgccccttaatggaattttttctgcaagctcgaattgatctgtcatctttgtgatttgtgagatggcagggaagcaccaaacaccatcatgacttgggccacagtggggggaaaaaaggaaaaaagaaaaaaaaaatccactgccaagccttgccaggcgtagaaagggctggaactgctggggccattttatctgatttattggaaatagagtggatcttattaacattttaataaagagaatctttttgcactaggctggaagtggccgccagtcccccgtgcaattccattctctggaaaagtggaatcagctggcattgcccagcgtgatttgtgaggctgagccccaacagtccaaagaagcaaatgggatgccacctccgcggggctcgctcctcgcgaggtgctcaccccgtatctgccatgcaaaacgagggagcgttaggaaggaatccgtcttgtaaagccattggtcctggtcatcagcctctacccaatgctttcgtgatgctgctgctgatctatttgggaagttggctggctggcgaggcagagcctctcctcaaagcctggctcccacggaaaatatgctcagtgcagccgcgtgcatgaatgaaaacgccgccgggcgcttctagtcggacaaaatgcagccgagaactccgctcgttctgtgcgttctcctgtcccaggtagggaagaggggctgccgggcgcgctctgcgccccgtttctgcattcggatcgcccggcacgggcagggtgagggggctttcggggggtcggggcctccggtcgcggcggcgaagacagatcggggctcggtagggaggtcattccgagcccagagatcctaggcaccccccacacacaggctcccactctggcgtgcgtgtgtgtgtgtgtgtgtgtgtgtgtgtgtgtgtgtgtgtgtgtacgttcgttaacgggaggaggagagagctcccagtccttttttgctagcaggggcgacattctcgcccacatcaagtggggtaactttggttccctcctccggaggctcggtgcattggagaaagactcagttagaggcgactccaacgagccgcggttttccccagcccaacgcccagcggccgaagcgctgctcgggtccggattgcgggatgcggggctggagaggccgagcaggcaccaccgacttcccagggcgcccgggccccctggtacagcccggctgcccgctggaaggcgcctcggggcagcagagagcctcagcccggctgctgctgtcgctcaaaggcgccggcgccggccgcacccgcatcggggtccttttgctcccagaccccgggcccgaaagggccggagcgtgtcccccgccagggcgcaggccccagccccccgcacccctattgtccagccagctggagctccggccagatcccgggctgccgcctctgctgccttccctgagcgggagcggagcgcagagaaaagttcaagccttgcccacccgggctgcagctgcttgttaaccctcagagcgccacggcgcgagggaagggcacgccaaccaggagagggggcgaggga

SEQ ID NO: 7105 - DNA, 6000 bp, Homo sapiens
actgcaacctccacctcccaggttcaagcagttctcctacctcagcctcccgactagctgggactacaggcgcatgccaccacacctggctaatttttttgtatttttagtagagacagggtttcaccgtgttagccaggatggtctagatcccctgacatcgtgatccacccgcctcagcctcccaaagtgctgggattacaggcgtgagccaccgcacccggccaataaaataatttttaaaaggttaaacatagagttaccatctgatccatcaattccacttctacatgtatacccaagagaaatgaaaacatatgtccacacaaaaactagtccatgagggaggccgaggtaggcggatcacccaaggtcaggagctcgataccagcctggccaacatgatgaaaccccatttctactaaaaatacaaaattagttgggcgtgggggtgggcacctgtaatcccagctactcgggaggctgaggcaggagaatcgcttgaacccaggaggcagaggttacagtgagccaagatcatgccattgcactccaacctgggcaaaaagagcgaaattccatctcaaataaaacaaccttgtacatgaatgttcacagcaccattattcacagtagccaaaaagaaaaaataacacaaatatcaactactgaacagataaaaaaatgtggtgtaatgagaaaaacactgaattgtacgaaaaaccttcccccaaacttggaggcagttgagagaccagagaatgactcaggcaagtccagcttggcgagtagatgagtttgaggacttacatacgggacactccttgacagcagcaggacagtgctagagatccgcgccacctcccatctctaagccatttttaagctaattttctagctctttgcctactgcgtgtatgcagtgggactgttttccttggtagattctcagatcctctccaggatgtttgagttctcaggaatatctgctcctaggctgggcaccatggccttggctcaccacccagcattcaggattcaagcagtggatatacacctccaagtaacctgatgggggacctgccacactacatgtggtatagccatacaacagaacattattcagcaataaaaatgaatgaaatactggttcatgttccaactaggatgagcactgaaaacagtatgctcagtgaaagaagcagacagaacaggtcacatattgtgtgactcaatttatatgaaaggtcaagaataggcaaacccacagaagcaaagagtagattcagagttgccaggggcttggtggagggggagatgggaagtgactgctaatgggttcaggattttagtaggggagggtgatcacaatattctgaaattagatagtggtcatcattgcacaactctgaagaaactaaaatgcaccttattggactctttcaaagggtggattttatggcatacgaatatctcaacaaaactattcttattttttaaatttttttttccaaggcagagtctcactctgttgcccaagttggagtgcagtggcgcaatctcggctcactgcagcctccacctcccaggttcaagtgattctcgtgactcagcctcctgagtaacagggattacagacatgcaccaccacacccagctaatttttgtatttttagtagagacaagagtttcaccatgttggccagactggtctcgaactcctgacctcaaatgatctgcctgcctcagcctcccaaagtactgggattacaggcatgagccaccatgcctggcctcaataaagctatgttaaaaaaaaaaaggcagacaattcaaatgtccttcaaagagtgatgggtaagtaaactgtggtacatacataccactgaatactactcagcaataaaacctatctgtgttgacgtatatagcttagatgaatctcttctagggaattttactgagttaaaaaaaaaaaggcaatcttagaaaattacagactgtgtggtctatgaactgaatgtttgtgttcatcccaaactgatatgtggaaaccctaatccccaacgtgatagtatttggagacgtgcctttgggaggtaattaggtaattaaagccctcatgatgggattagtactattttttttttttttgagacagagtcttactctgtcacccaggctggaatgcagtggcacgatctcggctcactgaaacctctgcctcctgggttcaagcaattctcctgcctcagcctcctgagtagctggattacaggcgcatgccaccacacccagctaatttgttttgtatttttagtagagatggggtttcaccatgttggtcaggctggtcttgaactcctgacctcatgatctacctgcctcggcctcccaaagtgctggaattacaggcgtgagccaccacacccagccgcaggattagttcacttataagaagaaacaagaccaggcatggtggctcatgcctgtaatccaagcacttggggagactgagacaggaggttcacttgagcccaggagtttgaggccattctgggcaacataggaagaccttgtctctataaaaaatgaaaagttagctaggcatgatggcacgcatgcctgtagtctcaactatttgggaggctgaagcgggaggactagtggagcctgggagatggcgactgcagtgagctgtgattgcgccactgccctccagcctgggcaacagagaccgtgtctctaaaaataataataataataaaataaataaaaataagagagagtttactttccctctctgctttccgcaatgtgaggacacagcaggaagatggccatctgaaaactatgaagatggtcctccccagaacttgactctgctggcattctgacctcagtcttgacagcttccaggacggtgaaaaataaatctctgtcgtttaaaccacccagtctatgatactctgttatagcggccttaactgattaagacagtatgattctatttttttttttttttttgagacagagtctcactctgtctcccaggctggagtgcagtggcacgatctctgctcaccgccacctccgccccccgggttcaagtgattctcctgcctcaggctcccgagtagctgggactactggcgtgcaccaccatgcccagctaatttttgtatttttaatagagacaggacttcgccatgttggccaggctggtctcgaactcctgacctcaagtgatcagcccgccttggcctcccaaagtgctgggattacaggtgtgagccaccgcactcaaccagtatgattcaatttatataaactttttggaggccaggcacggtggctcatgcctgtaatcccagcactttgggaggctgaggtgggtggatcacttgaggtcaggagtttgagaccaacctggccaacatggcgaaaccccatctctactaaaaatacaaaaattagctgggagtggtggtgcatgcctgtaatcccaggtactcgggaggctgaggcaggagaatcacatgaacccgggaggcagaggttgcagtgagcaaagatcgtgccactgcaccccagccggggagacagagtgagactctgtctcaaaaaaaaaaaaaaaaaaaaaaaaaaaaaaggtgtgatttgggtttctaaggattcccagtgtgtcctcatcggtgaggacctctgatgcatggagaggtaagtgcagtggagagcatatccacaaaacagagatgaggctattgggatgctggagattacgtgacaatttatgagtgacacacagccaagaacagaaccaggactggatgcccatttcgtcattcaacaaatatttactgagcacctacaatccctcaaaaactgttctagagtctaaaccgatggggtcgtaaccatgcccccagcccactcccttgcaggaaagaccgtggctccaggtcccccacattactgattaaaaaaaaactccagtgctctggccatgggcgtgaaggcaaggacagagaccgggaggataatgaggccaaacagctttggcccaccgccaccgggactggcaaagaggccagacctcctaatgctcttccttggaggaaggagcagtgtttgatttggtcaagaggccaagactaaaagtaagaggataaacacgagctggctggacgcgaggctggctcagggcagtgctgtcgggctgaggattcagggagctggtgttgtccaagcttcacatttgcggaaactacaactcccagcgtgtcccgcggccgcccgagcgggcgtcatgtgatgcatgctcacgtgtctccgcagccggctcgggaaagaatcccccaaggtaggtggccggagacaggctctggagggtggaagtgttagatccccgaggtctgtggagcccctcagtccccgccaccgcggaaaagctcagaccctttccctgcaggggtccagatcctggcgtcctcgccccacgcccgtccctctgttgcgccagctctgccgcgcctttacccagccagagggtctccacccagtcctaggccgggatcgggtcccggagctcctccccaggttaccccacagtagcccacccttctcgctccaggcctgggaatcgccccgccccggcctcctggcccgggtgcgccctggctcacctcacaaagcctcacctcacaaagcagcccaccctttctatctcagggctccaaccccaggctggactgggagcacactccagttgggatctgaggggcctacatcgctggcctgagcatgtgggcatcaggcttctattctggctctgccagctacccactgtgaccttagtctaacctctccctcctgggcctgttttcctatctgtcctgaagctccatttcatgagtaagcgtgagagccgctcagtttcctccagctctgctgaagccagcacagaagtagcccaaactcttccctctgctgacagcaaattttaggcaaagtcttgagaaagaagaaattgggtccagaaagggaagtgaggagaatcagatcccagacctttggggagaaggagcaaccgcctctggcacagcccatcagggagaaagagcaggtaaggtgcaacaatgagctgagtaatttgccagtgagcagtgggggtgccgagaggtcttaaccaaggcagagaatctgcaagaggtgggacccccagcttctgagttccacgaggaccccagcctgcactctcatgtgggtggcaggagaggctggaggatggtgcaggactcgggcaggggtgcccaagggaaacattttggttggagagtcaggaagccgcaccaagccttgtgaccttggacgaatcactctgtagacctctgtctctgtgacgtgagcagcggggaggagatggtcacagctctggcagtggtcactttgcagggttctttctctagctacactggaagcctgggagtcccaagactctgccttcgctgctcactgctttgattttgctgagttgctggttgggtgacaggatgtgtaagaggatgtgtaagccctgtgacatctgacagatctttctgggtttcgagccagcagaggaatgtttcctctggtgccatgtcccttggttccatgcttgataacagatggctgagagcacatgaactttcaccctttccctctcatgagtggatggtccccagctttgtttgtccatcatcaggaggagcaatgggaagtagtccaaggggtcttgttagtcattttaaacccccagtgggctgaaggcatcagagagggtggcccaatggttagggcagtcattatggctgaatatgctcagttccctttttttccctctgggctataaagactaaaccaggctgggggctgtggctcacgcctgtaatcccagcactttgggaggccgaggcagcaggattgcttgagcccaggagttcaagaccagcctgggcaaca

SEQ ID NO: 7106 - DNA, 6000 bp, Homo sapiens; identical to SEQ ID NO: 3267

SEQ ID NO: 7107 - DNA, 6000 bp, Homo sapiens
agggagagagagagagaaaaactgtagttttccctctttgaagccacactaaagagcaagaataagccttgaaatcctcagagtcaactaaatgccaggtaggcagctcatggttaacttaggggattttgggagagctagggaggaaactgattgctcagagagactgagacttgcccaagggctcactgttgctaagtcaacaaatgtatcttgtcttaacagggactctttctcccaggcttgcatgttgcctagaaaagcttatttcagttttgaggatttgctcttttcaattcttgcaacaaatagcaacatttgagttgttagggatgtgggtaggcaaaggtgtgttattaaaagtctgcagaaaatctaggaagaaatcacatcttgagccctctaggagaacatgcgacccaggaatacagattccaaacagagccccgtgcatcatttgacacaccccgcattttagctattttgttgcttttgaatttaccaaaccttacaagtcatcagagtttctattaaaaacaaaaacaaaaacaaaaaaaacccagacttagatttctcttgcaaaaggaatgctggcaacataagacccacgttcttacgtggtgacaatgggctggaactaaaatctgggagacagactcgcaataactgtatttgctcagtgtatttgctctgtatgaattcactgtttgtatatttgctcttttttttgagatggagtctcactctgtcacccaggctacagtgcaatggcatgatctcggctcactgcaacctccatctcctgtgttcaagcgattctcctgcctcagcctcccgagtagctgggactacaggtgcaccccaccacgcctggctaatttttgtatttttagtagagacagggtttcaccatgttggccaggattgtctcgatctcttgacctcatgatccgcccacctcggcctcccaaagtgctaggattacaggggtaagccactgtgcccggccatctgctctcatttttaaagatataatttacatacaataaaatgcatgagtcagccaggcgcggtggctcatgcctgtaatcccagcactttgggagggtgaggcaggagaatcacttgaacccaggagacagaagtttaagtgagctgagatggcgccattgcactccatcctgggtgatagagtgagacttggtcaaaaaaaaaaaaaaaagcataagtgttcatccttcaattcacggggttttaccaattgtatataccgtataattaccacccaattcaagataatagaaatttccatcacctctgagagcacactcccaccctcttccagttgttcactgggtcctgttctttgacttctgtcaccacaaatccatctttcctgttcttgagcctcacataaattgaatcataaggtctgtactcttttcatgtcagctttttttttttttttttttttttttttttgagatggagtcttgctctgtctcacccaggctggagtccagtggcgtgatcctggcttactgcagcctccacctcctgggttcaagcaattctcctgtctcagcctcacgagtaactgggaccacaggcgcacaccaccacagcaggataatttaattttatatttttggaagagacagcgttttacaacataggccaggctggtctcgaactcctgacctcaggcgatccacccacctcggcctcccaaagtgctgggatcacaggtgtgaccaccgcacccagcccaggtcagctccttttgctcagcataatgtttcgtagagtcttcgattcatccgtggtgttgcgtgggttgggtagttcattcctttcgatgaaagtttttcacggtgttggatgcaccgcagtttgtttcttcactcacctgtcgatggaactggtgttgtttccacttagaaacagttttgaataaggccaccatgaacacttgtgtgcacaactttttgggaacatatgtctccatttctcttgataaatacctaagagtgaaattgctgggtcatgggggaggtgtatggtaactttatttatttatttatttaattttattttttagatggagtttcgccttgtcacccaggctggagtgcaatggcacggtcttggctcactgcaacctccatctgcctcccaggttcaaatgattctcctgcctcagcctcctgagtagctgggattacaggggcccaccacaacacccagctaatttttgtatttttagtagagacgagtgcaggctggtcttgaactcctgaccttgtgatccacccaccttggcctcccaaagtgctgcgattacaggcatgagccaccgcgctcggcaaagtgtatggtaactttataagaaatgtccaaatagttctctaaagtggttatacagttctttttttttttttttttttttttgaattgagatctcattctgttgcctcgagtgtagtggcactatcatggctcactgcagccttgaactcctgggctcaaacgattctcccacctcagtctcctgagtagctgggactacaggtgcacactgctatgtccatctaattcttcctattttgtgtagagatgagggtctcactgagttacccagactggcctctaactcctggcctcaagagatcctcctgcctcagcttcccaaagctctgagatgatagcatgagcccctgcactccacctctcctattctttatagcactgagggtaaaaatgaaaaacctgacagagaaacaatcggaggtgacaagccaagggtcgagcaggccacatctggccctcaaggatgcgtaatcatgaaactttgcagaacttctctagaacaatcagaagttctgaccccattgggcctgtcttcccccacgtggagctgggtcgtggctgtcctcttcagctgggacacatgctctcgggtcagcctcagctccacctgcccggcttcactcactaccacgcctcttctgtagacaccctgcacatggctaaggctccccagacattcccaagaagtcaggactggaccccaggttggcgaagcagtgcaccctcggtggcaccccactgcctttcctggtgctgtggcctctgctgcagatcacagattcatggccttctgtctgtccctcttctccaatcccagctgttccttctgtaaatctgtcccccagggcaggtccctcccccaaaggccccattcatactggtgttggtcagtcacccagtgtttgctcacccaggccaccctttatccagtcaagccaccctccactgctcctgcaggactctagagccaggtggcctgggctgaaatcttgctgtgtcacttacaacccgggtgatcctgggccgatgactcatctcctctacctctgttacctcgtcagtaagatagagataacaggacctaacttcgagggttgttggaaagaccaagtgagtaaaggcatgttgtgcccttagagcctggcacgtgttcatcactgctattatttctggctactcggtgccaggacaggggcctcagctgagggccccccagagcctggcaggcccagtgaaggagtgagatggggaggccacgactcctccccagtcagcagctgtcctgtggccatgggggcctggtgaggccagatcttcaggttgttctagaaaagtgagtattctagaattatgtttcaagcctcttggtttgcaaatactagtaactatttttaaaatgttttggtatttggcctggcacagtgtttgacccctgtaatcccagcactttgggaggccaaggtgggaggatcacttaaacccaggagttggagaccagcctgggcaacatagcaagattctctctctaccaaaaaaatgaaaaaattagctgggtgtggtggtgcacgcctgtagtcccagctactcgggaggctgtggtgggaggatcacttgagcccaggaggatgagcctgcagcaagctgtgatgccaccactgcactccagcctgggtgacagagtgagatcctgtctcagaaataaaaagtaaataaagttttggatgctttgagcatctggcagaaatcttcgctatgccccgctgatgtcctgggcccgatgtgggcgcctggccatggctcggtcactcctgacggtttttcagggcctcagacacctcttcttcttcttcttcttctttttttgagactgattttcgctcttgttgcccaggctggagtgcaatggtgtaatctcggctcaccacaacctccgcctcccggattcaagtgattctcctgcctcagcctcccgagtagctgggaccacaggcatgcaccaccatacccggctaactttgtatttttagtagagatggggtttctccatgttggtcaggctggtctcgaactctcgacttcaggcagacacctgttctttgccatgcctctgtctgaagagtatatggaaaggggttgcacaagcaatggttgctgttcctgttgctgccactgcggtgagggctgtggctggacgtccctcctggcactttgcctctgtcccctccatccgccgccagcatttttcctcccctccccttcctccagctcgtcccaagcctgcctgtccccagcgtggaggcgggacagtggaagactgggtgagtgaagcaggatggtgccttgggctccagcgtctccccaacccctccatgccatgggtccccacgcaggtgaggaccctggtggaggacggtgtgggcagagcgtgggacatgtcaccttccccacctgctcagagttcaagggtcctgggctgggccccgttctctcttctgccctggggagatcattcacgcttcctttaatccccgctgcagctgaggctggagtttggagtttgacccgcttggaggctctctcagcagcgggcatataggaggaagggtcactgctgtctccggaagctcttggctgcaaagagagaggatcccgggtatctccctccttacaaccaccgccacctcctagtgccttagaagccactgacagcccccagggcaggtgagccctgcatctggaataaggtaagacaccccctgcccccaaacaggtagccactctccaaactgggaagttggtctggggacaggtgctggcagaaggactccagctgtcacctgtggggcaggggaagctcagccctctctgcagagaaagcttgtcatacaccaggacaatggagtgtgtttgtggggtgggcatggtggtatgaagccagcagccggcagccagcagcaccgtacgtgggtcccagctcttccacttaaccaaggtcagggacattgagccaaacattttgcctcaccgagtctcaggttccttatctgtcaaatgggaatatgaacctcaggctgacccaccccacaggtgtgttacccagagataacgaaggtaaatgtatccacataagcattaaaaagctataggaatgtatttactacaactgcagctgctgttaactacaaggcaaatacaagtcttcactggtacgtgtcagacacgtgcagagaactttacgcctggatctcatctaactgacacagaaaccctgtaaggtaggtacagcaccccctaattcatggacagagtctaagggtcattaaataacttgctcaaggtaatacagatagtgagtggccaagccaagactcaattcctgtggccatgagctcagccacaatatcagtgattttctttttctttcctttctttctttttctctttctttctttttctttcttttcctttcttttctttgttctttctttctttccttctttcttttatttctttccttattcctttctttccctttctttctccttccttctttccttccttccctccctcccacctctctgtttctctttcttttcccttttttctttctttctttctttcttctctctc

SEQ ID NO: 7108 - DNA, 6000 bp, Homo sapiens; identical to SEQ ID NO: 3661

SEQ ID NO: 7109 - DNA, 6000 bp, Homo sapiens; identical to SEQ ID NO: 722

SEQ ID NO: 7110 - DNA, 6000 bp, Homo sapiens
aaaaaaaagcagcattgggggttggtttgatcatcgccaagggcctccacagtttcaagatggcatgcctcaatgatcccaggtaccaggaaacatgacctctctccttagcatccagacatttccctgagacgcttttcccataggcacagactctgacagagtatctgtggagtgaatgatgagacttttgggcactcctggccttgggaagttggcctgacatggtctgacttcagggccatcaaagcactgtcttgagggactgctctgaccagtcacagctgagtgacagagattaagttggagccagcttccctgtgcaatggtgagtgagcctacaagaaagacatttcctacaggagacgcctggcttcctctggacatggaagctgccctcctatggtgagtgtgagaaggggcacccaatgtgcttcctcttggggtgcagcggtgtggccggcccaggtatgtggaagagctgctccttgttctttcacttagagaagtctttgtcggttctgttagccagggttctctagagggacagaactaataggatagatgtatatataaaggggagtttattttattttattttattttttattttttttgagacggagttttgctcttgttgcctaggctggagtgcagtggaacaatctcagctcactgcaacctccgcctcccaggttcaagtgattttcctgccacagcctcccaagtagctgggattacaggtgtacaccaccatgcctggctaattttttgtatttaatagagctggggtttcaccatgttggtcaggctggtcttgaactcctgacctcaggtgatccacccgtctcggcctcccaaagtgctgggattacaggcatgagccaccgtgcccagactaaaggggagtttattaaggaatattgactcacatgatcacaaggtgaggtttcacaatagacttcaagctgagaagcaaggaagccagtccgagtcccaaagctgaagaacttggagtccgatgttccagggcaggaagcattcagccccaggggaaagatggaggccagaaaactgaaccagtctagtctttccatattctgcctgcttttattctggctgtgctggcagctgattagacggtgcctacccagattgagggtgggtctgccagtccactgactcgaatgttaatctcctttggcaacgccctcacagacacacccaggaacaatactttgcatccttcaatccaatcaagttgatactcagtattaaccatcacagttgatatagctgctatgaagaagtttttcttatcatctgaaactctttgagcagcaaaattctgcttagcatcctaagctgcattgagaattaagcttggcagcatagatggagtaaggctgtcatgatcttatacacgctgtcacagtctctgcatgtatggtgaagttccaggtgcctgacacacgatgtgctccaccctggtgacatgtccaccccagtgcaactccagcctcctgtgcctatgtttagaggcacagtgtcccttccaatgaagggctgccttctttctctattcaaaagaggccgtatcagtttgatttatctttctataagtctgatcatgaataacttaaaaccctgaataccagtatttttcaagaaagacaaatccaatttcagggtcagcatcaatttatgagaatagcaagtgcagaggcatcatcagaatcccctatggatctaaaataactgtccgtgcttggccccacacctggagatcctgatggagtagatctagagtgggcataggcatctgtgttttattttctttatttattttttttgggacaaagtctcactctgtcactcaggctggagtgcagcagtgtgaacacttgggttgtcatcatgttgccccggctggtttcaaattcctgggctctcatcatgttgcccaggctggtttcaaactcctgggctcaagtgatcctcctgccttagcctcccaaagttctgggagtacaggcgtgagccactgcacccagccacatctgtattttaaaaagtcccatagataaaacccacatatccattgcaggagactggatacacaaagtgtggcttatccatgcaatagagagctagctgctcaacaataaaaaataaaaaagctgttgatacatgcaacaacacagaggaatcttctagacatcagggtaagtgaaaaaagccagtcaccaaagaatacatagtgtaaaattccacttatatgaagttcagaaaagggcaaaactaatacatggtattagaaatcaaaattgtagtttacactgaatggggggagtgggattgacaacaaagggacacaagaaaacttcctggtggtgatgaaaatactctgtacctcattttacgtgacggtctatgtggatacacacaatctcaaaagtaacaaactggctgggtgcagtggctcacacctgtaatttcagcctttgggaggccaaggccagaggatttcgtaaagacaagagtttgagaccagcatggacaacatagcaacacccaatggctacaaaaaataaaaaatttgccagatgtggtggcatgtgctaaccaccacaagtcctaactacttgggaagctgaggcagaaggatcacttgagcctaggagttcaagttaatagtgagctacgaccacaccactgcactccagccagggcaagagtgagaccctgtcaaaaaaacaaaacaaaacaaaacaaacaaacaaaaaaataaaaaaacaccaaaaaaccttcacaaatgaaacccttgagagatatgcattttattgtctataatttataactcatttaaataaaatggcctaacttcccctttagaccccaagccagagtcttgcatgggtgccaaggagtggcctaatcagttcagcccagccatagactcaagaaaggaaacattttcctgttccctgccttatattatacaatcccccattttaatttactttccagcatttccctcacgctttctctgtcttttggattaaaaaaaaaacaaaaacaaaaacccaggaaacccagcatagaacaaccagctcaataatgaatccatttgtctccacacactgtgcccctctcctgtctccatttcagcagccacatccacattcttggaagaagttcccctgcttccaggctacttcaaggtgcatgatgttgattgagcatctactatgtgccagaccttgttgacccctttattaaggctacttccttttcttttcaaaataatcctgagaagtagatgtttttactgccccccatttccagattagtgatcaataaagggaagtaatataatgtccaaaagtgatattttagtttgatccaggtgccatagcaaaacatcatcaacagcagaagtttatttctctcacttcttgaggctgggaggtccaagatgaagcagcagcagactcagtatttggggagggcctagttcctgttcataggccgatgccttcttgattaagtctcacttggtggaaggacctagctgactctctggcatctcttttataagaccacaaatcccattttactctcatgaagccatgaagtcacctcctaaagtccccacctcctaataccatcaccttgggagttaggattttatcctatgaatttgggggtgggaacacacacatttagaccgcagcaggtgacattaggttaagtggaggaggcagggttggaacagtcattgcaaaacctcttagaatttaagacccctttccttccaaggcctgaaaggcagacaggcgttggagatacaggtgaatataaaaggggcagagctcctcccttgaccatgtatttcatgcccagtcgctagaattcaagtcaaccaagccctcacacacccgggccgtcccatgttctctggctcacctcttctggtagcttagaagtggcagcctcagggaggcttctgtttggtagaacttagaaggaagcatgtgggaaatgcagatgtctttgcttttaggattctggctccctgagatcagaggagtgggttcccgtacgggggtggcgaggcacagggagaagcattggagcagactctgtgtgtgtgtgtgtgtgtgtgtgtgtgtgtgtgtgtgtgtcggcgcgcctgtgcgtggagggggataactgtacccagcgcgaggcactgggggaggaggaagcggtagcagagatctgaataattgattcttcagccgcaccagacgcccgggagcgggcggagagcgtggttccaacaccacggacagcagcgcgcgccgccgcaggcgcccccgtcgccagccagccacctatcctggccttatttgccgccgtgcgctctcggaacgggtggccgcgctccgcgtcgccgccgagggactgcggggtctgtctcgacccacctaggagagaggctgcgggcaggagacgctttcgcccgccggagctcgaagcctcttgggcttgagcgggggctactgcgtctcgccggctgagaacaagtccctaagttggtgtggagggcgccgctaccttccttctcctcttcctcggaggcgaccgcagcagaaagacgccccgggaacccggctttgccagtgctgtgaaccagggtgtccaggcgctcaccggactcccgctgggaagtggggagccgaacgcccggcgcggagctggcccagcagcgaagggcccggagggagctgcctttccccgcccgcgcctctctcggccggggaccgcggggatccccggccacacgcgagcgcgctcccacactcacacacacactcgccctcaaacacaccagcccggagctgggttgcggagagggtgctccggcgcgctcagaggaccgggcagttgccgtccggagtggggcaggaagcggagctagggatcttggaggggagctcctagggcttggccggatcatgggaccgggtgagcgctgagaatcgcggccgcagccatcagccctggagatgaccaggagcggccactgctgagaactatgtggagagaggctgcggtgagtgctagcgcgggacgccgggcctgggaggcccccttgggaaggggggaggtgggaggcctgaagagggaggaagcggcaggatcacaagagggtcgctgcgtgggaaagatccacctccctcggggaaccgggaccgcgggagcccgcgtccttccctccccctctcctactgctggctcgtcacaaactcagccagcgcccccccaccctcgttacctcctctttctctccctacctccctcgctcagcagctcccggtcgcacaactcccagcagccggcgctggggaggtggtagggggtgcgggtggaggtgcccagttagcttctcgtgggtggccaacctggggctcccattctcctgtgcaccctggagtggagctcccgctatcagccacaggggctgaggatccgcactgggggcgtcgtgggcatcgggcttcagcttcccccctcttgtctagcccccctgggcgcataggggggcttgtgagcactgcagactgcagccttcccctcaaccctccctcccctcgttggtgggctgaccctgcctctccttctctcctccgccccgttagagccctgctgcagagcctccggctgggatagccgccccccgtgggggcgatgcggacagcgcgggacagccaggggagcgcgctggggccgcagcatgcgggaacccgctaaacccggtggctgctgaggcggccgagatgctcgtgcgcgcagcgcgccccactgcatcctcgaccttctcgggctacaggtacgtcccagagggagatcagggctccttgggccggggaggagggagactcgaccggagggagagcgggagagggatcaggctagagagggagagggaaagcgggagggagcccagcggcg

SEQ ID NO: 7111 - DNA, 6000 bp, Homo sapiens
tgaggggagggggttgaacatcccgttgagtaaagggttaagtcagcatcaaccagtgatatttttaaagtgttcatcagagcttgtctctcgcctgcttaaaacactccaggccttggccgggcgcagtggctcacgtctgtaatcccagcactttgggaggccaaagcaggcagatcacgcggtcaggagatcgagaccatcctggctaacacggtgaaactctatctctactaaaaatacaaaaaattacccaggcgtggtggcgggtgccggtagtcccagctactctttgaggctgaggcaggagaatggcgtgaacccgggaggcagagcttgcagtgagctgagatcacgccactgcactccagcctgggcgacaaagcgagactccgtctcaaaaaaaaaaaacactccaagccttaaaataaaatgttagcccttctccatcattgtggtaggctgtataattgccactaaaagatgtatcagtggctcatgcactttgggaggtcaaggcaggaggattgcttgagctcaagttcgagaccagcctgggcatcatggtgaaacccagtctttacaaaaaattggtgagtcatggtggctcaaggacctgtggtcccagctactcaggaggctgaggcaggaggattgcttgaaacctggaggcggaggttgtagtgagccaggatggcaccactgcactccagcctgggcaacagagtgagaccctgtctcaaacaaacaaacagaacagatcctaattcttggaacctgtccattttaccttataaagtaaaaaggtctttacagattaagtgactaaattaagattctttttctttttttttccttttgaaacagggtcttgctctgtcacccaggctggagtgcagaggcaaaaacatggttcactgtaacctcaacctcctggggcttaagcaatcctcccacctcagcctcctaagtagctggaaccacaggtgtgcaccgccacgcccggccaattttttttttttttttagagacaggggtatttgctgtgttgcccaggctggtctcaaactcctgagccaaacccatcctcctgccttggcctcccaaagtgctaggtttacaggcatgagccactgcgcccagcctcaaattaagattctttatttgaggaaaactattctggagtatctgggtggccctaacacaatcacaagtgtccttataagagaggcagagagagatgttatacatacagaaaaggaggaggccatgtgacgtaggaggcagagacagggttgatgcagtcataagttgaggaatgccagcaggccccaccagggttggaagaacaaggatgggattctcctctagactctgcaaagggagcatgaccctcaggacacctgattttggctcttcccaaattttggaagattttggctcagtgaaactgatttcagacttctggcctccaggactacaggagagtaaatttctgggttttcttttctttttttttttttgagaccgtgtttcactcttgttgcccaagctagagtgcaatggctcaatctcagctaactgcaacctccgcctcccgggttcaagtgattctcctgcctcagcctcctgagtagctgggattacaggcgtgtactaccacgcccagctatttttttgtatttttagtagaaacagggtttcgccatgttggccaggctgatctggaactcctgacctcaggtgatccacctgccaaagtgctgggattacagccgtgagccaccgtgcctggccaaatttctgttgttttaagtcaccaagttagagcagccacagggcactaatacagtcctctaaatagcctgtgtgatccggccctggcccgtgttgccaatctcacccttactcacttggctctagccctaccaaggacctttttctgttctcaaaactggtccagcctcagggctcctgcacttattaaattcttcccccagaattcccaaggctagcccctactcatgatttgggtctctgcataaatgtcacctcttcccacaggtcttccttgaccaccttaacccagaaatcacctgtgggtgactctgtgtcacattcccccattttactttagtcacagcgtttgtcactatctgaaagtattattcctcccgggtttattacttctcatccccaccagacagtgggatccaacgactgaaatcctatcatttgtggcaacacagatgaacctggaggacatcatgtgagtgaaataagccaggcatagaaagacaaacaccacgtggtctctctcatatgtggaatgaaataaagaagttgatctcggccaggtgcagtggctcacgcctgtaatcccagcactttgggaggccaagacaggtggatcacctgatttcaggagtttgataccagcctggccaacatggtgaaaccttgtctctactaaaattacaaaaaattagcttagcgtgctggcgggcgcctgtaatccgagctactcaggcaagagaattgcttgaacctgggaggcggaggttgcagtgagccgaggtcgcgccattgcactccagactgggcaacaagagcaaaacgccatctcaaataaataaataaataaattgatctcatagtagagtagaatagtggttacaggaggctggggtgtagtgggaggatacaaagaggttggttaacaggtacaaagttacagttagggctgggcatggtggctcacacctgtaattccagcactttgaaaggccaaggcgggtggatcgcttgaggccaggagtgcgaaaccagtctgggcaacatggagagaccccatctctacaaaaaaatttaaaaaaattagtcagggctgggcccagtggctgatgcctgtaatcccagccctttgggaggccaaggtgggcggatcacaagaccagcctggccaacatggtgaaacccagtctctattacagatacaaaaaattagctgggcatggtggctcgagcctgtaattccagcaagactccatctcaaaaaaaaaaaaaaattagttgggcatggtggcgtgcacctgtagtcctagctactagggaggctgaggtgagaagatcacttgagcctaggggttggaggctgcagtaggctatgatcatgccactgccctccagcctgggtgacagagtgggacctcgcctcaaaataaataaaagtaaaaagaaaaaaataccaatattgtacatttcttttctttttttgtttttgtttttagatggagtctggctctgtcacccaggctggagtgcagtggcatgatttcagctcactgcaacctctgcctccctgggttcgagtgattctcctgtctcagcctcctgtgtagctgggactacaggcacccaccatcatgcctggctaatttttttgtatttttgtagagacagggttttgccatgttgaccaggctggtctcaaactcatgacctctggtgatctgcctgccttggcctcccaaagtgctgggattataggcgtgagccacagcgcctggccctaatattgtatatttcaaaatatggtagctagaagtggggattttgaatgttctcaccccaaagaagccataaatgtatgaggtgatggatatgctaagtaccttgatttgatttttttacacaacgtacacaggtaccaaaacatcacatggtaccccatatttaggtacaattataggttgccgaaaaagtaattgcggtttttgctatacttttatatgcaaaaaccgtataacttttgcaccaacctaatattacatgtcagttaaaaacaattttttaagtggctctctttttaagtgggtatttgggaaaaaaaaaatgtgggagccaagaaggccttgtctacttcgtttcctgctgtatccacagggcctggcatgtagtaggtgttcagcaaacattggttgatgaatgcatgatgacctatctgtgcaaacctctaggctcaagaggtgtgtgtgtgtgtgtaagtattttagggtgcatgtgtggcaatgaaactgtatatgacctcccatcttctgagtgacccctcctccctcacgctgtcaggagctttctggggaatatttcatttattccctacaacgctctgtgaggcaggtttccttcgtatctatatgacagacgaggaaactgaggctccgcgatcatctaagttatataaaatatgttcagaagtgaaaacagcattaataggcagaaaaggacctcccccttctaccgcttacccaccgcttacccagaccctccccttccccgcgctgggtctcccaggattcttctttactttcttttctataaaatacagacggggggagggggggcgtctcactgtgttacccaggctggtctcgaactcttggcctgaaattatcctttcaccttagcctcccaaagtgctgcgatcagaggcaggagccaccgcatccagccttctcccgggactcttcaagagtcgctgcgccggggcctaggccgagggtgcacagcgcgtagaaagcgcctgggagagcggtgtcccccgcgagctaccacaagtttatccctaggcgcggaagctaccacggcctgggcgagagccgggaaattcccagcgggcggcttgccccgggggaggccggcgaagcggtctaggctggtgctggcggagccgattcacggacccggggttgtttactggtccggggagtggacgcggctgcccacgaaccggtcgcggctggggcggcggcggcgagcaaagggttaagggggcggccccggcggcgggggcggagccgggatctcggccgcacctggcgccccaggctcccagccccgacgcctcctgcagcgcctggagccacacagggatccggagcctgggggaaaagcggcgcgggagccggcacccaccgctggaggggcggcgacggcggccgtagcgacctcgggaggcaagcggagccgccatggccgagttcccgtcgaaagttagcacgcggaccagcagtcctgcgcagggcgccgaagcctcggtgtcggcgctgcgcccggacctgggcttcgtgcgctcccgcctcggggcgctcatgctgctgcagctggtgagagcacgcgcgggcccacggggttggccgggggctcccggtccggccaggatgggtgagggactccggcgctgcgttcatttttcgcgaaccttgcgctccccacccgggctcacactgtcaccgacgcgctgcgcgtacccctagggcgcttcccgcacggacgcccccaagatcgccctgcatccctctcaccacgacactaccccgtggccgtcgctgcgagcgtgagcaccctgcaccgtgtacagagtgcccactgcccgtgccccatcgtgccccctccaaggtggttaccagcggccacagaagcccccaccggagccacagtcactgcgcacaacccgccaacccttcccagccctcccttccctcctctctctttttcacccctctttctgcccggacagtgcccccagccctctagggaacccagtctgaggcaaagtccactctctgaccaccttctgtcccgctcccagcggctccgggtggccgcacccatgaacattcctcatctaatctagagggcacatccgactccccaacacgcacactcaggcactaccctgtgggcgcccgcgcgggagccgggctcttctagctttctctgggtgacccgccaggtttcagccggtttagccagccccacgggaccgagatatcgctggagggaggggtttgtgggtagccaggggcaagactcctactctctcccagacccctgtacagaccccaactgaggcggacccatgggaacatcctccactcccacaccagccacaggcccggatgttagcttcttcctctgccaccctttcgtgagggtctg

SEQ ID NO: 7112 - DNA, 6000 bp, Homo sapiens
ctctcccgtcttccacacagacaactgcgaaggtgagaagggtgagcggcgtctagacggcgctgtccacccagcggcaataaaatcggatgtttccgcacacagcaccgtcacaggctatcaccgtttaacacggcaactcttaaaatcattgctgctgcgtctaaaccgtcctgagctcacagctgagcccaggaaagggcttggggtgcgcgccagccggcagccaccaggctccccatcccacagtgtggggtcatgcttcccgcccagcacggtctcgagggtggtggatcccaaaattccttgggatgccagcgcagtcccttcagccacccagtcagcaggtatttattggcacctactggatgctaggcaggagcaaaggacactcacctgctccccactccagggtctcgtgtctctgactccatggcaggacaaaggtgagagcccgccatgcttcggggcgacctaccgggctccgtcctgcccttgagtctgcggctcaatggggccccaccgaggctgctcccagggaagaagcattctggccaggcagggcccgagcctgtgtcagtgagaggccctgttgcctgccctggaggccgatccctgcaggggccagtctaggcagggacgcccctcttgtctgcatattcccggggcctggcttcctggccgcgtgggcagcctccttggtggcggtgacctgggtccccggctcacaggccacacgtagcagcagaacccagagctggctgggagaaggggtctcactggacaccaggcagtgaccgccacggctggctctccaggctttgccaggagaggactctgtccaccagcccttggtccagattctggcagaccagccacgggccccactgctacagggagctgaggaccagtcagggcgtgcctgtcccatcgctgccatgccgggccccactgccgacgtcctccttcccctgggcagcgtgggggatgctgaaatccgtgggagaccccgagaagcccaccccaccttcttgggttccgccacatgatggctgagctaggaggtcacttgtactctctccccgcagctctttgtcaaagaaaagcattgcccttaaaaacaaccccggccaaaaaaagaaaaaaggaaacagcgaaaaccagaagcaaattttccagagacctggaggattagaaacaatacatctgaacgttctggagttgaattaaaccatctcaatgccggtttccaaccgtcctgggcttctctctgacgctcagcgaagggcgcgcatcacggcatcaccgctctcaggacgatttcccgtctcgtctcactggaccgtctgccgtttatgtcctttctcggtggaggccctcacgtcgcgttgaggtggtccccgctccggctgcgtgaacgcggcctcagctgcctcatcttccggcagatggatgttcagagcagggagcatccatgttccaggcgtgcgggcacctgtcccgccggacgtggagcgtgcaagtcagtgggcagcagcccaggggacacagagcccccaaggacaaggtgggcacgccatccgatgggctggagtgaacggaaagcggtgggaggcagcctccgtcccagaccttgagctggaaaatgcccgcccgggtgctggagaggctccaactggtctgcaaattgtccgtgggatgcctggcgactgcacgctttctcagattacagacactttctttaaaaaaaatctgtgggccgggcgcggtgacttacgcctgtaatccccatactttcagagtctgaggcaggcggatcacgaggtcaggagttcaagaccagcctggccaacatggcaaaaccccgtctcttctaaaaatatgaaaattagctgggcatggtaattacatgcctgtaatcccagctacacgggaggctgaggcaggagaatcgcttgaactgacaccaggaggcggagtttgcagtgagccgagatcacgccactacactccagcctgtgatacagagcgaaactatgtctcaaaaaaaaaaaaaaaaaaaagtctgttatagaagtccgtggtctttttcccttctgccgacatctggaggacagagtgtggccgggagggcaacagctgctgtgttcagaattccaagatgcttcccaggcgccctctgggtcttcccgctccccggctccctccggcctgccacagggcctttgcatgggctgccgttgctgctggaaagagcctctgctcctcttccggctgccggcttgtcctcacagaggccccgccctcgtctatctgggcgccccctggcacttagtttggaaactgttttctcctccccataagacggaagctgcaggcatgagaaccgggtctgtctggtcacagccaaggcacctccaccctccaaccgggccccgcgcactgtccaccctcaactaccatttgtccagcaaatcaacgacagcccccagctagaatctggagcttcagtctgtggctttgccttagctttaattaattaattaattaacttattatttttttgaggcagagtccactctgtcacccaggctggagtgcagtggcgtgatctcggctcactgcaacctctgcctcctgggttcaagtgattctcctccctcagcatcccgagtagcggggattacaggcatatgtcaccatgcctggctaatttttgtattttagtagagacgggatttcaccatgttggtcaggctggtctcgaactcctgacctcaagtgatccacacacctcggcctcccaaagtgctgggattacaggcgtgagccactgcacctggcccaccctaacttttaacgagcagggtgttgataaaaagatcagaggttccaagtgccctctggaccggactccgattcagcgtttgtgtctccccacctgctccagcctccctccacggatgtgtccaaagcacggggctctcctaggtcctgctcctctgtggctggaaccttaattggacctttgaaggcctaattcaccagctgtggccctccatcgctgagtagttgcattaaaatagactgaatgttttccttttcttgaaagttcccgtatacaggaggaggtgctgctgaaaggacctgtaccccagccaggcccccacactcctgccttccagttcctcggcccaccccaggtgctgtgtgtccttccgggccccagctgggcagggcctcttcttcaccctgcacgatgtggcccacccgggggaggtcctgcttctctgctgctcacccgcaggtgggaagccacagccgccccacagcctctccgggtctggggtctcagggtgcgccctggagcagggcctctttgtctggagggagaaggggtctctcccactaccaggggccccttgttggcgggcgtgctgaggtgcacacctgggagctcaagctccctggtgcacaaagcagtggtcccagaagcaaaaccacccttccagcctggaggggtgccctggggggagtcaggagcctgggcacctgcccccacctgctggcacctcgaggtgcggccagccctccctgggacaagggcctggccatccccaatgtctgaagggtccaccccttcccgaccaaaccacttgctctgagggtccaggggaaggcccttctgctggcctggctgaaggagcagctgctggcagggggaaggggcctgcacttctcctcgggggcccctgggtgagtctcgctgaggcagcggggttggaggatgcaggagcaccaggctgccgtccccagggtcccccagatccccacgcgggaggggaccggagacgaggacaagttcgcggaaactgcccgtgcgtgtcggggagagatgcgagtgcaggagcgcccagccgtaaagcacacccccgcccgcccccgcgccccatcacacacgcgcgcgcgggcacacccgggacacacacgcggcggggaaggggcacgcagcctctcgccttccacgcccgcccggtccccgcccctccgccgacccgggcccgcgtcgtagtgggggtgggggtgggggcggcggcggcgcgcgcggcagcgcgaagggggagggggagccggagcgggagggggaggggcgcggcatcggcggctcggccgcccccgcagttgggggcagggaaggacgtaggtgctccccctcccaccccgccggagcctcccgcgagcgccccctggtgcaccccacgcccggcattgttggggagcacgaaaagcggggagcccagtgcgggggcgtggagggggcgcgggcggggtccaacttcccgcacccgggggggggcggggcgccgggcggcgacagggaggggtcgctcgggcgcgcgcgtctcgggccgggggcggatcctccccagtacccccccgcccgccccgcccccggccccgccccggccacgctggccccgccccggtcgcgccggccccgccccgccccgccccccgccgctcagcccgaagtttcctgcgccgcgcgcggacgggctcgaggctcgctcgctgcctcaccggtccccggcccgcgccccgcgccccgcgccccgcgccccggcctcacccgtccgctcagcggcctccacgccgcgccgaggccgccgccgtcgcctccgccgggcgagccggagccggagtcgagccgcggccgggagccgggcgggctggggacgcgggccgggggcggaggcgctgggggccggggccggggccgggggcggaggcgctgggggccggggccggggccgggcgccgagcggggtccgcggtgaccgcgccgcccgggcgatgcccgcggggacgccgccggccagcagagcgaggtgagacgcggcgaggacgcgcgcccgggaccctcttcaacttgcgcgaagcgggccggggagcccctcggggtgggggtggggccgctggagggagggagggggcgggcgggggcggggggcgcgtttgtctctaataagaaaagacaaagacatcccggcggccgcggctgttcccgcagctccgcgccgcgggaggcagggcgggggcgtcgccaccggccccgggtcaccccctgtcctctgcaggtgctgccggccgccaccatgaccgagggcgcacgggccgccgacgaggtccgggtgcccctgggcgcgccgccccctggccctgcggcgttggtgggggcgtccccggagagccccggggcgccgggacgcgaggcggagcgggggtccgagctcggcgtgtcaccctccgagagcccggcggccgagcgcggcgcggagctgggtgccgacgaggagcagcgcgtcccgtacccggccttggcggccacggtcttcttctgcctcggtcagaccacgcggccgcgcagctggtgcctccggctggtctgcaacccatatccttcccggccggcggggggcggggggcggggggcgtggggagggtgggggcccggggcgcgggactccctcggcatgcgcccccgcgcgcccctgttggtgggacctggcgtgggccgggcgcgcgggggtgcagggcaggggctggaggaccgcgctctaatttctgagagtggcgggcttggggggccaccgggcgcctccggactcccttccccagggccggctccggacggagaaggtggaagcgaagcggtgaggcccccgcgggcttggaggggagaggagtcggggagggagggaaggtcctaactcctcgcggccccaagggtgttggccaggacgggaatttcccccttgcccacccctcactgtctgaaggtcctgcccgaggcaggcccctcgcgggggagggggaggccagaggagctggagtcaggggcgcaaagttttcagccggcgcctggtggttccgagtgcgtggggagacccgtggggcctgtgagcgccgccagggccttttccgtggagagaggcggtg

SEQ ID NO: 7113 - DNA, 6000 bp, Homo sapiens
gggactagatatgaaatacactcactttaagaaacagaagaagacatcaccacatccaagtgggaagataggatttttattctctatattagttgggacttttttggttttgagtgagataaacaactcaaaatgtcctaaacacaatagcaagtttattggctcatatgactgagaattccagaaggtagacccagctgtaggcagtgctgggtccagagacttgctggaaccctctccatcactgggctctgcttttctttgtgttggtttcactctaaggccctatgtgatactttccacagcccttggatcacacagtcctttctgctagaagtcccagtaaaaagagacatcctcctttgcaatattctagacaaagtcttgggtgggtgtgactctcagactctcattggattgaatttctgtctgtgcccactcctgagcaaaagactgtaacctaaaggccaggcatggtggctcatgcctgtaattccagcaatttaggaggccaaagtgggtggatcacctgaagttaggagtttgagaccagcctggccaacatggtgaaaccctgtctctactaaaaaaaaaaaaaagaaaaaaaagaaattatccgggtgtggtggtgtgcacatgtagtcccagctacttgggaggctgaggcaggagaatcacttgaacccaggaggcggagattgcagtgagccgagatagcaccactgcattgcagcctggacgacaaagcgagattccatctcaaaaaaaaaaaaaaagactataacctgagtgacaagataagctgatttgctagagccagagatgggggtcaacctaagttgaaccacatgaatgaggatggggggtgtggataggattgaatggttctccaaaggaaattcagggatgtctctagaataaaaagaatggatattggcagaaaaacaagcaaatggcttctacaccattgctctcgacaagcaagtctaaaatcttagtatttagggggcaatgtaagtctcatctatattgctttttcctaagtggaccagaagtgtttttttgaaaacaaagggaaatgttggttcacttgttttaaggtttcttcctcacttacagccacatgatctgagaatttcccatttaccagtagtggtgaatctcttcagtcatatttgttttacccattcctaccctcacagtgttagctgattggaccaggaatgaatacacctgagccaaagaaactagctcattggcaggccagtggccaatcaaatttatcttcaggactcatgagactaagacaggctttgaaaattcaagaaagcccacaaaatcctctgccaggcgcactgacttacacctgtaatcccagcactttgagaggccaatgcgggtggactgcttgagcccaggagttcgaaaccagcctgggcaatatagaaagacctccatctctacaaaacccacaaaatgtatctgggtgtggcagtgcatgcctatgttcccagctactctggaggctgagggggaagtatcacttgggcccaggaggtggaggttgcagtgagccgagatcgcaccactgcactccagcctgggtgacaaagccagaccctgtctcaagtaaaaataaaaataaaaaaagaccacaaaatcctcctcctgagagatccagacctttcctggttcccattctcctgagaccctctgtgtttctttggattctgtaaaggagccctgcctgcatccatttaataatttattgattctgcttgagctaatttgagtctgtttctgttgcctgaaaccaaatgactttgctaaggctaggttcggtcatagtcatatgcaaggatggcacggaggccagtgaaggtgaagcagaatatgcgagtgtgagtaggaagagacgagggcagagggacaacagggtcagatgatggagggccttgcagatgaccataaggattttggctttcattataaatgaagcaagaagccactgaatgggtttaaatagagaaatggcatgatctaaccttaattcaataagaatctctttgactggcttattgacaagaggctgtggagggcagaattagcaagattagtgaggagcctatggcaatgattcgggtgagagacaatgatcaattagagcatggtggtggccccagaggtggggagaagtagattctaggtatattttataaatctgaacactgatgcttcaagaaggagaggacgttgcctatggtcttatgatgacaggagtggtttagaggcaataccactctgtactgaagaatcagatggtgttggtcataggagtgtacacatttaccaaaactccttgacttgtacattttgggccaggtgcagtggctcatgcctgcaatcataacactttgagaggccaaggcaggcaaatttcttgaggccaggagttcaagaccagcctgggcaacatagtgaaattccatctccacaaaaataaaaaattagccaggcatggtggcacagacctctagtcctagctactattttgtaatctgaggcaggaggattgcttgagcccaggagttggaggctgcagtgagctatgatcacaccactgcattccaccctgggtgacagagcaaaaccttgcctcaaaaacaaacaaacaaaaaaattgtgcgtttcactgtatataaattttaacttgaatctagcctaattccatgcctataatgccagcactttgggaggctgagatgggtagatcccttgaactcgggagttcaagaccagccttgcaaacatggtgaaaccccttctctaccaaaaaaaaaaaaaaaaaaaaattagttgggtatcggtggcatgcacctggggtcccagctacttgggaggctgaggtgggaggatccttggagccacaggaagttgagactgcagtaagccatgatcatgccactacattccagcctgggtgacagagcaagaccctgtctcaaaataaataaataaataaataatttaaaagacaaaaagaagaaaaagctggctttattttgcagtgagaatataactgtgtattgtcattcaaaacaaacatagaatttgaacagtgtgtgtttcaaaatcccattatatatgtatgtgtatatatataaaactaatatgtgtgtgtggacacacacacatacacacacaccaaataataaccaaactgttagccatgcttatttggggaggggggggcacagtttattgttttaattctttgcaatgagcatatattgttagaagaagcagctgagattttttagaggattttctttaaatttctctccaataatgctggacctgtttccatccacctgggcaaaccgcccttggaccagcaaccaaggcatctcctaggaatttggaaattcggactcttaagacccactccacccctatcgagtcagaatctgcattttaacaacatccataggtgattgtaaccacattcaaatctgagaagctctaggtaagaacagatcctttcctctctctgggcttcagtttctccccggcacaaaggggctgtgtctctatggtccctcccaattgcagttttctaatctcgtttcttgtagttatctgagtccctataaaaaggcagctgaagctaggaaaggtggcttacctctgtaattccagctatttgagacgctgaagtgggaggctcgcttgagcccagtagttggcagctacagtgagctatgattgcagcactgcactccagccaaggtgacagaggcagaccctgttaaaaaaagaaagagagaaatagaggaaagaaagaaagaaaaagaaagaaagaaagaaagaaaggaagaaagaaaaaggagggagggagggaggaaggaaggaagggagagagagaaagaagaaagagggaggaaggaaggaaggaaggcaagcaagcaagaaagagaaaggaaggaaggaaggaaggaaggaaggaaggaaggaaggaaggaaggaaggaaggtgggcgggcgggaaggcaggcaggcaggcaaggaaggaaggaggaaagaaaggaaagaaagagagaaagagaaagaaggacaggccaggcgcggtggctcacacctgtaatcccagcactttgggaggccaagacgcgtggatcacctgaggtcagtagtttgagaccagcctggccaacatggtgaaaccgcgtctctactaaaaacacaaaaattaatccgggcatggtggcgcgcgcctgtaaccccagctacttgggaggctgaggcaggagaattgcttgaacccgggaggcggaggttgtagtgagctgagatagcgtcattgcactccagactgggcgacagagcgagactccgtcaaaaaaaaaaaaaaagaaggaaagaggaaaagaaagaagaaggaaggaggaaataacgaaagaaagagaaagaagcagctgaaaaggtcaaaggatgagtggcctggctgaacagcccctgctgcctacagccggacgctggtgggcactgaagctgcaggtctggagggagtccgaggagcgaggctgcgtgggattactgctggtgctagggcaggcacctgccatctggacgggagtggaaggaagtcgcggggcagtaatagggggcagcaggcgctttgaggcgccttggggtaagtgccgcagagacccagcgggaatgcaggatggcagggcggcctcggggcggcagcaggcactgcgcggtggcccaggaagacgcagcgcggccgggctggggcgcagggcggcttcggggcgccagggggcgttgtgaagtcgtggcccgctccgggcggtctcaggtgcctggcggcctggggaaagcacctgggcaggtgggggcggggcctggggaggcgggtccctagggggcggggcctggccggcccacaagagcccgcggtggcgctgccaggggatgctagcccgagagcgagcagaggagcagcgcacccgcacgagccttggaccctttggaaccgaaaggtgagttcagccgggttgggtcggaccagctcgggggttctgggcactggagcggatgccgggcgccagggcgtcggacgccgtcagcgcggtgggtggccgagccagcatcagccggtggcggcttcccggtgcccgggatgctgggacaccttgcccgggcggtagcggccagctctcccgggtctacccacgccgtggcccggagcacgaagccagtcgagagccactcagagtccgggggtctgggggtcccgggccacacctggcctcttttctccgcccagcgcctgttcagcccccttccctgccggggtgagtcgcgtggacctgtccgctactgttccttctaccctctggaatgctttctccggggtgacttggtgcagaaagaagcaaacacttgaagtgggctggttggattcgctccagcgccttcagccggcgctcccccggggcagacgtggcttccgccacaggacagcgcccgctcgctccgcgcagggagggcagggctgcggggtcgctcggcaggagctcgggtcagggccctgaggttgagttcaagtgatttctgcacaggactcgcccttcgggacgggcactgatcgggaactctccggtccagcgaacccaacgctagacttggggcaaatctctcatccctctccaagctttggggtcctgcactgtgggatgggggacaggcaaagtcggtggtaggtgaggagggggtgcacggagccgctgcgatgagccagggccctggaattctaaagaatccttcaaatcctttctacctgtgtggtcttgggcaaattacctaacctctgtgcctcagtttccttctctgtgaaatgggccaagtaatagcacctcatataactgtagtgaggattaaatcaggtagtgtgtgaaaaggactgagtgggatgcctgggagtacagaaagg

SEQ ID NO: 7114 - DNA, 6000 bp, Homo sapiens
ccttcttttgcaatttggatacaattttcaccagaatcggccaggagtcttttggttgcaagcaacagataccccaagatggcttagcaaaaaggaaatttatagtcttatgcatctgaaatgtgcaggaggtagggctaacttctggtatgtttttggttgggtcaaacaatgatatcgggacctagtttctctttgtcatctttctgggtggaatgcattattatacagcctcttccaaaatatagctccccatctgaacaactcccaagccagcaaaactccctgagagctcaatgaaagagtccttgaatagagtttcaccaaccatagttaatctgacttgggtcatatcccatatatgaacaaattactatcctaagaggaatacaaaatgctaattaataggcctgggccatatccaccctgaatggggtggtaatgaatgaagtcaacacccctaagatcaaaatacagatgaggggtgaaaaaggagtggtgaccccagagctaaactaagtgcagttacctgaagtagaatgaatggatgtttggtgtccccaactctcccacacccccaaaaaagaatattcaccttgtcttctatgcaaagtattgtgtgagatggtggttataaagggtaatatggcttcaacatctaacatctcatggatttctagggctagattggctgatctcatctcctagaattgcactaacccaaagaaagcaaaaggactgtctttccacaatactacaaaaatattcaatagaacattttttggggggtccctgagagacctcccaaaccagtcattaaccctttcagacgtgaattcatctgactgtgccataatttaacccatgaatcttcatccataaaaagagttttttaaaatttggccaaattaatgcagggcaggttcttggcttcattcaggaaggaattcaagagccagctagctggtggtggaagaaaatgccttattgaggcagcagcagtgttaggctctgtccctgctcctgcagagcaaggctaccccatgacggccagagcagcctagcagtcatatttatacccacttttaatgacatgctaattaagggggcaggttattcagagatagctagaaaatgggcggtaacttcccggcgttgccatgacaatggtaaactataatggcactgatggccttgtttcatggagaggtgctgttggtgcctcttccgtgtttggccagtattcaaacttatccagagtcaagttttgcctacttcctacctcaaaacgatccacagttctaaacagctggctaaagtccatatggatgctgtctaatggtgtcagactgtagaccctaataaaaaggggaaacaagttggttttctcctcaggaggccaagttaactacagaacacaacactctttgttcatagttgcttaaacattcatgccttaaaacttgccagcctaacatcaaccagtctggagttcccagacatcccaaaactccaactctccaacaatggaaatcatgacacagaatgaagatgtcagttgtataaagctggtcacaacagcacagttccacaggggactcattctaaaactgtccaacagggccccaaaagaaaaccttcaaaaataacgtattgggttgaaccatatgaaattgctatgttcttttttttgctttttgctttttctttttctttttttttttttttttcgagattgagtctcactctgtcacccaggctagagtgcagtggcacaatcttggctcactgcaacctccgcctcccgggttcaagtgattctcccacctcagcctcttgagaagctgggattacaggtgcgcaccaccatgcctggctaattttttgtattttagtagagatggggcttcaccatgttgcccaggctggtctcgaactcctgagctcaggcaatccgcccaccttggcctcccaaagtgctaggattacaggcattagccaccccgcccagccgaaattgctattttcataggtcaataatagtcaaatatcaacaattttatatggtcacaaccaaatacacctgggaagcattgattttcaaagtgaggtccacagacccctgggaggtcccagagatcctttcaggagaaactgtgaggtcaaaatcactttcataagaatcctaagatgttatttgcctttttcacctgtggacattttccctgacagtgcaaaagcaatggtaggtcatcactggtcattacagaaatgcaaatcaaaaccacaatgagataccatctcacaccagttagaatggcaatcattaaaaagtcaggaaacaacagatgctggagaggatgtggagaaataggaacgcttttacactgttggttggagtgtaaattagttcaaccattgtggaagacagtatcgcgattcctcaaggatctagaacaagaaataccatttgactcagcagtcccgttactgggtatatacccaaaggattataaatcatgctgctataaagacacatgcacatgtatgtttattgcggcactattcacaatagcaaagacttggaaccaacccaaatgcccatcaatgatagactggataaagaaaatgtggcacatatacaccatgaaatactatgcagccataaaaaaggatgagttcatgtcctttgcagggacatggatgaagctggaaaccatcactctcagcaaactgacacaggaacagaaaaccaaacactgcatgttctcactcataagtgggagttgaacaatgagaacacatggacacagggaggggagcatcacacaccagagcctgtcagggggtggagggctaggggacggagagcattaggagaaatacctaatgtagatgatgggttgatgggtgcagcaaaccaccatggcacgtgtatacctgtgtaacaaacctgcacgttctgcacatgtatcccagaacttaaagtataataataataaataaaaaagactgaaaaaaaaagcaatggtgggtcaagttatatgaagctgaatttacttcatttacttcaactaaaacaacagattgcagccgactgaatacgagaatccagctgtctcttattaagccaagcattaaagagatttgcaaaaatgctaaacagtgcccttcccactgattttttttttttgaaaaatatttttcagccaggcatgatggctcacacctgttatctcagctctttgggaggctgaagtgggaagattgcttgaggccaggtatttgagaccagcttgggtaacacagcaagactttgtctccagaaaaataaactttttttaattagccggaagcagtggcacacacaccttgtagtcccagctaaggcaggaagatggcttgagcccaagagtttgaggctgcaggggtcacaccactgcgctctagcctgggcaacaaattgagaccctgtctctctttaccaaaaaaagaaaaaaattgtaaaaaagccttttatttatgtcaacaagtagtgggtttattatagtgtaatgcattaataaatatttttaggtatcagttttagtttctcatatggaaagtatcattatataaacaaaataacatatatgtgttaaaaacacgtgtgtgtgtgtgtgtgtgtgtgtgtgtattccacataaacaaaaagtctcaggtattctgtaatttttaaaagtacagaagattcctggctgggcatggtggctcacacctgtaatcccaacactttgggagcccgaggcgggtggatcacttgagtccaggagttccagaccagcctggccaatatgaagaaaacccatctctacaaaaaacacaaattagccgggcatggtggtgcatgcctgtaatcccagctactagggaggctgaggcaggagaattgcttgattccgggaagtggaggttacagtgagctgagatgacaccactgcactccagcctgggcaacagagtgagactctgtcaaaaaaaaaagaaagaaagaaagaagaaagagagaggtagggagggagggaggtggagagagagagagagaaagaaaggaaagagaaagaaagaaaagaaaagaaaaatacaaaagattcctaagaccaaaaattttgagaatgactgcattaagacaatctatggagaaatatacaggaaactaagtgttaaggatattggcaagaaagtggctgaaatgatagtcctgaaaccttgacttgatgagaagagaaaagaaaaggaagggaagattcgaggaaatgcgcaaggcccgccagtgccctgaggctagagcacaggtgtagtgggcactccagagggggccagagttcccaatctcggggtgggctgtttgaatttctaatgcaaagataggacctatcggggatgactgagatctgggaggtctccaccttggtggaggtggaagaggcggagggaagaacgttcctgggaaaagtggctgcatatgtccccctaaagtcaccaacttgcccagaggacactgtgtctgcaggggtgtggatgtgatgggggcgcgcctgtactggtgagcgcgatgcttcgcctaggtgaacgggacaggtacacgcgtggggtgggatggagtgttcatatatgtggcttgtgatatgtactgaggggacgtggggtacactcggatgaggggtctgtggacatattcgtggcgcatgtgggtatcgctggtgtcccgaggtggggagggagaatgcggagcgcgtgcgtgcggggggcgtccagtgtccctgaacctggcgtgtgggggctggagcttattgggaggcgagggaggtggccaggggagccgggaccgtgcgtgtggccaggccggtagcgcccagtaagctccacccgcgggcgctccccgtgcttccccgcccctgaacctgctccctcccagtcggtctcgccgcgctcgccgggtgtcccagtgtcaccaacactcggccgccgccgccagcttggcgcgcaccgccgcctccgccaccgccgacagcgcgcatcctccgtgtccccgctccgccgcccgagcaggtatgacggcgaaccctggctcgcacccggtctcccgcgcgctgcccggagtccctgcgcgcgcgccttctcctgcccaaccccggcccgcgagctcctgtcccggcctcagtttcccacgggagggcgcttgggtgcctgtctgaggcgcctgggacccggcctggggactgaacgggttgggggcggaggggagagctggaggctgggaaaagcccccagggtgcagaaggcagacggggccagggtccccggcgtgtctgggacctcagagacggcggcaaagtcctggcatagagtgggcggggcaagaagttgttcaagaggtgacaacaatgaaactcgagagcgctttctacgtgctgggcacagctcagcagagcgccttgctcaaacgacctaacttcgctcacagggcatccctgtggggtggttctcttgctgtccccattttgcagaggtgcaaactgagggtcagagggtggggaagcttccctacgtcccaggaacaagttgctgagctcagatttgaacccaggcagtccgaccctggagcctacctcgtgggctgtcagtggcgtccggggaacgtgggtttcatttggggtgatgtggtggaggaggccagatccgaacgccctgcagttgtctgcgctgaggattctcaagtgctaagttgatgtctggacaatgtcatatgacttaggtgtgctgtggagggaaagggtctgggatatagtacagggacattctcactctagcgtggagggggaaaatgaggcacagagtttagggaggaagcagcagagacctccagtccacaaaaggcacatcttcccactcacctccaccagggagtaggggcagaacaaccaagactggctttggtccctggcagcccagctctca

SEQ ID NO: 7115 - DNA, 6000 bp, Homo sapiens
tgcaggagactggatacacaaagtgtggcttatccatgcaatagagagctagctgctcaacaataaaaaataaaaaagctgttgatacatgcaacaacacagaggaatcttctagacatcagggtaagtgaaaaaagccagtcaccaaagaatacatagtgtaaaattccacttatatgaagttcagaaaagggcaaaactaatacatggtattagaaatcaaaattgtagtttacactgaatggggggagtgggattgacaacaaagggacacaagaaaacttcctggtggtgatgaaaatactctgtacctcattttacgtgacggtctatgtggatacacacaatctcaaaagtaacaaactggctgggtgcagtggctcacacctgtaatttcagcctttgggaggccaaggccagaggatttcgtaaagacaagagtttgagaccagcatggacaacatagcaacacccaatggctacaaaaaataaaaaatttgccagatgtggtggcatgtgctaaccaccacaagtcctaactacttgggaagctgaggcagaaggatcacttgagcctaggagttcaagttaatagtgagctacgaccacaccactgcactccagccagggcaagagtgagaccctgtcaaaaaaacaaaacaaaacaaaacaaacaaacaaaaaaataaaaaaacaccaaaaaaccttcacaaatgaaacccttgagagatatgcattttattgtctataatttataactcatttaaataaaatggcctaacttcccctttagaccccaagccagagtcttgcatgggtgccaaggagtggcctaatcagttcagcccagccatagactcaagaaaggaaacattttcctgttccctgccttatattatacaatcccccattttaatttactttccagcatttccctcacgctttctctgtcttttggattaaaaaaaaaacaaaaacaaaaacccaggaaacccagcatagaacaaccagctcaataatgaatccatttgtctccacacactgtgcccctctcctgtctccatttcagcagccacatccacattcttggaagaagttcccctgcttccaggctacttcaaggtgcatgatgttgattgagcatctactatgtgccagaccttgttgacccctttattaaggctacttccttttcttttcaaaataatcctgagaagtagatgtttttactgccccccatttccagattagtgatcaataaagggaagtaatataatgtccaaaagtgatattttagtttgatccaggtgccatagcaaaacatcatcaacagcagaagtttatttctctcacttcttgaggctgggaggtccaagatgaagcagcagcagactcagtatttggggagggcctagttcctgttcataggccgatgccttcttgattaagtctcacttggtggaaggacctagctgactctctggcatctcttttataagaccacaaatcccattttactctcatgaagccatgaagtcacctcctaaagtccccacctcctaataccatcaccttgggagttaggattttatcctatgaatttgggggtgggaacacacacatttagaccgcagcaggtgacattaggttaagtggaggaggcagggttggaacagtcattgcaaaacctcttagaatttaagacccctttccttccaaggcctgaaaggcagacaggcgttggagatacaggtgaatataaaaggggcagagctcctcccttgaccatgtatttcatgcccagtcgctagaattcaagtcaaccaagccctcacacacccgggccgtcccatgttctctggctcacctcttctggtagcttagaagtggcagcctcagggaggcttctgtttggtagaacttagaaggaagcatgtgggaaatgcagatgtctttgcttttaggattctggctccctgagatcagaggagtgggttcccgtacgggggtggcgaggcacagggagaagcattggagcagactctgtgtgtgtgtgtgtgtgtgtgtgtgtgtgtgtgtgtgtgtcggcgcgcctgtgcgtggagggggataactgtacccagcgcgaggcactgggggaggaggaagcggtagcagagatctgaataattgattcttcagccgcaccagacgcccgggagcgggcggagagcgtggttccaacaccacggacagcagcgcgcgccgccgcaggcgcccccgtcgccagccagccacctatcctggccttatttgccgccgtgcgctctcggaacgggtggccgcgctccgcgtcgccgccgagggactgcggggtctgtctcgacccacctaggagagaggctgcgggcaggagacgctttcgcccgccggagctcgaagcctcttgggcttgagcgggggctactgcgtctcgccggctgagaacaagtccctaagttggtgtggagggcgccgctaccttccttctcctcttcctcggaggcgaccgcagcagaaagacgccccgggaacccggctttgccagtgctgtgaaccagggtgtccaggcgctcaccggactcccgctgggaagtggggagccgaacgcccggcgcggagctggcccagcagcgaagggcccggagggagctgcctttccccgcccgcgcctctctcggccggggaccgcggggatccccggccacacgcgagcgcgctcccacactcacacacacactcgccctcaaacacaccagcccggagctgggttgcggagagggtgctccggcgcgctcagaggaccgggcagttgccgtccggagtggggcaggaagcggagctagggatcttggaggggagctcctagggcttggccggatcatgggaccgggtgagcgctgagaatcgcggccgcagccatcagccctggagatgaccaggagcggccactgctgagaactatgtggagagaggctgcggtgagtgctagcgcgggacgccgggcctgggaggcccccttgggaaggggggaggtgggaggcctgaagagggaggaagcggcaggatcacaagagggtcgctgcgtgggaaagatccacctccctcggggaaccgggaccgcgggagcccgcgtccttccctccccctctcctactgctggctcgtcacaaactcagccagcgcccccccaccctcgttacctcctctttctctccctacctccctcgctcagcagctcccggtcgcacaactcccagcagccggcgctggggaggtggtagggggtgcgggtggaggtgcccagttagcttctcgtgggtggccaacctggggctcccattctcctgtgcaccctggagtggagctcccgctatcagccacaggggctgaggatccgcactgggggcgtcgtgggcatcgggcttcagcttcccccctcttgtctagcccccctgggcgcataggggggcttgtgagcactgcagactgcagccttcccctcaaccctccctcccctcgttggtgggctgaccctgcctctccttctctcctccgccccgttagagccctgctgcagagcctccggctgggatagccgccccccgtgggggcgatgcggacagcgcgggacagccaggggagcgcgctggggccgcagcatgcgggaacccgctaaacccggtggctgctgaggcggccgagatgctcgtgcgcgcagcgcgccccactgcatcctcgaccttctcgggctacaggtacgtcccagagggagatcagggctccttgggccggggaggagggagactcgaccggagggagagcgggagagggatcaggctagagagggagagggaaagcgggagggagcccagcggcgaagtgcaggaggggcaccagggggcgctgcggctccgcgctccgcggcgcttacccaggaacgtcgaggcctcttggagttcgcctcaacttcccccggctccagcagcgtccgtcccgagaggcgcgcgtcagggcacgcgtgcacgaccgtgctggtatttgcaggtacgcagggctgtgcacctgccgcagttcatgcgtgtgcaccacctgaggacatgtgaggactccggctggccgtgggcaccgctacagcagtctgaggaagtgcgcagaaaagcgcgcgtgcctatgagcgtgtgcggcccactgcccacgtgcacctaggacttggcaacagcgcccgcagtagaaaggctagggaggggctgtacagtccacgtccgtctgggagcttcttgggagcctacctttccccctacgcacgttctttgccagctcctacgcgctggcccgcggggggacgcgcctactctccagaattcagcattgcacacggcgcgcgtgagagagggtgtgtgtgtgtgaacatgtgtgtgtgcgtgtgtgtgtgcacgtgtgtgtgcacgcgcgcgtgtaggggtgaaggactctccacggccccttggctcgaggtggggcgagccccaagttccccaggcacagcggagcctgggcccaccaggcagcgtcctcactcccaagcacttggggtgtactctgactgagaggagccgggtctgtagttggggctgggcgtagagcaaagtgtgtggtgcacacgacgggctcgtagggggcggggtcagccaactagctgagctctcaagctgggacgcggggtctgggtgccgcctccgcacgccctgcggggtctgtagttcgctccgcgccagcagggggcggggttgataacttggtcctctctatcccaggtgggaggggttggatggagggtttattctgtgcacctaggagcttggtggggtacagaacacgcgcggcgcttagggtctgtggcccgcggcgaacttggggaatgcggtgggggatatggacagagatggggatggggaagtgcctggagacaggggatgaggaagctggatgcgagaaggggctgggggatggagaattagctcgaattggagttgtggatagagttagagatggatcgagggatgtggatggcgtcggggactcggaatggagtccgtgatcccagcagcctatcctgctgctgagttccatgcctggctcctagagcaggaagccaagttggtaatccctttcttctggtcgccttgctcaccgcggccctgcctctcactcttcaccttgcagggaccgtcagtggcgactatgggcagagtgggctattggaccctgctggtgctgccggcccttctggtctggcgcggtccggcgccgagcgcggcggcggagaagggtccccccgcgctaaatattgcggtgatgctgggtcacagccacgacgtgacagagcgcgaacttcgaacactgtggggccccgagcaggcggcggggctgcccctggacgtgaacgtggtagctctgctgatgaaccgcaccgaccccaagagcctcatcacgcacgtgtgcgacctcatgtccggggcacgcatccacggcctcgtgtttggggacgacacggaccaggaggccgtagcccagatgctggattttatctcctcccacaccttcgtccccatcttgggcattcatgggggcgcatctatgatcatggctgacaaggtaaggccggaaactgatgccctgccaggacctgggaagccaccagctgcatggcagctgctgcaggtcttcggacgcccctagaatctgtcttgatgtgaagtgggggtgggggtgggagggtcgtggccactggccctggtgagaaccaggtcttgcctctccaacccagaaatgaatggaaatgccttttgccttgtttctgaaaatggtgtacacaggagcactttggtgtgtgtgtgccaggaagcgctcagaaaactgagaagtaggctgtggggtggtggtggtggcggtggtggcatgtttggagatttacgagtaccatggggcacagaggtgggc

SEQ ID NO: 7116 - DNA, 6000 bp, Homo sapiens
ccaggtatgtggaagagctgctccttgttctttcacttagagaagtctttgtcggttctgttagccagggttctctagagggacagaactaataggatagatgtatatataaaggggagtttattttattttattttattttttattttttttgagacggagttttgctcttgttgcctaggctggagtgcagtggaacaatctcagctcactgcaacctccgcctcccaggttcaagtgattttcctgccacagcctcccaagtagctgggattacaggtgtacaccaccatgcctggctaattttttgtatttaatagagctggggtttcaccatgttggtcaggctggtcttgaactcctgacctcaggtgatccacccgtctcggcctcccaaagtgctgggattacaggcatgagccaccgtgcccagactaaaggggagtttattaaggaatattgactcacatgatcacaaggtgaggtttcacaatagacttcaagctgagaagcaaggaagccagtccgagtcccaaagctgaagaacttggagtccgatgttccagggcaggaagcattcagccccaggggaaagatggaggccagaaaactgaaccagtctagtctttccatattctgcctgcttttattctggctgtgctggcagctgattagacggtgcctacccagattgagggtgggtctgccagtccactgactcgaatgttaatctcctttggcaacgccctcacagacacacccaggaacaatactttgcatccttcaatccaatcaagttgatactcagtattaaccatcacagttgatatagctgctatgaagaagtttttcttatcatctgaaactctttgagcagcaaaattctgcttagcatcctaagctgcattgagaattaagcttggcagcatagatggagtaaggctgtcatgatcttatacacgctgtcacagtctctgcatgtatggtgaagttccaggtgcctgacacacgatgtgctccaccctggtgacatgtccaccccagtgcaactccagcctcctgtgcctatgtttagaggcacagtgtcccttccaatgaagggctgccttctttctctattcaaaagaggccgtatcagtttgatttatctttctataagtctgatcatgaataacttaaaaccctgaataccagtatttttcaagaaagacaaatccaatttcagggtcagcatcaatttatgagaatagcaagtgcagaggcatcatcagaatcccctatggatctaaaataactgtccgtgcttggccccacacctggagatcctgatggagtagatctagagtgggcataggcatctgtgttttattttctttatttattttttttgggacaaagtctcactctgtcactcaggctggagtgcagcagtgtgaacacttgggttgtcatcatgttgccccggctggtttcaaattcctgggctctcatcatgttgcccaggctggtttcaaactcctgggctcaagtgatcctcctgccttagcctcccaaagttctgggagtacaggcgtgagccactgcacccagccacatctgtattttaaaaagtcccatagataaaacccacatatccattgcaggagactggatacacaaagtgtggcttatccatgcaatagagagctagctgctcaacaataaaaaataaaaaagctgttgatacatgcaacaacacagaggaatcttctagacatcagggtaagtgaaaaaagccagtcaccaaagaatacatagtgtaaaattccacttatatgaagttcagaaaagggcaaaactaatacatggtattagaaatcaaaattgtagtttacactgaatggggggagtgggattgacaacaaagggacacaagaaaacttcctggtggtgatgaaaatactctgtacctcattttacgtgacggtctatgtggatacacacaatctcaaaagtaacaaactggctgggtgcagtggctcacacctgtaatttcagcctttgggaggccaaggccagaggatttcgtaaagacaagagtttgagaccagcatggacaacatagcaacacccaatggctacaaaaaataaaaaatttgccagatgtggtggcatgtgctaaccaccacaagtcctaactacttgggaagctgaggcagaaggatcacttgagcctaggagttcaagttaatagtgagctacgaccacaccactgcactccagccagggcaagagtgagaccctgtcaaaaaaacaaaacaaaacaaaacaaacaaacaaaaaaataaaaaaacaccaaaaaaccttcacaaatgaaacccttgagagatatgcattttattgtctataatttataactcatttaaataaaatggcctaacttcccctttagaccccaagccagagtcttgcatgggtgccaaggagtggcctaatcagttcagcccagccatagactcaagaaaggaaacattttcctgttccctgccttatattatacaatcccccattttaatttactttccagcatttccctcacgctttctctgtcttttggattaaaaaaaaaacaaaaacaaaaacccaggaaacccagcatagaacaaccagctcaataatgaatccatttgtctccacacactgtgcccctctcctgtctccatttcagcagccacatccacattcttggaagaagttcccctgcttccaggctacttcaaggtgcatgatgttgattgagcatctactatgtgccagaccttgttgacccctttattaaggctacttccttttcttttcaaaataatcctgagaagtagatgtttttactgccccccatttccagattagtgatcaataaagggaagtaatataatgtccaaaagtgatattttagtttgatccaggtgccatagcaaaacatcatcaacagcagaagtttatttctctcacttcttgaggctgggaggtccaagatgaagcagcagcagactcagtatttggggagggcctagttcctgttcataggccgatgccttcttgattaagtctcacttggtggaaggacctagctgactctctggcatctcttttataagaccacaaatcccattttactctcatgaagccatgaagtcacctcctaaagtccccacctcctaataccatcaccttgggagttaggattttatcctatgaatttgggggtgggaacacacacatttagaccgcagcaggtgacattaggttaagtggaggaggcagggttggaacagtcattgcaaaacctcttagaatttaagacccctttccttccaaggcctgaaaggcagacaggcgttggagatacaggtgaatataaaaggggcagagctcctcccttgaccatgtatttcatgcccagtcgctagaattcaagtcaaccaagccctcacacacccgggccgtcccatgttctctggctcacctcttctggtagcttagaagtggcagcctcagggaggcttctgtttggtagaacttagaaggaagcatgtgggaaatgcagatgtctttgcttttaggattctggctccctgagatcagaggagtgggttcccgtacgggggtggcgaggcacagggagaagcattggagcagactctgtgtgtgtgtgtgtgtgtgtgtgtgtgtgtgtgtgtgtgtcggcgcgcctgtgcgtggagggggataactgtacccagcgcgaggcactgggggaggaggaagcggtagcagagatctgaataattgattcttcagccgcaccagacgcccgggagcgggcggagagcgtggttccaacaccacggacagcagcgcgcgccgccgcaggcgcccccgtcgccagccagccacctatcctggccttatttgccgccgtgcgctctcggaacgggtggccgcgctccgcgtcgccgccgagggactgcggggtctgtctcgacccacctaggagagaggctgcgggcaggagacgctttcgcccgccggagctcgaagcctcttgggcttgagcgggggctactgcgtctcgccggctgagaacaagtccctaagttggtgtggagggcgccgctaccttccttctcctcttcctcggaggcgaccgcagcagaaagacgccccgggaacccggctttgccagtgctgtgaaccagggtgtccaggcgctcaccggactcccgctgggaagtggggagccgaacgcccggcgcggagctggcccagcagcgaagggcccggagggagctgcctttccccgcccgcgcctctctcggccggggaccgcggggatccccggccacacgcgagcgcgctcccacactcacacacacactcgccctcaaacacaccagcccggagctgggttgcggagagggtgctccggcgcgctcagaggaccgggcagttgccgtccggagtggggcaggaagcggagctagggatcttggaggggagctcctagggcttggccggatcatgggaccgggtgagcgctgagaatcgcggccgcagccatcagccctggagatgaccaggagcggccactgctgagaactatgtggagagaggctgcggtgagtgctagcgcgggacgccgggcctgggaggcccccttgggaaggggggaggtgggaggcctgaagagggaggaagcggcaggatcacaagagggtcgctgcgtgggaaagatccacctccctcggggaaccgggaccgcgggagcccgcgtccttccctccccctctcctactgctggctcgtcacaaactcagccagcgcccccccaccctcgttacctcctctttctctccctacctccctcgctcagcagctcccggtcgcacaactcccagcagccggcgctggggaggtggtagggggtgcgggtggaggtgcccagttagcttctcgtgggtggccaacctggggctcccattctcctgtgcaccctggagtggagctcccgctatcagccacaggggctgaggatccgcactgggggcgtcgtgggcatcgggcttcagcttcccccctcttgtctagcccccctgggcgcataggggggcttgtgagcactgcagactgcagccttcccctcaaccctccctcccctcgttggtgggctgaccctgcctctccttctctcctccgccccgttagagccctgctgcagagcctccggctgggatagccgccccccgtgggggcgatgcggacagcgcgggacagccaggggagcgcgctggggccgcagcatgcgggaacccgctaaacccggtggctgctgaggcggccgagatgctcgtgcgcgcagcgcgccccactgcatcctcgaccttctcgggctacaggtacgtcccagagggagatcagggctccttgggccggggaggagggagactcgaccggagggagagcgggagagggatcaggctagagagggagagggaaagcgggagggagcccagcggcgaagtgcaggaggggcaccagggggcgctgcggctccgcgctccgcggcgcttacccaggaacgtcgaggcctcttggagttcgcctcaacttcccccggctccagcagcgtccgtcccgagaggcgcgcgtcagggcacgcgtgcacgaccgtgctggtatttgcaggtacgcagggctgtgcacctgccgcagttcatgcgtgtgcaccacctgaggacatgtgaggactccggctggccgtgggcaccgctacagcagtctgaggaagtgcgcagaaaagcgcgcgtgcctatgagcgtgtgcggcccactgcccacgtgcacctaggacttggcaacagcgcccgcagtagaaaggctagggaggggctgtacagtccacgtccgtctgggagcttcttgggagcctacctttccccctacgcacgttctttgccagctcctacgcgctggcccgcggggg

SEQ ID NO: 7117 - DNA, 6000 bp, Homo sapiens
aacaaaataaataaagtaagcatcaaattatagcccaaagtataaaataagtgtctatgagtctatactcacatagatgatttaatacattcatattaataaatgggagagcactttgagaggccaaggtgggcagatcacttgagcccaggagtctgagaccagattaggcactgtgatgaaaccctgtctctaccaaaaacacaaaaattagctgggcatggtggggcatgcctatagttccagttacttgggaggctggggagggaggattgcttgagcctgggagacggaggttgcagtgagctgtgatctcaccactgcactccagcctgggcaacagagtgaggccctgtctcaaaataaataaatatataaataagataaatatataaataaaaataaaaataaacgggaaagaagagacaaatcttctgtgcaggagaatcccaaatgaattctgtagattctccaccctacaggagggcacacacaactccaggctgccttagtgaccttcttccaaagagtacagtacgggaagggggagcggggagaattaacttcacagtggagaaatctgacaaatacgacctccgccaagtgatcgaggtcacatcagctgtcatgaattatgttgatagtgggcatcctggatatgatgggatgaaatggcactttacctccacgacccttttcacaacagcccgtaatgccagtataaggaaaacatcagaccaggagtggtggctcacgcttgtaatccgagcactttgggaggccaaggtgggtggatcacaggtcaggagtttgagaccagcctggacaacatggtgaaatcctgtctctactaaaaatacacaaactagccaggcacggtggcgggtgcctgtaatcccagctacttgggaggctgaggcagaagaaccgcttgaacccgggaggcggaggttgcagtgagctgagatcgcgccactgcactccagccaggttgacagagtgagactccatctcaaaaaaaaaaaaaaaaaaagaaaagaaaagaaaaagagaaaagaaaaacatcagacagatcccaacagaagggcatcctacagtatacgtgaccactgctcctcaaacctgtcaagactatcagaaacaagagaaactgtcacagctacaaggagatgtgacaattaattgtgatttttttttttgagatgtggtctcgctttgtcacccaggctgcagtacagtggcacaatcacagctcactgcagcctcgaactctggggctcaagtgatcctcccatccatctcagcctcccaagtagctggggctatatgcgtgcaccaccacacccagctaatttttgtatttttttagagacggtatttcgccatgttgcccaggctggtctcgaactcctggattcaagcaatccacctaacttggcctcccaaagtgctgggattacaggcatgagccaccatgccttgccaaatgtgatgtattcttgatgggatcctggaagaggaaaaagatattaggtaaaaactaaggacatctgaataaccatggatttcagtaatgtatccacactgattcattaattgtaacaaatataccgtatgaatgcaagatgttcataatgaggccggggcggtggctcatgcctgtaattccagcactttgggaggctgaggcggaaggatctcttgagctcaggagttcgagaccagcctgggtaacacagtgagatccccatctctacaaaaaattttttgaaattagccaggtgtggtggtggcacatgcctgtagccccagctactcagaagactgagacaggaggattgcttgagccgggaggttgaggctgcagtaagccaggatcacgccactacactgcagtctgagcaacagagcgacaccctgtctcaatgataataataacaataataataataatggaaactcagtatgggttgtatatgggaaacttgctcagtttctctgaaaatctaaaattcttctgaaaatcaaagtctgcttaaaaattcacatggggtttgcattctcctccatgacaaggttttgcaggttatgattacagaggctggagagggtgcaggttatcccgcccctccctgtcccagggattcccttccccaggagctgtgtctcccctgtgagagagggtgagcttccatgaccccaagcctcttgccctctgactccggtattcttagaagctgggaccagcactgagcccaaattcccgaagcgctcaaatactggctttctgtccctatgtgacctggagcttgtagtttaacttctctctgcctcactgtttgacctataaagcagggcaatcaaggcatcccgggggtggctatgaagagtgaatgagatagcagacaacccagatgcctaccgacaggtgaagggaccaacacagtgcggtataggcgtataagggaatggagtatggacacagcctacaacacagacaaaccttgaagacattcctctaagggacataggccaggcatggtggctcacacctgtaatcctagcattctgggaggccgaggcgggcagatcacttgaggtcaggagttgagaccagcctggccaacatggcaaaatcccgcctctactaaaaatacaaacattagctgggtgtggtggtaggtacctgtaatcctggatactcgggagactgaggcaagagagttgctggaacccgggaggtggaggttgcagtgagccgagattgtgccactgcacttcagcctgggcgacagagcgagactctgtcgaaagaaagaaagggaggaaggaaggaagaaagaaagggaagggaagggaagggaggggaggggaggggaggggagggaagggagagagaaagaagaaagagaaagaaaggaagaaagaaaaagaaggaaagaaagaaagaaagaaagaaagaaagaaagaaagaaagaaagaaagaaagaaagaaagaaagaaaagagtgaacccaggaacgaaagatcacacacactgtatgactctatttacatgaaatgttcagagtaggcaaatccatagagacagaaagcacatttatggttgccaggagctgggaaagggcaggatggggaatgactgtttattggatgtggggctctattttggggtgatgagaatgttctggaattaaattcatggctgcataacactgtgaacatactaaatgcccctgaattgtacactttaaaatggttaaagtggcaagttttcactaagcagtaaattaaattctactacaattttaaaaagactaaaaaataatttaaaaaagattaaatgagataacgcaaaaaagcattatctcgaaaatacagctgatattagtataattcttactaagttttaagagtctaaggtgcaggattctaagtttaaagggataggctcttttggttttttggtttagttatttggtttttttttttaatccattatccccacccttgggaggcccccagcacccagtctgcactagaggatggggcccacctcccttttctctccaggcccagccactgaccaccagtaccctggccaggggcaccctcggtcattgccctccgtggcccaaggaagggaacagaaacaacagccaagaagacaatagccgccgggaagtcctcacatttctggagaaatagagcccattaatgaatgaagttcctccagcctgatcggaggacggggtgctggggaggcctgggctaaagggctcacctccagcccccaccctggcagggccgatggtacatgctcactcagtgagggggctccagaggtctgtgggtacgaacccaagggctggtgcccaggggcaatcagcttatgtctctgagccttgggaaacagtgagggtcagcccggctccccacgtgcttctgggcagctttggtattggagcaggtgcaaactcgggactagggcaggaccccctgagaggcgactgagcaaggccatcccgactcatgtttccttggccctgcccggggcacagcatcctgcccacatccctgcagccctggctccttcctaggggctctgaggaggcagcacttggtcatctggtcacagttgctgcagggcagttcttggccccagctgtaggtaaagtactgtatgttgtaattttttgaaagataacacgttcacacaactcagaattgaaatgccacagacattccccctgctccgcccctttcccccggatacccagtttctcccggaggcagccaatgatctcagaggctgtatacccccccagagttattttatgcatatcaaggaaagtctacatagaggactgtttctggggtacccagatgcagcgtcaaatgccatggaatactacagtgaggacattatcctttcaagctttcaaatcagagcaagggaaaggtcgatgctagagtttctctagcacccatgaagccctctccctttttctactgagttttactttacaggcaacagcaggcttcaagcttggggtcattgtcgggcaacagtatctggcaagaattcaatgtctttttctcatagtcattgtattttggcctctttctatttatggcaactgagagagaaagcttattcctagatatatgtatttaagtaaaaaataaatgaattcatggaaacatattaagcaattatccagataacataagggatggcaaaaatggtgcagatggtggaggggagacaagtagaagttggggtgctcttgttgaatgtctggctctgaactctagaggaggccgcaggggctgggcaggaaggaggtgaatctctggggccaggaagaccctgctgcccggaagagcctcatgttccgtgggggctgggcggacatacatatacgggctccaggctgaacggctcgggccacttacacaccactgcctgataaccatgctggctgccacagtcctgaccctggccctgctgggcaatgcccatgcctgctccaaaggcacctcgcacgaggcaggcatcgtgtgccgcatcaccaagcctgccctcctggtgtgtaagtatcagtgcatctgtctgccctgccaggggtcttttcatggacacccactatgccaggagcctccctggcctgaagccagccctgaagccggctgccacactagcccagagagaggagtgccctgggagggagatgggctgagtggagctgtcatcaccccctcctgacctcgccttcaaggtcaagttctttggtgagaaggtcctagctgcattgcaaacagccaggtatagggatttgtgtttgtctgagacccagaatcactggggttcgagttagggttcagatctgagccaggttagggggttgagtcagggggtaaagattaggaggttggtgtatatttggtgttgggggtcactctatggccaaagtcaggggttgccatgagctcaggtgacggaggctccatcactgactgttgtgtgactttggccagctcccctgccctctctgggcctcagtctcttgctcaatataataagggtatagggaggctaaatgatacaatttctaaaatagagtatcgccaagttcaaaagccagaattatagacccccaggactacagacagtgtcacagcatcgtctgggtgaggctagggttagtgtgcggctgggctcagggctgccccatttgctaggatcgtggggttcccatgtgtcaggatccagaggctagggtatgatcaggatctctagctggggtcagggtcagagctctctgtgtcccctagaattgccatcaaccttaaacccagagggaggcccagtccaacccctcagctttaagacctgctgggagcctcatctcagagaggctgagtcatggccaaggccagttgggggtgggagcagggggcttggtgtgggcctgcagcccctcatccactgccctcc

SEQ ID NO: 7118 - DNA, 6000 bp, Homo sapiens
caaaaggcccactgaggagggaagtcgggttgcagggttgggaaaagccaggggcacgtgacagagcttaatcttgattgctggcactcaagaggaataaaagatggcgcagcagaagctggccaggcagctggatgattctggaacttggaaggcataatgagtgaggttttggatagagtctagcggcgtccctggttcaagcactgattggtccccaaccatgtccacatccttgtgaaactgtggggcagggcaaggcaagccagctcaggctctgccccagtaggagaggcaggcaaagagacagagatacaaaacaacgtgtggttaagcatttggaggctggaaatgagttctcctgggcaggatgagggcagatacctgcggtttctgggctaagacgaacctacaggtagctgcaaatctgagatgtgcccaggtgttccatgctgacggcctccttgtctcctgcagaatccaggtgggcattttttacctgctcccaatgcaaggtctgtctgtgagcatctgtcaattcttttaaagtcctacaattgaaagatgaagagccgggctgtgcagtgtgtggtctggagggagcctggcaccctctctccagctgcagggtgaggtgtaggacttagagggaagccaggagatggctctgctggggatggtcaggctgtggccccagcagcacttggcagggatgtttggatggcttagtcctgttggagccttttgcccatttccattagaaacggggacttcaagtctacgttggtgcatgaagttcatgccaatgcaccctgacatttcttctcatctcctggcacaaacttggcccgttttgtacccagacaggcacgtttgagggcctgtttcctttggcatgaaactggggacacatgtgaggagaggggggaccagattctaggctgttcctgtcctagcattgcaggattgaagagaaagtgaatctcactagccagcaaagcagagggtttcagaggcatgcggccggggtgccagtcccaactccaccacgctgtgtgaccctgggcctgtgacttccctcccctatgccccagtctcctcacccctaaacttgcgggtacagcaccacctacctcgtgggctttggggaaagatttgatgagttggcacctgcaaagcataggtcctggtgtgtgcttcacactgaatgggtgtgctgtgtgtttaatgtctacacatgctgtgtgtgcttatatcactgtttttctgcatcccagtgcaatgtactttaccagcattggctcagttcaccctctttgcgcactgtcaagttggctctgctttacagatggggaaactgaggctcagagacctaaacgagcaagccgaaagccacacagctagtaaacggttgtgtgatgtcagtctgctgtgtcaagctgtggcagtggccctgcccccatgtcatccccccagaggagcagccatcatcaccggcctcctcctctgatttgtgttcaccctgcttcctggctcccaagacgtgttccaggggactttcctgagtcattgggtcattgaagagaagaaaaacattcagctggacgcctcccactcccactcctggcccgcttgacatgcacacacaggcacacacacagaaacacacaggtgaactcatacacacatgctcacacacagggtgcacatacaaactatgcacatgtacacacacacatataatctaacaaatgcagaatcatgcacattcagatacgcgcacactcacacctgcatatgtatggtgcaatacctcctggaggattccggctcagccaagaaaaccctagctctctcttttggtctggttggccccgtgatccttctccctcagactctgtgtgaactcagcacagtggccctccctgccgccctgcagtgtgccctgcagtgcggacaggcggcaggagaacctcttcatccactggaaagaggaagaggcaacacacgtacacggtcacctatagcatgccagagcccatgcctgtgcccaaatccctatttatttaacaacccccattgtacggagcagaaaaccgaggggtggtgtgccaggaagtccacccaaggctcacacagctggcaagggacagaacaggatggagacccaggtgtgtgggaccaaggcactgagccaggccccagatctccagtgagcaagacagacctagctcctgcccttgagagggagcacccaggattccggggcggggcagacaggagcaggggacggaaaaatcaataaaatcaatggcaaactcctgcgctggggagctgggatgagaagcgcggaacagcacctgctctagagaggaaagggaggcctctgaggatgatgctgtgaccatggccatacagatgagcccaaaatgcatttgaagcagaagggacagcacgtgccgagccctaaggaacccatgtttaactcacccgctgacctgcatgtccccagccgggcagtgtcttactagcaacctctcggtctgtgtgggacctaatagtccctctttaactgtgcaaggatgcaattcaacagacattgtcctttaaacttttcctaatcagccctcctcctctctccaggtattaaaaatgccaggagccgagaagccccctgccccgctcccaacattccttcaggacagttttgctgacacagcattcctctgggccagggtgaaggcccaaagtcccaaccaatgatgatttcctgttaacccttggactaagggttgagccctggaatatcccccagggattccggaggccttcttcttgcgtttgtttacaatgcatggccctcttccttgccaagaggaagcccagttttatttacatttcagtgtcccagagggtggaggggaccaccgggcacctttgtccccaggctgattctgggctgctgcttgcaaatgaggaagctctaaactgcccagaagtcagacactagtagaattttgaagctggaaggggtgccatttcacagatggggaatgagaggtctggagatgcctagattggaccagggcctgagccagatcatccgggaggatccagggatcctggccttgtcctgccatggacggtcccgtccccatcagcagactggcgacgtggaccagacgtttgcctcgcacggctactcgccctggtggtcaagagtagggcctggagcccgacgtcctgggtctgaattctgcttagcccctttggacgaaaacttaacactcaatgccacttctttcctgtatgtgaaatggggctgatcaccacagttaaccctaagcgcctcgcaccgcaagtccctctgcttgttaaataaatacaatggatctctacacatgcacaataaagacacggaaacagttaatcccctgctgcagctcctgttgaagggaataaaatcaggacccagagaggttgattcactgaccttgggacacacaggaccctttctacctctgctggtgacccagtgacccctgtcgatggtgggaaggggcagagcaggcctcagactgtccgcaggatgatgcattcactaacgggttctaggagacggggacggctcctcttttctctctccaaaattagaacgcggggccctgaatggtatccccaactcgggcctgttcgggactgtaaatggctttctcgcttggtccccccttttgagagggtcggacaaccctgaacgaacccggcagggtgcctgcatctaggctggggctgccctcactgcagccctggggtggggggttcctccgcctccaggggcgcccgcagcgtccttacctggctcctcccgcgtcctgattgacctttacttaaagaccagctccagccgctgatgggtttcggcgggtcccccaggagacccttcagacggctagagccgggcgcgctgcagagagcccctaattggggcaatgaatcatcgcgcgcggctccggctggacacaaaatagatagaggagccggccgctattgtgcgcagtttgggacgcggggggaggcggcggcgggcgggagggaggcaggcttggaggaggagggcggggggagggagcgcgcggggagggattcccccgcccgccgcgcgcccgccctccgcccctccccgcccctcccgcccgccgccgccccgccccctcctccccaattaaatgaccccacgccttggcaggcgccggagctcgcacatgcggctgccgctccagccgcccgggccccgccgccgccgccgccgccgccgccgccgccgccgcgttccgggcgcgctcgccgcggcgccgcctcggcccgcgccgccgccggggggtgctcggcaggcccgggggggcgccgctgcgaggggccgtgcgcccgcgcccgcgccggccgcccgccgccaaactttgcggcgcgcacacatgctccaagttgggcgcggcggcggcggcctgggcgggagctgagggcggcccggggcgcgcgggggcccgggcgggcggcgcggcgcggccatgagcgggcggccggccccggtctcccgcaagcagcggctcatggcagccgtgggcgagcgggctgcgggcggcgcgccgctctcctgcttcatctgcggcggcggcatcgggcgcggcaaggagctgaagctgcaggtgaagcagccggcggcgggcgcggggaccccggcgcagcccttcttcccgttcctgcagcagcaggagccggcgcccggcgcgcgcgagctgtccccggccgacggctgcgtgttggtgtgcgccgtgtgccgctgcttcctgggcgagcagtgggccgccttcgagcgcgcccgcacgccggtggacaagcgcatgtactggctcaagcggccccaccagtgcgacgcgggcgcaggcggccgccgtggcggcgccggggccccccgcgagtggaacgtcgcctacgcgctgggcagcgccaccggcgacgacgacgaggacgacggtggcggcccccggctgcgcggggccgcggaggagacgcgagactccgacctgtcggagctgtcggacaccgaccccctttccgagcccgacccgcccgcgcgggacgccgccagcccccaccaggacggggccccagggccagggcctcgcggggggcgcggccaggagtggaggccggctccgggacccgctccgggacagggcgcagaggcctcggcgcaggggcgcgcggaggaggaggggctccccgcgaaggcccacgcggatggggagcccaagtccggggttaggcgccggcggaagggggttgggaggcactgggttcccgaggcccgggccagcgtcctgaggagcattcaggatccctggcaaggccctcttgtccaagaggcccctgcagacggcatgaaagggcctccctctggcagagccactaagaccctggagagcaggccgctgggggagaccctacggggcttctgcacctccgaggacagtgacatcaacatcaccagtggggaagaggaccacaaggaacagcctttcccaggcgtctgcaaccccaaagagaagaacagtggccgtgtcccccgggctctccaggacagccgggcggcaccagcagaaggcctttgctgctacatctgcggggccccgctgtccccggcctcgcaccaccaggtccacgtgcagaagcaggagaagctggctcaggccccgttcttccccttcctgtggctgcacagcccgcccccaggggcacagcccatcagcgagggcggcagtaccttggtgtgcgccagctgcttctcctccctcacgcagcagtggcagagcttcgagctggccaacgtgccagtcctgcagcgactctatgtggtgcccctggacagccacgcccccggcatggcctctaagggcaggaggctcccgagggaagagggcctgccctccggggccctgcgag

SEQ ID NO: 7119 - DNA, 6000 bp, Homo sapiens
catgctgtatgtgtttcatgtttatatttaacaaattagcacaataaatgcacagaaaatgcaacaaaatttcatcagccccaaagctggcaacttatcctgattccaagaatggttcccctggggaaatccctgcttcttggagcctcagtttctctgtctttaaaatggatgtgatgcctccatgtactgctgtgtcacatgagtgcatggaggtgaaccggttcataagcccaaggcctccacaaatcccagggatttttcgttgttaacagttacattctttccctctgagaaggaggatatatttttgccagtggcctgccatgtctgaagctctttctgaggatagcagagaagggcttgcttcgttcttaggcaaaaagaataaaaaagaatttaaaaaaaaagaaaaagaaaaaaagaaagaaaaaagaaaaaatagggcagtcagatgataaattttgtttttctggtccccagtgagccagaggccaaacacagcacacgttgtctctgaaaagaagaggatggaccagcctaagaaggtaaatgggtcctgggcgggatgccaaaggcgcaggcatagtttagaggaaggaggaaaagggcaaaaggcccactgaggagggaagtcgggttgcagggttgggaaaagccaggggcacgtgacagagcttaatcttgattgctggcactcaagaggaataaaagatggcgcagcagaagctggccaggcagctggatgattctggaacttggaaggcataatgagtgaggttttggatagagtctagcggcgtccctggttcaagcactgattggtccccaaccatgtccacatccttgtgaaactgtggggcagggcaaggcaagccagctcaggctctgccccagtaggagaggcaggcaaagagacagagatacaaaacaacgtgtggttaagcatttggaggctggaaatgagttctcctgggcaggatgagggcagatacctgcggtttctgggctaagacgaacctacaggtagctgcaaatctgagatgtgcccaggtgttccatgctgacggcctccttgtctcctgcagaatccaggtgggcattttttacctgctcccaatgcaaggtctgtctgtgagcatctgtcaattcttttaaagtcctacaattgaaagatgaagagccgggctgtgcagtgtgtggtctggagggagcctggcaccctctctccagctgcagggtgaggtgtaggacttagagggaagccaggagatggctctgctggggatggtcaggctgtggccccagcagcacttggcagggatgtttggatggcttagtcctgttggagccttttgcccatttccattagaaacggggacttcaagtctacgttggtgcatgaagttcatgccaatgcaccctgacatttcttctcatctcctggcacaaacttggcccgttttgtacccagacaggcacgtttgagggcctgtttcctttggcatgaaactggggacacatgtgaggagaggggggaccagattctaggctgttcctgtcctagcattgcaggattgaagagaaagtgaatctcactagccagcaaagcagagggtttcagaggcatgcggccggggtgccagtcccaactccaccacgctgtgtgaccctgggcctgtgacttccctcccctatgccccagtctcctcacccctaaacttgcgggtacagcaccacctacctcgtgggctttggggaaagatttgatgagttggcacctgcaaagcataggtcctggtgtgtgcttcacactgaatgggtgtgctgtgtgtttaatgtctacacatgctgtgtgtgcttatatcactgtttttctgcatcccagtgcaatgtactttaccagcattggctcagttcaccctctttgcgcactgtcaagttggctctgctttacagatggggaaactgaggctcagagacctaaacgagcaagccgaaagccacacagctagtaaacggttgtgtgatgtcagtctgctgtgtcaagctgtggcagtggccctgcccccatgtcatccccccagaggagcagccatcatcaccggcctcctcctctgatttgtgttcaccctgcttcctggctcccaagacgtgttccaggggactttcctgagtcattgggtcattgaagagaagaaaaacattcagctggacgcctcccactcccactcctggcccgcttgacatgcacacacaggcacacacacagaaacacacaggtgaactcatacacacatgctcacacacagggtgcacatacaaactatgcacatgtacacacacacatataatctaacaaatgcagaatcatgcacattcagatacgcgcacactcacacctgcatatgtatggtgcaatacctcctggaggattccggctcagccaagaaaaccctagctctctcttttggtctggttggccccgtgatccttctccctcagactctgtgtgaactcagcacagtggccctccctgccgccctgcagtgtgccctgcagtgcggacaggcggcaggagaacctcttcatccactggaaagaggaagaggcaacacacgtacacggtcacctatagcatgccagagcccatgcctgtgcccaaatccctatttatttaacaacccccattgtacggagcagaaaaccgaggggtggtgtgccaggaagtccacccaaggctcacacagctggcaagggacagaacaggatggagacccaggtgtgtgggaccaaggcactgagccaggccccagatctccagtgagcaagacagacctagctcctgcccttgagagggagcacccaggattccggggcggggcagacaggagcaggggacggaaaaatcaataaaatcaatggcaaactcctgcgctggggagctgggatgagaagcgcggaacagcacctgctctagagaggaaagggaggcctctgaggatgatgctgtgaccatggccatacagatgagcccaaaatgcatttgaagcagaagggacagcacgtgccgagccctaaggaacccatgtttaactcacccgctgacctgcatgtccccagccgggcagtgtcttactagcaacctctcggtctgtgtgggacctaatagtccctctttaactgtgcaaggatgcaattcaacagacattgtcctttaaacttttcctaatcagccctcctcctctctccaggtattaaaaatgccaggagccgagaagccccctgccccgctcccaacattccttcaggacagttttgctgacacagcattcctctgggccagggtgaaggcccaaagtcccaaccaatgatgatttcctgttaacccttggactaagggttgagccctggaatatcccccagggattccggaggccttcttcttgcgtttgtttacaatgcatggccctcttccttgccaagaggaagcccagttttatttacatttcagtgtcccagagggtggaggggaccaccgggcacctttgtccccaggctgattctgggctgctgcttgcaaatgaggaagctctaaactgcccagaagtcagacactagtagaattttgaagctggaaggggtgccatttcacagatggggaatgagaggtctggagatgcctagattggaccagggcctgagccagatcatccgggaggatccagggatcctggccttgtcctgccatggacggtcccgtccccatcagcagactggcgacgtggaccagacgtttgcctcgcacggctactcgccctggtggtcaagagtagggcctggagcccgacgtcctgggtctgaattctgcttagcccctttggacgaaaacttaacactcaatgccacttctttcctgtatgtgaaatggggctgatcaccacagttaaccctaagcgcctcgcaccgcaagtccctctgcttgttaaataaatacaatggatctctacacatgcacaataaagacacggaaacagttaatcccctgctgcagctcctgttgaagggaataaaatcaggacccagagaggttgattcactgaccttgggacacacaggaccctttctacctctgctggtgacccagtgacccctgtcgatggtgggaaggggcagagcaggcctcagactgtccgcaggatgatgcattcactaacgggttctaggagacggggacggctcctcttttctctctccaaaattagaacgcggggccctgaatggtatccccaactcgggcctgttcgggactgtaaatggctttctcgcttggtccccccttttgagagggtcggacaaccctgaacgaacccggcagggtgcctgcatctaggctggggctgccctcactgcagccctggggtggggggttcctccgcctccaggggcgcccgcagcgtccttacctggctcctcccgcgtcctgattgacctttacttaaagaccagctccagccgctgatgggtttcggcgggtcccccaggagacccttcagacggctagagccgggcgcgctgcagagagcccctaattggggcaatgaatcatcgcgcgcggctccggctggacacaaaatagatagaggagccggccgctattgtgcgcagtttgggacgcggggggaggcggcggcgggcgggagggaggcaggcttggaggaggagggcggggggagggagcgcgcggggagggattcccccgcccgccgcgcgcccgccctccgcccctccccgcccctcccgcccgccgccgccccgccccctcctccccaattaaatgaccccacgccttggcaggcgccggagctcgcacatgcggctgccgctccagccgcccgggccccgccgccgccgccgccgccgccgccgccgccgccgcgttccgggcgcgctcgccgcggcgccgcctcggcccgcgccgccgccggggggtgctcggcaggcccgggggggcgccgctgcgaggggccgtgcgcccgcgcccgcgccggccgcccgccgccaaactttgcggcgcgcacacatgctccaagttgggcgcggcggcggcggcctgggcgggagctgagggcggcccggggcgcgcgggggcccgggcgggcggcgcggcgcggccatgagcgggcggccggccccggtctcccgcaagcagcggctcatggcagccgtgggcgagcgggctgcgggcggcgcgccgctctcctgcttcatctgcggcggcggcatcgggcgcggcaaggagctgaagctgcaggtgaagcagccggcggcgggcgcggggaccccggcgcagcccttcttcccgttcctgcagcagcaggagccggcgcccggcgcgcgcgagctgtccccggccgacggctgcgtgttggtgtgcgccgtgtgccgctgcttcctgggcgagcagtgggccgccttcgagcgcgcccgcacgccggtggacaagcgcatgtactggctcaagcggccccaccagtgcgacgcgggcgcaggcggccgccgtggcggcgccggggccccccgcgagtggaacgtcgcctacgcgctgggcagcgccaccggcgacgacgacgaggacgacggtggcggcccccggctgcgcggggccgcggaggagacgcgagactccgacctgtcggagctgtcggacaccgaccccctttccgagcccgacccgcccgcgcgggacgccgccagcccccaccaggacggggccccagggccagggcctcgcggggggcgcggccaggagtggaggccggctccgggacccgctccgggacagggcgcagaggcctcggcgcaggggcgcgcggaggaggaggggctccccgcgaaggcccacgcggatggggagcccaagtccggggttaggcgccggcggaagggggttgggaggcactgggttcccgaggcccgggccagcgtcctgaggagcat

SEQ ID NO: 7120 - DNA, 6000 bp, Homo sapiens
aagcaagggaaaataaaaagacattatcagaatcataaccagcaagggtatgaactatggaaacagaaaatagaatacaatcatgttcctttatgtcttcattttaaaataattagcttcttaacaaaaaaagagagggcagggaaattcaattcatgatgtgggatatgcaaagatgaaataggatatgtcctcggtaggcctcaaagtacttaaaaattcagtacaccaaagtatcagggacaaattatagtgcaatgagaaatgggaaaaaaaaaatagtcaaaattataatcaggttataaaaaaataagatataatgctattttttctaaatagtttaatcaataacaaaacttcttcctactattcaatcaattgtaattatttgtgttcaatctatgcaaagtaggaatctaatgacaaacaaatggttctctacagtgtgagtgagactattttacaagcttttatttattttaaaaaagcaaaagtaaaaacaataaaacaccttaaggcatagcctttttttaggtctaggtttcaactcacattatttcttaaccccatttctgctcaaatattttatttttttaatcatgccatgcattcagcaatacacagaatgtaaatagattatacaaataaagtaatatatcttctatggatactcaagcaaagcatgaaattcaattttagaagtgagggaaattattaaggaaatataatacttttatggccatagttttatttttctttcaacatcatagagctatgcctcattgtttcagaaagttattcacatcccttaaatagtacatatatgtcctatatcttgcagatgtatagtactatattattattacagcacaacacagcatatgacaacgcattactcattcaaatatgagtgctaatatggagattatacaaattactagatgatccttagagcatgactggatccttcttattcttcagtctcggcttggatatcccctcctcagagaaggcatccctgatgaccccatctaaatgaactctgcctctatcactatcacattaccctgctgtttcccaattttcatagcacttaccactatctgaaattatcgtgtttatttccttgatttttgtctgtcttcctccaccaaaatgtaagcgccataagtacaggtaccttttcagtcttgttcactgaatccccattacacagaacagtatcagcacacagcaggcacttgataaaagtattgaataaatgaataagaataataataagctcaaacaataatgtaaaccagaagaaaaaaagaaggcggactatacaccgaagctagcaaggaagagtggaatttagagaatggaaatttcaccatggctctagtcccagagaaactggtacctcttaaactgcaaaggtaaccatttaagaagtgagcagtctgtatcccatgattaagcaagaggacactatgcctttcacactacaattaccactgtcagcaaggttttattttaagggagccctgactacaaggctaccccagccacaaatctactgctctatatcttgccatcaggcatcactggtccacttccagtaataatttgtcagctacagcaggttcagacatgccgtcttctccatttataccacagagaaccactgacccttgtgcaaatgagcctctttgcaaaccccgtagactcatggtcctatctgctccttacccgtgctctgccagacatgtcactgaaaagagtggtaaaagtaacacagaacagatcctgctttttttttgcagaacctagtgtttctttgcccatcagttccgccaaagacgcaaacttcttgtaaaagcggtaaaggggaagatttcttattcagatgcgtactagctgcaagttcttggcaagccagttaccatccccacacctgtttcgtcctctgtaaaagagggatgatcacggtatccgtctcaaaggaatgttgtaagaattcaatgagctaatgcatgtagggcaattaacgtagtgcagaacacgcagaaagcaacaaataatggggactgcttttcttattaagaggataatgatgatgacgatttttagcagtagagtatgaattcctggagggcagcgacagtgcttggttccccgtaggtttcaaatgaaactgaaaaatatagaaaaggggacaacggcttcctcatttccctgtccctagacctctccccgtcaaatcaatctcgagatggctgccatttgcctaaactgggggtagggagcttggatcgtaaccagaatagaatcaaagggtgggaaccatctagcagctccaggggcaatcgattactttattatcctcaagtttatgccccagagtggcaaaggcgaagtaagcagcgctcctagggccttggttgtggaaacaggggctcataaatggccaatgcacaccccggggaagcctccctctccagcaccgtgggagggagaagaaaaacggcccaaacaatttgatcaccacgatggggttctccggctctggcccgagttttattcaccagggacggccccctgccctctccccagcgccccatgcccacctcctccagctcctccgatttaagactccaaaccgagggccctccaggcggggccagcatcggagcatcacctcagcgcccggtgctggctgcccccggggtcccgcctcccaacagccggcgcctttccagggggctcgaggcccgggagcccagcacagagcccgccctcagcttctcagggcgccaatttcgcctcgccagaccacctctcagcccggacccgtcaaggctcaagccccctcctcatgcacacacctgatcccccacggccccttcagctcctctcccctcgccacgggccttgtcaggaagcgaatggctcaaatggtactgacagagcgcagctcggtccgccgccgccttctcctcctcctccccgccatattacggatctcaggctgcaacgcgggctcctggcaaccgccgccgctgccaccccgactccacctctcagggccggcacttccggtggttgattcccgggctgttaaaaccgttgggccaccagaacactaccatccccgaggtgcattgcgcgcccgcgatggaggacgtaatgcttacggccagcacgctgcacgccgggaaacgtagtcttccttgcaagctagagactagaatttattaataaatttacttatttagtagaataggaacacccctcagggtctgaagccccctgaagtgttccttgaagttgccatttttttcttatctgtataaagataacccctttctatgcagccgttagaaaacatgtaacattcaccaaaatattttcttgtaggtaaaaacttgctgaacccaccgggcgtgatggcttacgcctataattccaacattttggaagccgaggcggaaggatcgcttgagcccaggagttcgagatcagcctgggcaacaaagggagacggcatctctacaaaaattttaaacgttagccgggtggggtggcgcgagcctgtgatcccagctactcgggaggctgaggtcggaagatcgcttgagcccaggaggtcgacgttgcagtgagccatgattgcaccactgcattccaacctgggcgatagagtgagactgtctgaaagaaaaaaaaaaaaaggctgaatcctagatgccaactggaaggcttaagacatctatccccttttgcaaatcagtgggaaaatgcactaaaggaaaaaaaggtaacagaaaaatccctgaatatttttgcaaagttctctacataaaaatgttaccagccctccaaaatatgtccaggggccccttttcactccctaactcggcttcatggtctatctctcttaccctccttccagtgcctgtttttgcatatgtaaaatgggggttttaaaagtgcctatcacaagggtggttgtgaggcacagttgaggtaactcctgtacagtgcctggtacaaaagcccttagcagaagtaagattagggggaggaggagtgaaaatgtcacaaatcactggggaggcctttatgtcagtccccaccctgccattaactgcttaattcacctatcctcagtttccgcatctatgaaataagggaatccttaaaaccccttccagttttataatccgattgtgccttctttgctaggctcttccagtcccccagaatctggaaaataaagtcgattgaaatcagtctcctgatagtaactgttaggctgtattgagaatgagataagcatataaagtgtttgctcgtcaagtacctgggacatggtaagtgctctgtaaacgttaggtgtacttgctaacttttatttcctcccacaagaatgtgaatcccataagagcaaaaaccctgtaggtcctgttcaactgtgtccggagcacctggaccggtatttggcacatcttgaattgaactgaactgaactgaattgaattgaattgaattgatagtctaagcatcctgcctctccaggttccctggaattcagtttcctcaagggcagataaaggagtcactaaaatcccttccagtcctacagctttaggatggttcttatccctccttttctcgcctaggagtctgaacgcccaggttgaagttcagacctcggaaaaccctaacccaccttagatttggaacgtgagcctggggcctggggcctgggccctcccccgttgccatggagcggctccgcccactggcgctgcgaatcccgatccctgattggctgggcggccgactccctctctggatgtgtctgctgccgccattgtgcggcgctggtcccctcagagggttcctgctgctgccggtgccttggaccctccccctcgcttctcgttctactgccccaggagcccggcgggtccgggactcccgtccgtgccggtgcgggcgccggcatgtggctgtgggaggaccagggcggcctcctgggccctttctccttcctgctgctagtgctgctgctggtgacgcggagcccggtcaatgcctgcctcctcaccggcagcctcttcgttctactgcgcgtcttcagctttgagccggtgccctcttgcagggccctgcaggtgctcaagccccgggaccgcatttctgccatcgcccaccgtggcggcagccacgacgcgcccgagaacacgctggcggccattcggcaggtgagacccccacgttcgcgcccctcggtcctcccgagagctcggacttctacttttccttcccagggttccccgatcttctcaggacggccttcccacttcctcattcgtccacaaggcacactcccggcccttgatcgctcccagtgtctagggatctccggacttgaggttttatatttacagaagacagcagatatgtatatagtttctgtgcgcctgacgctaaggttacatacagccaggaacaaggtcaaaagtgtccctggtttacagagtgtacatcggaatgggggaggcaagccttaaacaagtaaacacataaatgagataactttaagagagtgaaaggtgcaatgaagaaatcgggggaactcgaaggaaagagttacgctattttatttagatggaatagtcaagagaaatcgtctccgaagaagcaacatttgaacagaaaccggaattataaggagccaggcaggtgcagaaggtcctgagatgggaataatataggggtgttcaggtaacagaagaggcagtgtgtggcctgacttcaaggaagagaacaaagactggtgtgtgaatgaagtagaaaatgggtcaggtcaaataggttcttggtcagtaattgaggttagtctaaatagatcacccttcacaagacatacgtttgcttgtcttgtaaatcacttgagtcatttccttatcaccttttccccagacacacacattcgcactcgcacaa

SEQ ID NO: 7121 - DNA, 6000 bp, Homo sapiens
gccgagatcacgccactgcactccagcctgggtgacagagtagcacacaaaacaaaaaaaaaacacaaaacaaaacaaacccaaaaacaacaaaacaaaactaagctaaaataataatgataataataataataataataataataataatataggaaacaggtgcacatgcaatgcttctgcacttttcttaaactattagcaaagttgccattcttcatgttgttccaagtcacttaaataaagaccttctgggcaggccggggagatttatgggagaccaaaataaacatgacctttctctgcccttcctgagagaaccaaagctagaagcagctgggtcacacttggccattaacccccaggcatgaggaggagcagacagcaaccaacaaggggaagtggtcgccagaggccaaggcccttcttgaggtgcccagaaggggatgcccacttatcagggagcccaggtggaaaaacaagagacagacacagacgcagagggaagataatttagattcggtctgtgtcattggcctttctcagcagcaactggcccaggaagttcagatgctacccagattcagggttttttttgttttgttttgagacggaatttcctcttgttgcccaggctggagtgcagtggcgcgatctcagctcactagaacctctgcctcccaggttcaagtgattctcctgcctcagcctcccgagtagctgggattacaggcacctgccaccaggaccagctaattttttttgtatttttagtacagacggggtttcactatgttggccaggctgctctcgaactcctgacctcgggcgatccacccaacttggcctcccaaagtgctgggaatacaggcgtgagccaccatccccagcgttgttttttttttttttttgacagggtctcactcccattgcccaggctggagtgcagtgacacgatctcagctcactgcagcctcaacttcctggcctcaagtgattctcctacctcagcctctggagtagctgggacctccggtgcgcaccaccacgcctggctaatactttgtatttttagtaaagacaggatttcaccatgttgcctaggctggtctcaaactcctggactcaagcaatctgcttgccttggcttcccaaagtgctgggattacagacatgagccactgcgctgacccagatgcagtttttgtttgttttgagacggagtcttgctctgttgcccaggctggagtgcaatgcactcggctcactgcaacctccgcctccgaggttcaagtgattctcctgcctcagcctcttcagtagctgggattacaggcacacaccaccctgcccagctaatttttgtatttttagtagagatggggtttcactgtgttggccaagcttgtctcaaactcctagactcaagcaacctgcccgcctcagcctcccaaagtgttaggattataggggtaagccaccgcatccggccccagatgcagttttgagatctatttcccctgcaccaggattttttcaacaggaaatgacgaggagctgctggaagctagccttgtattgtctttaaggaggatttctgccccaggtgaaataacgtgtcagaccaagccccctcatgctctcaggaccaagagacctagtctgatcttgtccctcaactccatgccttagagaatccacctgtgcctcctccacaacagttgttgtaatgcccaaactagacctctgctgggctgttagccaaccctggatcccctctccactcctccatgcccgatccagacctttgaagcaaggttcagctactgctgtggtgcctcccccaacccccatgaccctgattagccctcaccagcactacccatgatttcccttagccagtatcaccataataaagaaatgagatgcaaactgatcagggtgcaggtagatctcttcccgagaggataactgctaactaacatttgatgtgtagactcttctggggtctttttgtgtccggaattggtgggttcttggtctcactgacttcaagaatgaagccacagaccctcgcggtgagtgttacagttcttaaaggtggcgtgtccggaatttgttccttctgatggttggatgtgttcggagtttcttccttctggtgggttcgcggtctcgcaggctcagaagtgaagctgaagaccttcgtggtgtcacaggtctcaaggcgccgagtccggagttcttcgttcctctccgtgggttcatggcctcgctggcttcgggagtgaagctgcagaccttcgcagtgagtattacagctcatacagtatggatccaaaaacggaatagcagcaacagccattgcaaacagcaaaagaacaaacctcccactgcctggaagagaaccccagcaagttgctactgaaagagcgggcagcctgcttttattgtcttatctggccccacccacatcctgctgattggtccattttacagagagctgattggtctgttttacagagagctgatgggcccgttttgacagggtgctgactggtgcgtttacaatccctgagctagacacaaaagttctccacgtccccactagattagctagatacagagtgtcgattggtgcattcacaaccccggagctagacacagggtgctgattggtgtgtttacaaaccttgagctacatacagagtgctgattggtgtatttacaatcccttagctagacataaagattctccaagtccccaccagactcaggagcccagctggcttcacccagtggatgctgcaccggggccgcaggtggagctgcctgccagtccggcgccgtgtgcccgcactcctcagcccttgggcagtcgatgggactgggcgccgtggaacaggggttggcgctcgtcggggaggcttgggctgcacaggagcgcacggcgggggtggaggctcaggcatggagggctgcaggtcccgagccctgcccggcggggaggcagctaaggcccagcgagaagtcgagcacagcagctgctggcccaggtgctaagctcctcactgcccgggccggctggccgctccgagtgcggggcttgccaagcccacgcccacccggaactcgagctggcccgcaagcgcagcctgcagccacggttcccgcccacgcctctctctccacacctacccgcaagctgagggagccggctccagccttgtccagcccagaaaggggctcccacagtgcagcgacgggctgaagggctcctcaaacgcggccagagtgggcgccaaggccgaggaggtgccgagagggagcgagggctgtgagggctgccagcacgctgtcacctctcatttttgtgtctgtatactaacatatatatagaaaaaaatattcggcccggtgcggtggctcacgcctgtaatcccggaactttgggaggccaaggtgggcggatcacgaggtcaggagatcaagaccatcctggctaacacggtgaaacccggtctctactaaaaatacaaaaaattagctgggcatggtggtgggcgcctgtagtcccagctactcgggaggctgaggcaggagactggcatgaacccgggaggcggagcttgcagtgagcagagatggagccactgcactccagcctgggtggcacagtgagactccgtctcaaaaaaaaaaccacgtctctaaaaaagaaataaggccggacgtggtggctcatgcctgtaatcctagcactttgggagacctaggtgggcagatcgcttgagctcaggagttcaagaccagtctgggcaacatggtaaaaccctgtctctaaaaaaaaatgcaaatatacaaaaattagctgggcatggtggtgcatgcctgtagtccctcccagctacttagggagctgaagcaggaggatcacttttacctgggaggtcgaggctacagtgagctgagatggtgccactgcactccagtgagaccctgtctcaaaaaaaaatttgttttaataaaataaaaaataacaattagccatgcatggtggcactgcacctatagtctcagctacttgggaggtggaggaaggaggatcgcttgagctcagaagttcaaggctgcagcaagctatgatcaaggctgcagcaagctatgatcaccccactgcaactccagcctgggtgacagatactctgtctcttggagaaggaaaaaaagctaaaataatgatccccaacaaaaattgttcttaaatttcattttcggggccgggcacggtggctcacgcctgtaatcccagcactttgggaggtcgaggcaggaggatcacttgaggtcaggagttcaaggccagcctggccaacatggtaaaaccccatctctactgaaaatacaaaaattagctgggcatggtggcgggcacctgtaatcccagctactcgggaggctgaggcaggaaaatggcttgaacccgggacgtggaggttgcagtgagccgagactgcatcattgcactccagcctgggcaacaagacccaaactccgtctcaaaactgaaatgagatgaaatgaaataatgaaatgaaatgaaatgaaatgaaatgaaatgaaatacctatagggaatctttctgtccatcaaaccagacagaccgaattaactcttctgagtcgcagcttagaatatttgacctgcctaggagctgggcacaagccggcagctaaccgccacgtgggcctgggtaggaggtgagatcaggaagatccctgggcccctactagttccctgcctggcctcctcccccactcgtgtgggggtctacggagccagcgctgggggtggaagggcgaggagtcctcgacgctgcagcggcggttccggcccatgggggcgctctcctgcttgggggcggaaaagccgtggcgcccccttgcgtggcgcgtcggtctcagagtcgcgtgacttcaaccccctcttcgggaggctgggtcgtcatgatccggaccccattgtcggcctctgcccatcgcctgctcctcccaggctcccgcggccgacccccgcgcaacatgcagcccacgggccgcgagggttcccgcgcgctcagccggcggtatctgcggcgtctgctgctcctgctactgctgctgctgctgcggcagcccgtaacccgcgcggagaccacgccgggcgcccccagagccctctccacgctgggctcccccagcctcttcaccacgccgggtgtccccagcgccctcactaccccaggcctcactacgccaggcacccccaaaaccctggaccttcggggtcgcgcgcaggccctgatgcggagtttcccactcgtggacgggtatgtaggtgcagcgtttgggcaacgcggggtgagcacacccttgggcaggagaggaggttctgagcatgctatcaaggaggctatcaaggaggctccctcacaccacccctggatgccctctctcctccatcacccatgggtgcccttccccgcattactccattcctggtggaatctaaccccctccctccaacccaacctcaggaggtctctatatggtctgtgtgaggaggtgcctggtggggtggaggagggtagacccaagcacctgatatatcctgactgatctggaggcggtgtttccatctgaccttcacacccccagccacaatgacctgccccaggtcctgagacagcgttacaagaatgtgcttcaggatgttaacctgcgaaatttcagccatggtcagaccagcctggacaggcttagagacggcctcgtgggtgcccaggtaccacagggacacacagggtgccacagcatggctgctgggggatgttggggtcacagaaacctgggtcagccagcctctgggtgactaaatacaatggggcatgcagtgtgccatcatgtggtttctaaggagagtggggccttggaggccaagacaggctagctgcatgtatgc

SEQ ID NO: 7122 - DNA, 6000 bp, Homo sapiens
ctctactaaaaataaaaaaattagccaggcatggtggcgtgcgcctgtaatcccaggaagctgaggtaaggaatttgaggcctttcctagaggcagcagctggaagtggagggattgaaggaacccctcatctgaccagctgctcaattttcttacccacacgataaggctggttccttaactacacggccacgtgaaaaaaacaaaaaacagggccaggcacagcggctcatgcctatattccagtactttgggaggctgatgtgggaggatcacttgaggcccggagttcgagaccagcctggacaacatgacaaaaccccatcgctactaaaaatgtgaatatttagctgggagtggtggtgggtgcctgtattcctggttactctggaggatgaggtatgagaatcccttgaaccctggaggcagaagttgcagcgagccgagattgcgccactgcactccagcctgagcaacagagcaagacttcatctcaaaaaaaaaagaaaaagaaaaaaaacacaattttgggtccaggccctctgggaagatgactgcagtacaaggggccaaggttaaagtggatggtggtgagtcaaaactgagcaagaacaagccgaagagatacctgaaagccgagaagaaagtggcagagaaggcagccaagcagtaagagctcagtgagaaacagctaagcccaggtcactgctgctgccaccaaccataccactgacaatggtgtgggtcctgaggaggagagcctggacccaaatcagtactacaagatccacagccaaggccaggcccggtggttcactcctgtaatcctagcactttgggaggctgaggcaggcagatcacttgaagtcaggggttcgaggccagcctggccaacatgatgaaaccccatctctactaaaaatacaaaaattagctgggcatggtggcacatgcctgtaattccagctacttgggaggctgaggtaggagaatcgcttgaatctgggaggtggaggttgcagtgagctgagattgagccactgcactccagcctgggcaacagagcgagactctgtctcaaaaaaaaaaaaaaaaaaaaagatttgcagtcaggtaggtcaatgggaaagacccataccccaacgagatccatgtagacatctccctcactgacttcatcccagaatattgtcacctgcaaactggggatctcctgactgatatcaccttaaacgtgacagataggatccatgccaaaaaagcttttggaggaaagctgaacttctatgatctttttttttttttttttgagatggaatttcactattgttgcccaggctggaatgcaatggcacaatctcagctcactgcaacctcctcctccctaggtttaagcaattctcctgcctcagcctccctagtagctgggattacaggcgtgcgccaccacgcccggctaattttgtatttttagtagaggtgaggtttctccatgttggtcaggctgatctcgaactcccaacctcaggtgatctgcctgcctgccttggcctcccaaagtgctgggattataggcgtgagacacagtgcccagccatgaacttctatgatctttgagcagagggggtcaagttgcaagtcatggccaatttcaggaattataatttcaggaagaataatttattcatattaataacaaactgcgttggggaaacataattggaattcagaggaatcctgggaaaaaccaagaaggatgagctgagcttcattccctatgagatcacactgctgtggccttgcttgtatatgttacctcatcttcactttggcctcaaagacaaggaaataaggtatggtcagagatacttggacttgatcctgaatgaatgaggcagaaatttatcatctgctgtaagatcatcacatgtataataagtttcttaggccaggtgcagtggctcacgcctgtaatcccagcactttgggaggccaaggcaggcagattgcctgaggtcaggagttcgagaccagtctggacgacatggtaaaaccccacctctactaaaaatacaaaaattagatgggcgtggtggcaggtgcctataatcctagctactcaggaggctgaagcagaattacttgaacccaggaggtggaggttgcagtaagccaagattgcaccactatactccagcctgagcaacaagaaaactccatctcaaaaaaaaaaaaaaagtttcttggatgagctgggattcctagagcttgaaactcccatgaatgaacgtcatcccaggggagctatgaccaagcctttcatcacttatcacaacaagctgcacatgaactactctagaactctaccataagatgctagtggttggtggcattgaccaggtttatgaaattgcattccagttctggaatgaaggaattgatttgacgtaaaatcctgagttcagcacccctgagttctacatggcctagactatcacaatctcacggaaatcacggggaagatggttccagggatggtgaagcataatacaggtagttacaaggtcacctactacccagatgtcccagagggataagcctgcaatattgacttcaccctacccttccggagaatcagcatgatagaagagcttgagaaagccctgggggtgaagctgccagaaaataacctatttgaaactgaagcaattggcaaaattcttgataatatctgcgtgcaaatgctattgcgtgccctccacctaggaccacagccaggctccttgacaagcttgttgggggagttcctggaagtgatttgcaacaattctacattcatctgtgatcacccccagataatgagccctttggctaaatggcactactcaaaaggtctgacccagcgctttaagctatttgtcataaagaaagcgataagcaatgcctacactgatctaaatgatcctatgcagcagtggcagctttttgaagaacaggctaaggccgcaggtgatgatgaggccctgtccgtagatgaaaactttgttgccgccatggaatacaggctgtcccccacaactgcctggggcatggttattgaccgagtcaccatgtttctcacagattccaccagcaactcggaaggctgaggcaggaggattgcctgagcccaggagtttgaagtttcagtgaacaacacagtgagaccctgtctctaaaaggaaattttttttttttgagacagagtttcgctcttgttgcccaggctggagtgcagtggcacgatctcagctcactgcaacctccgcctcccgggttcaagcgattctcctgcttcagcctcccaagcagctgggattacaggtgtgcactgccacacctggctaatttttgtattttttataaagacggggcttcatcatgttgcccaggctgctctcgaactcctgagctcaagcaattcacctgccttggtctcccaaagtgctaggattacaggcgtgagccaccatacccaaccttttaaaatttttttcttttcttttctttattccttccttccttccttcttttctctttttttaatcttacaaaaaatgtttcggaaaaggtattttatttttaagacagggtcttgctctttcccagaggctggaatgcagtggagcgaccatagctcactgtggcctctaacttctgggctcaagcaattctcccacctcagcctcctgagtagctgagactacagacatgtgccaccatgaccagctactttttaaaaaatttttttgtagagaaggggtctcaccatgtttcccaggctggtcttgaactcctggcctcaagcaatcctcatgccttggcctcccaaagtgctaggattacaggcatgagccaccatctcttgtcccctgagatacttttaatggccttgctggatccagctcctgcaccccagggccctcctgcctcctccccaccctcggctgatggcactacctcaaggacatgggatagcatgcagccttctgtcccagatcctctgtactgtctgaaatcaggcagaacccagctgcaagaggaactcaatggtacacatgggacccaagtcatcaatcgtctccatcagaaagcaacccagggccaggcacagtggctcaggcctgtaatcccagcactttgggagtccaaggcgggtggatcacctgaggccgggagttcaaggccaatgtagtgaaatcccgtctctactaaaaatacaaaaatttgctggacatggtggtgcatgcctgtagccccagctactagggaggctgaggttggagaattgcttgaacctgggaggcggaggttgcagtgagccaaagtggcaccactgcactccagcctgggcaacagagcaagatcctgtctcaaaaaaaaaaaaaaaaagaaaagaaaaaaggccgggcgcagtggctcatgcctgtaatcccagcactttcagaggccaaggctggtggatcacccgaggtcaggagttcgagacaatccagcctcatcaacatggtgaaaccccatctctactaaaaaaaatacaaaaattagccagcctggtggtgcatgcctgtaatcccacgtacttgggaggctgaggcaggagaatcgcttgaacctggaaggtggaggttgcagtgagccgagatcgtgccctcgcactccaaaaaaaaaaaaaaaaagcaccccaggaatgttggacagagaggctggcggggtaggggttggttggtaaggcttgagcagaaggttctagatgcattcaggagataaagatgcatttggggttattgcacttctcctagaaacataaacattgacttccttttgtggaagaaaaatgttatgttagctatttgacgtttcaggaagggtggcttcagcttggtgattggaggatgtttgtctacagtggccaggctgctttctggcttggaagactattgtttcttgggaattgtctgtatcagacatcatgggagcagatccagggcgacatcaaagggaagcatgagtctccaggaccagaggggcttggatgcagatgatcatcatctgggcactgctggatactgagtaagccccagctgcaccccacctctgcgctctgagcatgggaggcagcctgtgcagctataactcagcctgactttttccttccctgcatactcttgaaatacactggagatgagtaggggcgagtgagctgcacaccagaataagtttggtccttggagcaaactgtttctactgctgcctcctctgcaggtcttgatttatgcaaacactgcatagaagaggaagtagagggaaaagctgttcacccacctactccttcctggtagcaagatttcctatcctggccttgcctcaacagccctaccaattggaggctgaggttgtgccaaggctctatggggggacgtagcatcactgaggtggccagattttggaggacaggaaagtttgtgctatttgctgagactggagaggctggtgagagcagactctccatgagttgaaagccaaagaaagaaattcggtagatttctgcaatgagaagccacggaagaacttcaggcaggaggatgcattggatcttgttttcgttttgttagagatggggtctcactctgtcgcccaggctagggagcagtggtgccatcgtctctcactgcaaccttaaactcctgggctcaggcgaacctcccacctcagcctcgtaagtacctggaaccacaggcatgcaccacttttttttttcctttttcttagagttctcattatgttgcctagactggtctcaaacctccggcttcaagagatcctctcacctcgaccttcaaattactgggattacaggcatgagccaccatgtcctaccagactttgttaaaagaggaacaggccaggcatcgtgggctcacatgaacactcatgccccagaagtaaacaagtgttagc

SEQ ID NO: 7123 - DNA, 6000 bp, Homo sapiens
agtcagaactactcttaaaaaaaaaaaaaaaaaaaaaaaaaaaaaaattctgggtttctggcatctcaaaaaaaaaaaaaaaaaggaaaggtcagggcagctacagtcctctattaagcaatgtgccacagcaggggtccctaattcctgggccatggacctgtactggtctgtggcctgttaggaactgggccacagagcaggaggtgaatggtgggtaacaactgaagcttcgtctgtatttctggccgctccccattgtttgcattgctgcctgagctctgcctcctgtcagatcagcagcatcattagattcttacaggagcatgaaccctgttgtgaattgcacacacgagggatccaggttgcatattccttatgagaatctaattcctgatgatttgtggtggaacagtttcatcccaagaccattagcatcctgtgccccatcccttgccgcctgtggaaaaattgtcttccgcaaagccagtccctggtgccaaaaatgttggggactgctgtgctttagaatctgcctggaatctgcagcctctattatatagttccctatagactttgcttcctaccatcttacattctgccttataggcatttgtgtttgcaactcttgcttttgtcagtatgctacgctggtgacattgaccaaattgaccacacattaattataagcttagttggtgatgacctcaatggaataacatgacataagtattgtgacactacttcttgcatgtatctgcaggtggaattgtaaacctggtggtccgagatggtctaattcgatcttcctatgtatctccttatattaatagtggtaacatttgtggtggtgattcagcgtttcaatgcctcttctcatggcaacaacaaacgttttccgtctgaatcaacattaacctagatgttactgcggatcagaattagactctacattttcaaccacagaaatattgggcagtaaacatttttcttaatattgattgcctacataggttgtgtaattagcatatgtttatagttctatgatttgtgcatggctgctgcagagctggagggggtaaagcaacagtgttttctcagttgtgcgagcagcattacattataatgaataggtaatattaaactgggctgataagagttgcaaaagactactttaatgttcatatggaaccaaaaaagagcccgcattgccaagacaatcctaagcccaaagaacaaagctggaggcatcatgctacctgacttcaaactatactacaaggctacagtaaccaaaacagcatggtactggtaccaaaacagacatatagaccaatggaacagaacagagccctcagaaataataccacacatctacaactatctgatctttgacaaacctgacaaaaacaagaaatggggaaaggattccctatttaatagatggtgctgggaaaactggctagccatatgtagaaagctgaaactggatcccttccttacatcttatacaaaaattaattcaagatggattaaagacttaaatgttagacctaaaaccataaaaaccctagaagaaaacctaggcaataccattcaggacataggcatgggcaaggacttcatgtctaaaacaccaaaagcaatggcaacaaaagccaaaactgacaaatgggatctaattaaactaaagagcttctgcacagcaaaagaaactaccatcagagtgaacaggcaacatacagaatgggagaaaactttcataatctacccatctgacaaagggctaatatccagaatctacaaagaacttaaacaaatttacaagaaaaaatcaaacaaccccatcaaaaagtgggcaaaggatatgaacagacacttctcaaaagaagacatttatgcagccaacagacacgtgaaaaaaatgctcatcatcactggccatcagagaaatgcaaatcaaaaccacaatgagataccatctcatgccagttagaatggcaatcattaaaaagtcaggaaacaacaggtgctggagaggatgtggagaaataggaacacttttacactgttgatgggactgtaaactagttcaaccattgtggaagacagtgtggcgattcctcaaggatctagaactagaaataccatttgacccagccatcctattgctgggtatatacccaaaggattataaatcatgccgctataaagacacatgcacacatatgtttattgcggcactattcacaatagcaaagacttggaaccaacccaaatgtccatcaatgatagactggattaagaaaacgtggcaattatacaccatggaatactacgcagccataaaaacggatgagttcatgtcctttgtaggaacatggatgaagctggaaaccatcattctgagcaaactatcatcaggacagaaaatcaaacaccgcatgttctcactcataggtgggaattgaacaaagagaacacctggacacagggcggggaacatcacaccctggggcctgtcatggggtgggggaagcggggagggatagcattaggagatatacctgatgtaaatgacgagttaatgggtgcagcacaccaacatggcacatgtatacatatgtaacaaacctgcacgttgtgcacatgtaccctagaacttaaagtgtaataaaaataaataaataaatagggctgatgaatcatattacagtaatccaatatttcccttgtaaagtccctgaggtttacagaaggaaatcttttctaataacaaaaagagtgaggcatgtgctttggtctttatttcctagttatacgatcctgggtaaggagctcaacttttctctgccaaaattaaatgaggattaaatgagatcatatatgtgaagttgtgaaagacagtacctggcacatagcaggatcaatcaatgttagtatctctaaaatagagattgagtctgaagatccacaaagtggtagaaccgatcttaagattcccaaataatagaattgtgctttatttgcctaagtagtatggtattacttattgtatgcccaggggatcttttttttttaaataatatttatttatttattttgagacagagtctcactctgtcccccaagctggagtgcagtggcaccattttggctcactgcaacctctacctacccagttcaagcaattctcctgcctcagcctccggagtagctgggattacaggtgcacaccaccatgcccggctgatttttgtatatttagtagagacagggttttgccatgttggccagattggtcttaaactcctgacctcaggtgatccagctccctcagcctgccacagtgctgggattacaggtgtaagccaccgcacccagacctaatgttttattttttggtagagatgaggtcttactatgtggcccaggctggtcttgaattcctggacctaagtgatcctcccaccttgacctcccaaattgttgggattacaggcatgagccaccgcgcccagttcccttcttaaatagttttaagggggagaagaaagaaaaagactgattttcttcccttccactaccaaaacaggcaaaacacaccagaacactttgcttagcatttcttttcttttctttttttgagaaagagtctccctctgtcagccagggtggagtgcagtggggcgatcttggctcacttcaagctccacctcctgggttcaggccattctcctgcctcagcctcccgagtagctgggactacaggtgcccgccaccacgcccggctaattttttgtatttttagtagagacgggatttcaccgtgttagccaggatggtctggatctcctgacctcgtgatccgcccgccttggcctcccaaagtgctggtattacaggcgtgagccaccgtgcctggccgtcccatcattttttaagataaattcacataccataaaacttaccattttattttctctctcttttctctttcttcctttctttctttcttttttttttttttttttgcaggctggagtgcagtggccctatcgtggctcactgcaaccttgaattcctgggctcaagagatcctcccacctcagcctcccgagtagcagtagctgagactatcagtgcgcaccaccaagcctgagtaattacaatacttttttctttttccttttcttgattttccgtagagatggggtcttcctattttgtccaggctgatctggaactcctgccctcaaaggatcctcctgtctaattctcccaaagtgctgggattacaggcatgtgccaccgcgcctggccaaatgcaccccctttttttaagtgtacaattcaatggtttttaatagattcacaaagtcatggaaccatcacacctatctaatttcaaaatgttttcatcactccaaaaaataaccccatatgggaggccgaggcgggcaggtcactcgagaccagcctggccaacatattgaaaccccgtctccactaaagatacaaaaattagtcgggcgtgatggcgcacgcgtgtagtcccagctgctcgggaggctgaggcaggagaatcgcttgaacccgggaggcggaggttgcagtgagcccagatcgccccactgcactccagcctgggcgacagagcgagactccgtctcaaaaatatctaattaattaataaaaataaaataaataaataaataaccccatgccttctgcctctgtggctttgcctgttctcggtattttgtgtcaatggacccatgcatgggggtgggccgggcacctttcaaacgttcagcccccaggacggcccgtggcctccggattggacggcgcgagctgggtgtgtgtgggtcgctcaatcgctccggagcttctggagggggcagatgcaggtgccggctgctgcagtgcagtagctgctggaggctggggaggcccggacccggtgcaggaagacgccgaccacgcgggctcctgatcgcgggcgcccacagcgcggacatggcgggctggtggccggcgttgtcgcgcgcggcccggcgccacccgtggcccaccaacgtgctgctttacggctcgctcgtctcggccggggacgcgctgcaacagcggctgcagggccgcgaggccaactggcgccagacgcggcgcgtggccacgttggtggtgaccttccacgccaacttcaactacgtgtggctgcgcctgctggagcgcgcgctcccgggccgagcgccgcacgccctgctggccaagttgctgtgcgaccaggtggtcggtgcgcccatcgcggtctcggccttctatgtcggtgaggggccgggaggggacctggggggtgggacccagtattgggggactggaggctgggactcggggatcaagcggctggagggagggcgctgcaggagcctggggacccgggcaggagccggggctctgagaccggagctgcttcagaggcctgaagggccagggcaaaggctagaggctggggtgtttgattgcgaaaatttgcaggaggcactggctggggagccgagaaattggggagccagaggtccaccaggtcaggaatttagaggactagggtcggggctcagactctggggttgggtgtagaccaaggctggaggtaggcagggctgcggaggtctttgccccctgaaaaaggcccacgggaaaataaaggagatcccagttcaaggccgtagcagctgcaatgaccgtgaaccagtcgtgggacagggaaggaaccgacctgctgttcagaaaatccacgcctggggccccggggccaacacaggaacaaaatgcaaggggatcagtgaccctgaggggcagagcaggtggaatctgaggttgggcctggatcttcagcaaattcatgcccaggggcctagtcctggtttggtaacaagattttcccctggggtctcacggaaaacatcaagggaccttggatccttgccatggagg

SEQ ID NO: 7124 - DNA, 6000 bp, Homo sapiens
tgtttttccccctaatagtaaaagggagccctcaccaagcttatagtctactgtgagaaacagatagaacaattggccgggcgcggtggctcacaactgtaatcctagcactttgggaggctgaggcgggtggatcacaaggtcaggagttcgagacaagcctggccaatatggtggaacccccatctctactaaaaaacataaaaattagccgggcatggtggtgtgtgcctgtagtcccagctactcaggaggctgaggcaggagaatcgctggaacccgggagggagaggttgcagtgagttgagattggtgccactgcactccagcctgggtgacacagcaagactccgtctcaaaaaaaaaaaaaaagaaaaaagaaagaaaaaaagaaacagaacaaatggtaaaaataaagtgctaggattgagaaaggccatagggggtgctgtggcgacatttctgtctctccttgaaataaagccacacatgccgggtgcggtggctcacgcctgtaatcccagcactttgggaggccaaggcgggcggatcaccaggtcaggagatggagaccaacctggctaacacattgaaaccccatctctactaaaaatacaaaaaattagccgggtgtggtggtacacgcctgtagtcccagctacttgggaggctgatgcaagagaatcgcttgaacccaggagacaggggttgcagtgagctgagatcgcaccactgcactccagcctgggcgacagagcaagactccgtctcaaaaaataaaataaaataaaataaaataaaaaagaaagcaacacgtgaattgataattctgcccgtctttctgtcctactcaccatccttctgtctgaatttctttgtatccatctatctgccttcttcctcttctattccttctaacaggagattttagtgactgttgcttcctgaagaactatcctaactatcctatttctattcctgtaaaattgtctcctgggagcagggagtctcctttgggaggctggctcattcttctgctcctagaaaaataaccgaggtctctctggctcaggatgcagagccaagccagggccaggtgccaggtgccaggtgcagccagcaggaagtgctggatcttctctctagggtcactgcacagtcaccactcacctccatcccattccatcttccatatgcagaaaaactgggttcctttccagatctgcaggctgggactgcgggctgggaggtggcctccagtaaggaagggaagagggaggaattgtctctcagtagaaatagtcatcatttcctgacacttcccctgtgccacaggtttaaagatcattttttaacatttgagtatgtatcagtaatatgtctatggagtaaaaaaaggggtaattagtaaaaattcccctgcccttgtcctgagatgtatgctgcatttagaaacagatacatatatattcttgcttttttaacccaaatggtggcttacctgatacacttgttcatcttgttttttttgtttgttttgtttttgagatggtgtctcgctgttgttggagggcagtgtcatgagcatagctcactgaaccttgaactcctgggctcaagcaatcctcctgccttagcctcctaagtagccaggactacagatgtgtgccaccacacctggataatttttatttttgtagagatagggatctcactacgttgcccaggctggtcttaaactcctagactcaagtgaccctcctgcctcagcctcccaaaatgctggggttataagcatgagctaccatgcccagcctccaccttgctttttcacttaataatataccttctataaatataatttttgatacatctccatgtagagctatgtaattgctggacggatgtgtcaaaatttatttaacccctctccgatcaatagaaatttaggctgcccctaggcagttgttgttgccacagccctgggacctaagctctagtcttatatccccattttacagatgagaaaacaggctcagaaagtttgtggcacatggtccagctcacataggaaataatcagaaaccaggttcccatccagtgaccttacccttaaccacaataaaaacagcttttatcagctgggcacggtggctcatgcctgtcatcccagcactttgggaggccaagatgggcgaatcacttgaggtcggtggtttgagaccagcctggccaacatggcgaaacaccatctctactaaaaatacaaaaattagccggtatggtggcaggtgcctgtaatcccagctactcgggaggctgaggcaggagaattgcttgaacctgggaggcagaggttgcagtgagccaagactgtgccactgccgccagcctgggcaacagagtgagactctgtctcaaaataaataaataaataaaaaatagcttttattttgagccaggaaattacttacccacacacataattttctgttttggaatagttttggatctacagaaaacctttgaggataagatagtgagttttcacatggcccacgcccagtttcccctactattaacatcctacatcaatatggtacatttctcacaattaatgaaccaagagtgatacatgactattaactgaagtccctactttattaagatttccatagtttttaatgtgttttaacttgtgttccaggaactgagtagctcagattataggcgtgcaccaccacattcagataatttttaaaattttttggagagatggggtctcactgtgttgctcaggctagtctccaactcctgggctcaagccatcctcctacctcagccttctaaagtgctgggattataggcatgagccactgcgtccagccttttttttttttgagacggagtctcactctgttgctcaggctggagtgcagtggcacaatctcggctcactgcaagctccgcttcctgggttcaagcaattctctgcctcagcctcctgagtagctggggttacaggtgcccaccaccatacacagctaattttttgtattttttttagtagagacagggtttcaccatcttggccaggctggtctcgaactcctgaccttgcgatccacctgccttggcctcccaaagtgctgggattacaggcatgagccaccacacccagtctccagcctcctttttttttttttttaaatgaccttgacagttttgaggaatactaatcaggtattctgtagaatgcccctcagttgaatttgtctgatatttttcttatgaccacagaggtaaagtgcccttctcatcccatcgtaggaagggtgcacaccatcctcatggcttaatgttgatgttaacttatttacttatttactttttttttttgagatggagtcttactctgttgcccaggctggagtgcagtagtgcaatctcgactcactgcaacctccgcctcctgggttcaagagattctcctgcctcagcctccctagtagctgggattacaggcgcccgccaccatgcccagctaatttttttgtatttttggtagagacagggtttcgccatgttggccaggctggtctcgaactcctgacctcaagtgatccacctgcctcggcctcccaaagtgctgggattacaggtgtgagccactgatcccggatgatgttaactttgatcatctgtctgagacagtgtttgtcaggtattatctaatataaaacccaccctcaccctcttccaccaccacttccatactgcactcttttggaaggatgtcgctatgggcaactcacacttaaggagtagggagctaagctccccatccttaaagtatctacgtaaatgatttcaaaatctgcacaggagatttctctccattttccccatttatttatatttagcaattacttttctttttctttttttttctgagatggagtctccttctgtcgcccaggctggagtgcagtggcgtgatctcggctcactgcaacctctgcctcctgggttccagcgattctcctgcctcagcctccctggtagctgggactacaggcatgcactaccatgccaggctaattttgtatttttagtagagacagggtttcaccgtgttggccaggatagtctcgaactcctgacctcaggtgatcctcccgcctcggcctctcaaagtggtgagattacaggtgtgagccactgcgcctggcaattttatgtttttaacctgcacacgaacagaggtagagatgaaacgaggatatagtgcaaaacgtaaaagacaaacactgcacgtggttttctcttcactcggccctctagctccccacccagagctaccacaggtagccagttttttgcaccctctagggagatagcttaggcatttacaagcatgtacaaatatattttttggtttcctttttgttcccaaatggtaacttactagatgcactgatttggagtcttggggttttttgcgtgtggactttttattttttaattttaaagatgggggtctcactgtgttggccaggttggtctcaaacttgtgagttcgtgcggtcctccagcctcggactcccaaaatgcgaggattacagacgtgagccaccactcccaaccagttatttttgttatttatttctttattagatcaggtttgattttagatgcagggggtccatgtgcatgtttgttacatgggtgtaccgggtcctggtggagactgggctcccagtgcgcccaatctattgttattttttaagctcagtgagacatcagggaggtcgctgcttgtcgccaccgctggatggagccttgccggatctcccgggctctgcagcccctctgcggtccctgatgctcggctcctcgcgggggcgccccactccggcttctgtgatgtcagcgccggaacctggaatcccggctccgcgagggaaggccggggaggcggcggcggcggcggcggctggagagggtcctcggcagcctctgaggagcgcggggcgcggccatgagcgagtccagcggcagtgcgctccagcccggcaggcccagccggcagccggcggtccatccaggtagggcggcagggagcgcgcgcggggacggtgcccctggggtccgagggcgcacggagggagccgggtgctggaggctcggcctggccgctgttccctcccacccccgacgccgggtgctcccggctctggggaacagcaggtgggaaggagatcttccttattcctgctccctccacaaacgcgtcctcatccaatccagtggaacccagccgggccaaaaggacacgagaactgcagtctggaccgtggtgggtttgtcttccagctgttgaccgagacagtctttcaatagcctcatctgctgttaaatgaaaggatttgagcaccccctccacgcctaacattctggtatgaggtgcctgcctcccggacatttcagccttcacatacagttagaccaacttgaaaccgaattctgccttgtctgtttattgctgtgggacctttggtaagtggcttgccttctctgagcctcagatccttcagcagtaaaatgggaatagaatggggcggggattagctgagaatcgtgtgatgtgtctagcacagtgcctggcattgtggctagacagtcacaataaatggtagccagccaagtattataatcttttgtatcgggtagaattacagtaaagtatacagctccatgaatttctacagaaatatgtacaacggctgcccagtcaggataaaaaagttgccagcactcaggcagggttccttgtagcatttggagcttacgaatcttgtcctgaacaaaacacaagaccctgctgtaaagttttatctgcaatgttttctctttttcagttttagaatagagatttactgaaaccaaggatgtagggccgggcgtggtggctcacgcctgtaatcccagcactttggg

SEQ ID NO: 7125 - DNA, 6000 bp, Homo sapiens
gtgcgcacagaggggaatgggtgggaaagcaggcttcacgactccattgagagcagtcacaatattggcggcatgtgtcccaaccgtatcgtccatttgaacctcacagctgtcccgcgaggaaggtcacgggcatggccccgttttacagatgagaagatggaggagaggggtccatgtccctggctgaagtccggggtctgaattcaagctggtgaggcccccctggactcaccctcctgcagcgtcagggggcgggggtgctgtcctctgacccaggccctttgcagagtgtgacctgagaccctctcttcttgctcctgagtagtgaggccacactggcgggagccctggaggtccctctccacacatgcctgaagcagggtgctctgagcacccttactgagcagtgctttgcttctctgtttttgtctgtgtttgcctgtttttcattaggtttttgagaaagaagacactgtatttaataatacaggttttaaaaaaatcatttgagcctggtcagactctatgatcctgaattcacaaggtttgtttttggttttgtttgtttaccccagatttttcaggggtatatttttaccccagatatttttctgttagcctcatagtcttcataagcacagttaaaaatcccaaaccaattctgatacaagtaagtgtcttgaattatcagtaagaataatttagcagagaccttcctgtccaaagtatttgccagttgtttatttctcaagagaaactatttcttaactcacatattcatgtttcatagttcaggaacataggtcagcgacaaacttttaggtcaacccaagaagattatctatattccaaaatcaccttgcactctgaaagataccagccttcctcatctcctcaaaatccttcacggaatcctaattgctgtagaaatctgcgaatgactctttcttggttcagccacagcagacttacagagagctgcagcccccagagagacagtgaatgctcagtacgggaaattgcagacgttggccagaaggccacgcatctgaggttttgtcaaagcactggaagctttggcggttatcgtccttgatagggacatcaacctcaacaccagtgtccttcccagctgatggagaaatgcccagattttttaaaaatgcaaacgacataaaataacgatgtggtaactttcagggctacagggcgataaaatagtggggaggggggaggaggatgcttcaggccaaggccccagggagaaagcgtattttcctgtgtactctacgggttctattctcagtcctgaaataccttctaccatgcaagcccgctacaagctcatttaaggtagtgccatggggctgtgtgtggtggctcatgcctgtaatcccagtactctgggaggccaaggcagcggatcacttgagcccaggagtctgagaccagtctgggcattatagcaagaccctgtctctacaaaaagtacaaaaattagccaggcatggtgatgtgtgcctgtgttcccagccactcaaggggggatcacttgagcccaggaggtggaggttgcagtgagtcaagatcgcaccactgcactccagcctgggtggcagagcaagaccctgtttcaatcaatcaatcagtcagtcaatcaatcaatcaatcaaacagtgatgtagctctgtgggtcagagctcagtttcctccctgtgaaatggtgctgcccggcctgctccatggggcctcctgagcacctgagcccgtaagccttgtgtcattatgggaggcggtgttttctcaactccaacttctctgtcttcacttgaattctcaggactgtctgtccctcccctgcctgagtgaggatctgtgtttcaagagccgcccatttcccggtggaaggaacgccatctcagagcaaactccggcggcgtcattagccggggagatggcagctcattaagtgtgagcggtgactccagggtttatcagtgaaattactcagttctccccacacacagagctgagggggaaattgagccttgctgaggttccagaaagttctcctttcacccaaaggttgctgagggctgcagttctgttggcaacacgcccagcgctcggaaggtctgcagcactctctccagagtgcatgctgtttcggagcagatggaactggcccttggagacccagcttcccagcaggcggtgcttaagatggtaggaaggccctggcccaggagtcggaggttttgggaaaagtacacccggcccctgctttccattggccaggtgaccttgagtaaggcctctaccagtccagggtgaggcttctctggccaaggccccatccagcacccaagctctcagattccacccgtggaatgcaccactcctgggctgtcccactgggtcatatggtctatttatttatttatttatttactgaggcagagtctctctctgttgcccaggctggagtgtagtggtgcagtctcggctcagtgcaacctccacctcctgggtttaagcgattctcctgcctcagcctctcgagtagctgggactacaggcgcccgccaccatacctggccaatttttgtgtctttagtagagacgggattttgccatgttggccaggccgctctcgaacttctgacctcaagtgatccgcccacctcagcctcccaaagtgctgggattacaggcgtgagccacagcacccggccacatggtctctttaatttggggattgcccccacaccatccctgccgtcattctttacaaaatgtcacctttgcctccttgcagctgtgtcagtgtctctccatttttcaaaccctctgaggactctgtcttgtgttactgtgtctgatttcttagaaagccagtgcaaggagaagcagagaacatcggcggtgacaaggagagggtcccgtgggtcctcgggctgaattggaaccaggtcctggcgttgcctgcccaggtcttcccatctgggtttgctccagtgcctgggccggtcagagctgcctctgccgccccatgtctctgatgggttgcggggaagtttgagatgaacggctctccctgctctaaagtcacttcagcagggacccaaaattgtcaagaagcaaatgaacccacgatgcaaacggcctctctcagcatcacctccacaaagccttagagctggacatgatcttccaggctgtcagttctgaacctttactggggaggacatccgaggcctgcagaagccctgtggcttgtcccaggtcccaattagctggggacacaagaggccctcttgacagcaggcaggtgacggctcctctgagaacagcactctggatggtgacgttcacaccctccaaaccccggccaccagcagctccaagcagttccaggcacgagttaattaaccctcacagcagctctccaaaggagataattattactcatatcccctctgtaggtggctaaaccgaggcccacagggatggggtgagtgtcttaaatgccagatgagaagttaccttgcatcggagcgccgtctaacctgcctcttaattagttggggctaagaggccccagtgactttcaaggattccatttttgttattttcctctaaaaacgatatgcaatgctccagaaagagaaaaccctagaagaatgtaaaactcaagttccctcctacctggtcaccgtgggcaaaaccaaggtgcatggacgtggttttcagggtgtcagcccacttcaggttataggtggtgtccagtgatggggtgggaggatggagagcatgtgcacggggttagtgttgcttccaagcttatcattgccactcttgatttcaggagctctggaagcaaagcggaatagattcacgttatctgagcaggacacgcccaccacagcatgccagcattattttgccagaaacctcacagtccccaggtttgccacccacatgcagagccctgtgtagggtcttagatggcacagatggtgccgggtgccacagccggggttatcctgtgagttgctatgttttcttttcttttttttttttttgagacagaggctcactctgtcacccaggctgtagtgcagtggcacgatttcagcccactgcaacctctgcctcctgggttcaagtgattctcctgcctcagcctctcgagtagctgggactacaggcgtgcaccaccatgcccagttaatgtttgtattttcagtagagacggggtttcaccatgttggccaggagggtctggatctcttgacctcgtgatccagccgcctcggtctcccaaagtgctgggattacaggcgtgagccaccgcgcccggctgggttgctgtgttttcatgactgctttagatcaatttgccaccgacctgcctctcactggggtagactgacttcaaagcttttttctcctccaggtttctgaaagttgttttttgctgaaagcccggttcagagttctcatgtgtgttttggggacccagggcatttaccgaacccggtgagggctggaaattccagtctcagaaagtcagagtcgcacaggatcggggaaacgttcaggcatcctggactgtttggtgacgaggtcacagagcccccggaggatcaggagctgctcgttaaaagctggggacactcagaggctcttgtttttccttggaggatttttatgaattatgatttcctttatttctgtccataattttgtgcttttgctataccaggattttagtcgagattcaatgttatcacctgccttgaagtcttgtctcttgacaaatttgcataattctgtgttgtattaattatctagtgctgcataacgaatcactcccaaaccttgtggcttacaaccacagtcatcactgatgatcttttacagtttctgtgggtcaggattccaggggtggcgccaccaggcacttctgccttggggtttctctcggagttggagttggacatcagctggggctggagtcacctgcaggctggcctggggtcgggcagggggatctgcttccaaggctctgcttcagaggcggctccctcccacggtaggcgcatggtttcctgtctccaaagtgggcctctgcacaaggctgcttggatgacctcatgatatggtggctgctgaccagggtagaggctggaaccccttggatggcccaacctgggaggtactagccatgcctctgccattgggcccggccacacaggttcctgccctcttctccgctgcccttgtgcctcccgtgtcctcgctgcgtcctaaccaaatgctggactggcagagactgaaaacgccccacggggcccctgtggcttgctcactcgggctctccggagagtgggtgccaaccccctgcgccctgagcatcttggctctgcttggcttgcagctggatcccctttttggactttggggctgcacacgcaccttgttctggagcgaatgggctcgtgagagccgcaggccctgaggcatggcctaactcaggcagagtagttggcgaaggccccagagggacccaggctatcgtcctgcagctgccggcgagtgggctgggctggtggcgtcctcagtgctctccctgggatgggctgtggaccccagcaggcggggtttgatgcacgctgcaaccttgtccagccacagcccaaggaagggcgctgaattgaacgtggggtaaaacagtatttatggctgttgattctgctgggcctgttctcagtgcttcataagtgtattagctcattcagccctcaaacagcccctaaggggtagagaccattattatacccattttatggatgaggaaactgaggcccagaaaagctgaggctgcacagctaggaaatgctggagctgggctttaatctcaggccgtctggctccagcatccatgcttttatccgctccaccacgtctccctcctgcccacatgtcctcagg

SEQ ID NO: 7126 - DNA, 6000 bp, Homo sapiens
cagtcaggtaggtcaatgggaaagacccataccccaacgagatccatgtagacatctccctcactgacttcatcccagaatattgtcacctgcaaactggggatctcctgactgatatcaccttaaacgtgacagataggatccatgccaaaaaagcttttggaggaaagctgaacttctatgatctttttttttttttttttgagatggaatttcactattgttgcccaggctggaatgcaatggcacaatctcagctcactgcaacctcctcctccctaggtttaagcaattctcctgcctcagcctccctagtagctgggattacaggcgtgcgccaccacgcccggctaattttgtatttttagtagaggtgaggtttctccatgttggtcaggctgatctcgaactcccaacctcaggtgatctgcctgcctgccttggcctcccaaagtgctgggattataggcgtgagacacagtgcccagccatgaacttctatgatctttgagcagagggggtcaagttgcaagtcatggccaatttcaggaattataatttcaggaagaataatttattcatattaataacaaactgcgttggggaaacataattggaattcagaggaatcctgggaaaaaccaagaaggatgagctgagcttcattccctatgagatcacactgctgtggccttgcttgtatatgttacctcatcttcactttggcctcaaagacaaggaaataaggtatggtcagagatacttggacttgatcctgaatgaatgaggcagaaatttatcatctgctgtaagatcatcacatgtataataagtttcttaggccaggtgcagtggctcacgcctgtaatcccagcactttgggaggccaaggcaggcagattgcctgaggtcaggagttcgagaccagtctggacgacatggtaaaaccccacctctactaaaaatacaaaaattagatgggcgtggtggcaggtgcctataatcctagctactcaggaggctgaagcagaattacttgaacccaggaggtggaggttgcagtaagccaagattgcaccactatactccagcctgagcaacaagaaaactccatctcaaaaaaaaaaaaaaagtttcttggatgagctgggattcctagagcttgaaactcccatgaatgaacgtcatcccaggggagctatgaccaagcctttcatcacttatcacaacaagctgcacatgaactactctagaactctaccataagatgctagtggttggtggcattgaccaggtttatgaaattgcattccagttctggaatgaaggaattgatttgacgtaaaatcctgagttcagcacccctgagttctacatggcctagactatcacaatctcacggaaatcacggggaagatggttccagggatggtgaagcataatacaggtagttacaaggtcacctactacccagatgtcccagagggataagcctgcaatattgacttcaccctacccttccggagaatcagcatgatagaagagcttgagaaagccctgggggtgaagctgccagaaaataacctatttgaaactgaagcaattggcaaaattcttgataatatctgcgtgcaaatgctattgcgtgccctccacctaggaccacagccaggctccttgacaagcttgttgggggagttcctggaagtgatttgcaacaattctacattcatctgtgatcacccccagataatgagccctttggctaaatggcactactcaaaaggtctgacccagcgctttaagctatttgtcataaagaaagcgataagcaatgcctacactgatctaaatgatcctatgcagcagtggcagctttttgaagaacaggctaaggccgcaggtgatgatgaggccctgtccgtagatgaaaactttgttgccgccatggaatacaggctgtcccccacaactgcctggggcatggttattgaccgagtcaccatgtttctcacagattccaccagcaactcggaaggctgaggcaggaggattgcctgagcccaggagtttgaagtttcagtgaacaacacagtgagaccctgtctctaaaaggaaattttttttttttgagacagagtttcgctcttgttgcccaggctggagtgcagtggcacgatctcagctcactgcaacctccgcctcccgggttcaagcgattctcctgcttcagcctcccaagcagctgggattacaggtgtgcactgccacacctggctaatttttgtattttttataaagacggggcttcatcatgttgcccaggctgctctcgaactcctgagctcaagcaattcacctgccttggtctcccaaagtgctaggattacaggcgtgagccaccatacccaaccttttaaaatttttttcttttcttttctttattccttccttccttccttcttttctctttttttaatcttacaaaaaatgtttcggaaaaggtattttatttttaagacagggtcttgctctttcccagaggctggaatgcagtggagcgaccatagctcactgtggcctctaacttctgggctcaagcaattctcccacctcagcctcctgagtagctgagactacagacatgtgccaccatgaccagctactttttaaaaaatttttttgtagagaaggggtctcaccatgtttcccaggctggtcttgaactcctggcctcaagcaatcctcatgccttggcctcccaaagtgctaggattacaggcatgagccaccatctcttgtcccctgagatacttttaatggccttgctggatccagctcctgcaccccagggccctcctgcctcctccccaccctcggctgatggcactacctcaaggacatgggatagcatgcagccttctgtcccagatcctctgtactgtctgaaatcaggcagaacccagctgcaagaggaactcaatggtacacatgggacccaagtcatcaatcgtctccatcagaaagcaacccagggccaggcacagtggctcaggcctgtaatcccagcactttgggagtccaaggcgggtggatcacctgaggccgggagttcaaggccaatgtagtgaaatcccgtctctactaaaaatacaaaaatttgctggacatggtggtgcatgcctgtagccccagctactagggaggctgaggttggagaattgcttgaacctgggaggcggaggttgcagtgagccaaagtggcaccactgcactccagcctgggcaacagagcaagatcctgtctcaaaaaaaaaaaaaaaaagaaaagaaaaaaggccgggcgcagtggctcatgcctgtaatcccagcactttcagaggccaaggctggtggatcacccgaggtcaggagttcgagacaatccagcctcatcaacatggtgaaaccccatctctactaaaaaaaatacaaaaattagccagcctggtggtgcatgcctgtaatcccacgtacttgggaggctgaggcaggagaatcgcttgaacctggaaggtggaggttgcagtgagccgagatcgtgccctcgcactccaaaaaaaaaaaaaaaaagcaccccaggaatgttggacagagaggctggcggggtaggggttggttggtaaggcttgagcagaaggttctagatgcattcaggagataaagatgcatttggggttattgcacttctcctagaaacataaacattgacttccttttgtggaagaaaaatgttatgttagctatttgacgtttcaggaagggtggcttcagcttggtgattggaggatgtttgtctacagtggccaggctgctttctggcttggaagactattgtttcttgggaattgtctgtatcagacatcatgggagcagatccagggcgacatcaaagggaagcatgagtctccaggaccagaggggcttggatgcagatgatcatcatctgggcactgctggatactgagtaagccccagctgcaccccacctctgcgctctgagcatgggaggcagcctgtgcagctataactcagcctgactttttccttccctgcatactcttgaaatacactggagatgagtaggggcgagtgagctgcacaccagaataagtttggtccttggagcaaactgtttctactgctgcctcctctgcaggtcttgatttatgcaaacactgcatagaagaggaagtagagggaaaagctgttcacccacctactccttcctggtagcaagatttcctatcctggccttgcctcaacagccctaccaattggaggctgaggttgtgccaaggctctatggggggacgtagcatcactgaggtggccagattttggaggacaggaaagtttgtgctatttgctgagactggagaggctggtgagagcagactctccatgagttgaaagccaaagaaagaaattcggtagatttctgcaatgagaagccacggaagaacttcaggcaggaggatgcattggatcttgttttcgttttgttagagatggggtctcactctgtcgcccaggctagggagcagtggtgccatcgtctctcactgcaaccttaaactcctgggctcaggcgaacctcccacctcagcctcgtaagtacctggaaccacaggcatgcaccacttttttttttcctttttcttagagttctcattatgttgcctagactggtctcaaacctccggcttcaagagatcctctcacctcgaccttcaaattactgggattacaggcatgagccaccatgtcctaccagactttgttaaaagaggaacaggccaggcatcgtgggctcacatgaacactcatgccccagaagtaaacaagtgttagccaaccaggaggcctatcctccccctaacctcacccaaagccatctctgtgccctcccccttgcaggggaaacagcacacactagtgaaatcttgtcttagtgtgtccggaattggtgggttcttggtctcactgagttctagaatgaagctgcagaccctcgcagtgagtgttacagctcttaaggtagcgcgtctggagtttgtttcttttgatgtttggatgtttggagtttcttccttctggtgggtttgtggtcttgttggctcaggagtgaagctgcagaccttcgtggtgagtgttacagcttttaaggcagtgcgtctggagtcgtttgttcctcccagtgggcttgtggtctcgctggcttcaggagtgaagctgcagaccttcgcggtgagtgttaaagctcataaaagcagcatggacccaaagagtgaacagtagcaagatttactgcaaagagcaaaagaacaaagcttccacagtgtggaaggggaccagaacaggtagccactgcgggctcaggcagcctgcttttattctcttatctggccccacccacatcctgctgattggtagagccgagtggtctgttttgacagggtgctgattggtgcgtttacaatccctgagctagacacaaaggttctccacgtcgccaccagattagctaaatacagagtgtcgacacaaaggttctccaaggccccaccagagcagctagatacagagtgtcagttggtgcattcacaaactctgagctagacacagggtgctgattggtgtgtttacaaaccttgagctagatactgagtgccgactggtgtatttacaatcctgagctagacgtaaagattgtccacgtccccaccagactcaggagcacaactggcttcacccagtggatcccgcaccagggatgcaggtggagctgcctgccagtcctgcgccatgcgcccgcactcctcagccctgtggtggtcgatgggactgggcgctgtggagcagggggcggcgctcaccggggaggctccggccgcacaggagcccatggagggggtgggaggctcaggcatggagggctgcaggtcccgagccctgccc

SEQ ID NO: 7127 - DNA, 6000 bp, Homo sapiens
aatagtagcaccagcatttcataagttgcttttggaaactacatgagatcatgtcaacactcaataaacatcagctctgatcatgctatgatatgactcctgcctctcacctttgcattgcattatacccgtgtttctcaaaccttagtgtgtactggaggccttgttttttgtttttgttttcttggagaccaagagtcttgccctgtcacccaggctggagtacagtggcatgatcatagctcactgcagtctcaacctcctgggctcaaggggtcctcctgcctcagcctcctgagtatctaagactgcaggcacgcaccaccatacctggctaatttttatatttttggtagagatggggtttcaccatgttgtccaagatagtcttgtactccagagctcaagtgatccacccaccttggcctcccaaagtgccaggatcacaagtgtgagccactgcacctggccctgcctggctaatttttattttttttctgtagagacgaggtcttgctttgttgctcaggctggactggaactcctggcctcaagtgatccacctgcttcagcctcccaaaggtctgggattattacccatgagccaccacacccagccacaatattttatttatccatttgttagttgatggatattggggtttcaattttttgacttaactatgaatcatgctgctataaatgtttgggtaaagtttttgtgtggacacatgttttccatttctcttggataatatcaaggagtggaattgctgggttgatggtaattttgtttgatcctttgaggaactacccgactgtttcccaaagtggctgcaattttacattccactggcagtgtacgaggactccacgtccccaccaatacttgctcttttccattctttttccaccgcaacctccgtctccccggttcaagtgattctcctgcctcagcctccctcttttttttttatttttgagacagtctcgctctgttgcgcaggatggagtgcagtggtgctatctcggctcactgcaatctcagtctcctgagttcaagtgattctcccacctcagcctcccaagtagctgggattacaggcatgcgccactacacctggctaattcttttttgttgttgttttttgtttttgttttgttttgttttttcagatggagtcctgctctgtcaccaggctggagtgcagtgacgcagtctctgctcactgcagcctccgcttctgggttcaagctattcttctgcctcagcctcccaagtagctgggattacaggcacccaccaccacacctggctaatttttgtatttgttatggagacgaggtttcgccatgttggccaggctggtctccaacttctaaactcaggtgatccaccggccttggcctcccagagtgctgggattacaggcatgagccaccgtgcccagcctcttttccgtttttgttttttttttttcctttggttgtctggtttggtttttattatagcctttctagtgagtgtgaagtggtatctcactgtggttttgatttgcatgtccctggtgactaatgatgctgagcatcttttcatgtccttattgaccgtacatatagttctttgagaaatgtcttctcagatcctttgcccatttttaaatgggattgtctttttttattaaagagccagagatctgaagtctttttgagttgtaagatttcttcatatattctagacagaagtcccttataagatacatgatttgcaaatattttctcccattctgtgttgtctttttacttttttgatattgtcttttggtacggaaagacacttattttgatgaagtccaatttatctattttttgtttggttgcttgtgcttctggtaacatatctaagtgggagccaggtgcagtggctcatgcctgtaatcccagcactttgggaggccaaggcgggaggtttgcttgagaccaggagttcaagaccagcatgagcaacattgcaaggttctatctctataaaaaattaaaataatgataaaaggaggccgggcgtggtggctcatgcctataatcccagcattctgggaggcaggaggacaacttgggccaggagttcaagaccagtctgggcatcatggcaaaaaaagaaaaaagaaaaaattatcctggcaaggtatgcctgtagtcccagctacttgggaggctgaggcgggagaattgcttgagcccgagaggtggaggttgtagtgagctgagattgaaccattgcactccagcctgggtgacaggaatgaaaccctgtctcaaaaaataaaaataaaataagccaggtgtagtgctgcgtgcctgtactcccagctactctggaggctgaagtgggaggatcacttgagcctaggaattcgaggctgcagtgagctatgatcataccactgcaccccaatgtgggcacagagcaagaccctatctcttaaaaaacaaacaaagaggggcggggtgcagtggctcacgcctgtaatcccagcactttgggaggctgaggcgggcagatcacgaggtcaggagatcgagaccatcctgcctaacacggtgaaaccccatctcctttttttttttttttttttttgaaacagagtttcattctttttgcccagactcccgggttcaagcgattctcctgcctcagcctcctgagtagcggggattacaagggtgtgccaccacacccagctaattttttatatttttaatagaggcggggtttcaccgtgttggccaggctggcctcaaactcctgacctcaagtgatccgcccacctcggcctcccaaagtgctgggattacaggcgtgaaccagcgcgcccagcctcctacattttcttctaagagttttatagttttagctcttacatttagatcttgttttcattttgaattaacttttttgcaggtggtgtgatacagcagtctgtgcagaaaaaagttaacatagtagaccctaactgctaactttatttttacttttattttttattttgtttagagacagggtttttgtcacccaggatggagtgaagtggcgtgatcatagctcaccgtaaccttgaactcctgggctcctctgcctcagcctcccaattagccaccacacccagctaccttttgtacatttttttggtagagacggtgtctcactatgttgcccagtctggtctcaaactcctcagctcaaatgatctgcccaccttgacctccagagatactgggattacaggcgtgggccactgcaccagacccaggtttattcttacaccaatacaacactgtcttaattactatagctttgtagtgagcttttgaaaataggaaatgtgaatcctccaactttttttttttggagacggagtctcgctctgttgctcagactggagtgcagtggcactatctcagctcactgcaaactccatcttccaggttcaagtgattctcctgcctcagcctaccaagtatctgggactacaggcaggtgccaccatgcacagattccttggacatccctgagaggtcaatcatgaaggtcaacttggttttctccccctcatttgggttcagaatttaaagtccacacacacaggcagtaagatgattatagataaggacatcatcactcggtttcggatgttaaattgtctaggtgggttaggggtgatttgagatcacacaaccttgtgccacaaagaggaattcccaggccagagggagacattttattgccatgttatgatcttatcattgagttgaaaggcaatcttgtttcattttggattctttcttatgtttatgtcttataagggcactttgaatttccaagcaaataataattttgaattagcttttaatcattgacttctagcacagttatatgatcagaaacgtgctgtgtgatttgattgctctcaaatatattgagatttgctggaacaaaataagtcaggttaatttttgtaaatgtaccatgcttgcttaaaatgaatgtatctacatttgttcctgagatacgggttgatggacggatggctacatggatgtgatggagatggtttactatcgggaccttccgcatcctgctgatgttttgttgcttaggatatgaatggctgagcggaggctgtaaaacctggcactctgcttgggtatgaggttcttcctgccatcctgccatcatttgttttttatgttttgtcgccaaaagtgaccttgaggaaccctgggagctcaggaaggaaggagcgcccagaagcagggacagggagctggttggggaggaccagaaatcaggtttgtgaaggttccagagaggacctgtccttgcgaggagtgtgggagactgagatgggggaggggtcattggaatgatgcgggcgctacttggcattgtccattgtgaggcaccaccggggtcatcagggattggtggagagggagtataaagccccaggtttgctaagggagggcccagaccgaagaaggtttggcggatagcagaacctttttgtctccctctaattgctcctaagcctcacgctcccttgccccgcgtgtcctgttgcttccctgatcttctccgtgacctgtagctaaaccttccaccagcgcttgagaacttaatttgaaccggatcctttcccagacccctttcttcttctcctcctccacctcctccaggtgcccaacagcccccttctcctcctttcccttcccttacttccccccttcccctccccttcccctccccctcccctccccttcccctccccttccccttcccctccccctccccttcccctccccctccccttcccctccccctcccctcccccgccccaactcagatccggccccggtccccgtccccttccctcccccctgccctaagccacctccacctctgtcctggccgcctcagggcaccctgaaaggatcaggacatgcggctgcgcttttggctcctcatttggctcctgctgggatttatcagccatcagcccacccctgtgagtagacgctggacccgcggggtttcttcctttttactgggctgtgtcacgcggcatgaaattacacagctcaggcctgtaatcccagcactttagggggccgaggtgggcagatcacttgagtccaggagttgaagactagccagggcatcatggcgaaaccccatctctacaaaaaattccaaaaaagattagtcgggcctggtggtgcgtacctgttatcccagttactggagaggctgaggtgggaggatcgcttgggccgaggagctggacgttgcagtgagctgagatggccccgctgcactcttgtctctaacaaacaaaatggaccaaaacaaagtgaaatgtcatttgatttgtgtcatctggtttgatgacttttttttttttttttttagacagagtctcactctgtcgcccaggctggagtgcagtggcaagatctcggctcactgcaacctccgcttccggggttcaagcaattgtcctgcctcagcctcctgagtagctcagattacaacgcctggctaatttttgtatttttagtagagacggggtttcaccatgttcgccaggatagtctccatctcttgacctcgtgatccgcctgcctcggcctcccagtgccgggattacaggcgtgagccaccgcgcctggccaaaatatataaccttaagtgtaagtttactaactttggaaagtacatacaccagcataaaccgaccccctttcaagatctacattattttatttatttatttatttttttgagacagtttctcccttgttgcccaggctggagtgcaatggggcaatatcagctcaccgcaacctctgcttcccaggtttgagcgattctcctgcctcagcctcccgggtggctgggattacagacatgtgccaccactcccagctaattttgtattt

SEQ ID NO: 7128 - DNA, 6000 bp, Homo sapiens
tacaggtgtgcaccatcatgcccagctaatttttgtattcttagtagagatggggtttcaccatattggccaggctcgtgtcaactcctgacctcgtaatctgcccaccgtggcctcccaaagtgctgggactataggtgtgagccactgcacccggtccaagataaaattattttaacaatatactatgaagagaaaaacactggctatgaaagaatatgcatagttttaccctgtttaaaaataaagattgaaagaatacatatgcaaataagtttacttttatttttggtaatactttactggattgtctgaatattgacaatcagtatgcatcatgaagctacatggctaacattgagtactgactgtgtgtgccaggccctgggttcaatgctctacatgcacttatatttcatttaattctctctgcaacctgagatggtatagccacctcattttacagagttgaaactgaggctcagagactgaaagttaagcctgaggttacagtcaataagaggcagagctggaactgaaacctacgtgtgtctgaccaccagttcctgttctgacggcaggctagtctgcatcacagagtgtggggtagatggtgcatgcctgctaggatgggctaggtatcactgtaggtaagaaacagccccaaacgatggaaatgtacaccactgaaggctcttttcctgcccatgctgcacatcctccatggctctcctgtgccctgtgccccacatgccctcatcctgccacgagaataaaggagcagcctccatatgggagctgtcagctgctctaagagatgaaggagagggtggccagtctcaatggctcccaactcttttgcctcgaggtgacacgcttcacttccactcacatctcttgggtcaaagcaaatcccatgggtacatccactttcaagtggcccaagagagaacctgaaatacttggtggactccattaaggctgtcatatggtgtcagcctgcatgggagactgtggaggggcagaggaggagagtggggaactgatgggaaatgacaggaggactaagtcaccgcagatttgctttatcctcagccaggtggagtttgtcccagagccgcacaaaatcatcaccagcatgatgaaacagagtagacttcagaaaaagcagtttggtcggatgtaatcagcagtgaactcagaatcaattgagtgacattgagtcagtaaatctctgactgcctcagttaccccatatgatagttttgaggatgggaacattgagagagttgatttggaaggatatcaagagtaaaaattccaacatttttagttcctttaagttaaatccaggcactgtctttcctgcaagtctcctgttcctttcagattgcacaggtgagagtgctcagattagggctggaggttgtgaactattgctcccacactgacagtgcccccgtgtcgtgcatgtattctgtgcattttcctgtgctaaacactctcccaaaacagcgtggggcctgattcttcctctttgttccaatggccctgggtgactcaagtgcccattcaatgaccaggacacagaggtcttagagagatgctccatgaggccccaggtgcgagcctgtaccctgccggagcatgaggcaagggacagggcatcgtctgtggggatagtgggggtagtggtcagccaggcttggtgactctacttgctcaccagatgatcctacacctgccacctccgatggatccactgcctctgtgcctgcctgtactgctgatgctccagtggataactcagcatcccagcctaggcccaatgccactgaagatggacctgcaccctggggacccaggagtcctaccactcagctgtccccaggagtgcccagaccctcattcttatccaggacctaggagccctacccctggccttccctcatcagccgtaaatgatgatttactgctgttaccatcatcactgccttcagtgaccaagggccttccaaggtgccagctctggaacgaaagatgcccttgggaggtgatgacactcaggtacacgggtgctcaacagattgcttcctcctatcctcagacggtctttgcatgcatgcagccattggcactcccattgtatggaaggaaaccagcccagggtcacacagctggtcagcagcaacatagctggtctcaaatctaaggtgcctggccatgcctccatgagggaccgcctgcaagggaggttgatcctggctttggggagcctttcctgggctgcacgaataacctccattgttcgagaccccaaactctgctcacatcttcctttccctgtctctgcttgggctatgatcacggtgactctagcaacccttcatggacattatagtactctctgccattcacttttggtctaatctgacttcaacccccacttacttggtctctccttttacaaccaacacaaccgaaatctagggcttttttttttttttttctttttgagacagagtctcattccattctgttacccaggctggagtgcaatggtacgatctcggctcactgcaacctccgcctcccgggtccaagggattgtcctgcctcagcctcctgagtagctgggattacaggcgggtgccaccatgcctggctaatttttgtatttttagtagagacagggtttcaccatgttggtcaggctggtctcgaactcctaacctcgtgatccgcctgcctcagcctcccaaagtgctgggattacaggcgtgagccaccatgcccagccaaatctagggctggaacatggctgcagcatataaatagaattgaattccatagttttgttaaccctgttttttgtttgtttgtagttgttgctgtttttgagacaagagtctctctctgtcgcctagtctggagtgcagtggtgcaatctcggctcactgcagactctgcctcccgggttcaaactattctcctgcctcagcctcccaagtaggtgggactaaggcgcccaccaccacacccggctaatttttatattttattagagacagggtttcaccatattggccaggctggtctggaactcctgaccttgtgatccgccgacctcggcctcccaaagtgctgggattacaggcgtgagccaccacacccagcccctgttttgtttttgttttgcttgtttcttagggttgtttttctatttatggtaaaggcattggctttccatttgtagcatcaatagaatatttcctgtttacaataaccttatgtcatagtaaatggtaaagggatttaaagcagtggttttcagctcccagaggcctgagtgagtttgggcacactctgtgtgatcaggcagaaggcctgtgggaagtttagctgaggacagggccaggaaaggtgatggacagtgggggtctgtcctggtcaccagacccctgcgtcctgcccacctgcttggagctccccacccatcacacatgatgctgccaagccctctgggtattgtgggcaaataccttaggagagaagctgatgaactttgtttcttgaaatgcacagattccttggacatccctgagaggtcaatcatgaaggtcaacttggttttctccccctcatttgggttcagaatttaaagtccacacacacaggcagtaagatgattatagataaggacatcatcactcggtttcggatgttaaaatgtctaggtgggttaggggtgatttgagatcacacaaccttgtgccacaaagaggaattcccaggccagagggagacattttattgccatgttatgatcttatcattgagttgaaaggcaatcttgtttcattttggattctttcttatgtttatgtcttataagggcactttgaatttccaagcaaataataattttgaattagcttttaatcattgacttctagcacagttatatgatcagaaacgtgctgtgtgatttgattgctctcaaatatattgagatttgctggaacaaaataagtcaggttaatttttgtaaatgtaccatgcatgcttaaaatgaatgtatctacatttgttcctgagatacaggttgatggacggatggctacatggatgtgatggagatggtttactatcgggaccttccgcatcctgctgatgttttgttgcttaggatatgaatggctgagcggaggctgtaaaacctggcactctgcttgggtatgaggttcttcctgccatcctgccatcatttgttttttatgttttgtcgccaaaagtgaccttgaggaaccctgggagctcaggaaggaaggagcgcccagaagcagggacagggagctggttggggaggaccagaaatcaggtttgtgaaggttccagagaggacctgtccttgcgaggagtgtgggagactgagatgggggaggggtcattggaatgatgcgggcgctacttggcattgtccattgtgaggcaccaccggggtcatcagggattggtggagagggagtataaagccccaggtttgctaagggagggcccagaccgaagaaggtttggcggatagcagaacctttttgtctccctctaattgctcctaagcctcacgctcccttgccccgcgtgtcctgttgcttccctgatcttctccgtgacctgtagctaaaccttccaccagcgcttgagaacttaatttgaaccggatcctttcccagacccctttcttcttctcctccccctcctccacctcctccaggtgcccaacagcccccttctcctttcccttcccttacttccccccttcccctccccttccccttcccctccccctccccttcccctccccctccccttcccctccccctcccctgcccctccccaactcagatccgccccggtccccgtccccttccctcccccctgccctaagccacctccacctctgtcctggccgcctcagggcaccctgaaaggatcatgacatgcggctgcgcttttggctcctcatttggctcctgctgggatttatcagccatcagcccacccctgtgagtagacgctggacccgcggggtttcttcctttttactgggctgtgtcacgcggcatgaaattacacagctcaggccttgtaatcccagcactttagggggccgaggtgggcagatcacttgagtccaggagttgaagactagccagggcatcatggcgaaaccccatctctacaaaaaattccaaaaaagattagtcgggcctggtggtgcgtacctgttatcccagttactggagaggctgaggtgggaggatcgcttgggccgaggagctggacgttgcagtgagctgagatggccccgctgcactcttgtctctaacaaacaaaatggaccaaaacaaagtgaaatgtcatttgatttgtgtcatctggtttgatgacttttttttttttttttttttagacagagtctcactctgtcgcccaggctggagtgcagtggcaagatctcggctcactgcaacctccgcttccggggttcaagcaattgtcctgcctcagcctcctgagtagctcagattacaacgcctggctaatttttgtgtttttagtagagacggggtttcaccatgttcgccaggatagtctccatctcttgacctcgtgatctgcctgcctcggcctcccagtgctgggattacaggcgtgagccaccgcgcctggccaaaatatatacccttaagtgtaagtttactaactttggaaagtacttacaccagcataaaccgaccccctttcaagatctacattattttatttatttatttatttttttgagacagtttctcccttgttgcccaggctggagtgcaatggggcaatatcagctcaccgcaacctctgcttcccaggttcgagcgattctcctgcctcagcctcccgggtggctgggattacagacatgtgccaccactcccagctaattttgta
